United States Patent Application Publication US 2011/0014706 A2 - sequence listing, part 53

SEQ ID NO: 165038 - DNA, 3202 bp, Arabidopsis thaliana landsberg
catggccattaataaaccttggaattccgcttctaaggccgagttgcattgtcgacctttactttgtgcagccataacaaaagttccagttttatttctaatgatccatccaacgttagtttctactccaccttgacggtagctgcagtcgtaattgcacttcatgaaaccatggtttggtttcttccatccgcatcgtgtatgtccgctaggagcccttgtcgtcgattcactctgtgttggtatccattcatatgcatccgttattgccttttgtacatcatcactccatgagcttcctcttctttgatacactaacaaatttctgctcttccatattcgccataggatccataggggtatttgtctcgtgatgtcatccagtctaccattgttgcaacattggagaactagcataaacttgtcatcaaaagataaatggttgtgaaagaaacctgcgtatgaaagtggagagcttttccagatagcttgggcatggtggcaggtaaagaacaagtgatccaatgtctcatctgcactacaacatcttttgcattgagagtctaaaatgatatgtcgccattttaaattctcgcctgtagctagtgaatgtgtaacgatgcgccatagaaagtgtcagatttttggagttgtccaaagtttccaaattgctgctttgaattctattgatccagggggagcaatgatgtctgggagctgatctaggagatgcgtacttagccaataaccggatttgacggagtattcaccattcttcgtgtagttccatcctaataaatctgggaaagacttcgaacttagacgtatattttgtataagtgcggcgtcttcctctactattagttcctcaatgacttctttgttccataatcttgtattctcgtacattaaatgttgaaccattgcatgagtggtgatagtttcgttgcggtggtcttggtgggtgtgttggaatgtttgtctcattgccattgcctatgagagtgcgaagacccttcttaagtaaatcacgtccttctagtaatgatcgccagataaaacaaggctttcttcctactcctgcatgtaaaatatttgttgtttcaaagcaacgaccctagagaactcgtgaaagaagtgacgttggtgactgtagaatcctccaagcttgcttcgccaacatagctgaattgaatttgcttgtatccctgaaacctaggcctgcttctttttttggcagagtcaatcttttccaagcaaaccaatgcatcgattttttattatgtcccttactccaccaatacgttgctagaagagcattgatatcatcacatatactttttggtagtttgaaaacgtcatgtatagaccggtagagccagagccactgtcttgattaatatttccttccccgcctctgaaaggaatcgatttgaccatcccttagtcttttgttgcacacggttgataatgtagatgaagatttctttcttttttccaccaatctgttccgggagacctaagtacttcccaccaccaccatcattatggatatataagatccttcgcagctgagtcttcacttgttgcttaactttggagccaaaggttatagctgatttatggagattgaccgcttgtcccgagacatgttcatacaatttaagaatctccataattgttgagcaagatttagggtgagcatggcagaaaaataaggcatcatctgcaaaaagtaaatggttaactgtagggccagtagagcttatcttcattccttttagtttgttgacagctgttgcatttgtgaggaggtgtgaaaggacttctgagcacataatgaagagatatggcgagagtggatcgccttgtctgattccccgtgttggactgatgtatccgtatggtgatccgttcacaaggacatagaaggtaacagagctcacacacttcatgatccatgtgatatatttctcgtcaaatcccatatgtctcattgtatcctccaaaacactccattccaaacgatcatatgccttcgagatgtcagtttttactgccatgtaggaccgagcccaacgttttcttgactttagagagtgaagcatttcatgtgctatgatcacattatccataatatttcttcctgggataaaagcagcttgagtttctgatacaatgcctgagagatggttcttcagtcttcccaccagaattttggagatgattttgtaactgacattacataatgcgatggtacgaaaatcactcatagttcgcgggaccgccggttttggaatgagacatatgttagtatgatttgttcctgcttctagcttcccttgtgctgaaaaaagaacgaacttctttgaacactgcttccttgatgtgttgccaaaattgttgataaaaagcgcatgtgaacccgtcaggtcctggtgccttatcctaccctatgtcaaaagctgatgttgtaatctcctcatctgaaacatctcttaccagttcattgttttatttatctttttttttcaatcaaaaatggtggaaatgtataaataacctttaaaaaaaataaaaactacaaatccaaccaaaataatccgacccaagcccaacaaaataaataacccgggccaagaaacaaataacactgtatttttaatatgtaaaataacagttgaaccagttgaactagatcagttgaaccatttgaactagatcagttgaaccatttgaactagatcagttgaaccaatttcagttgtaccatttattctgcaactatggattgatttggggagcaacacgattcaattactacattggactgactaccattgcaaatatctaaacaattattttcgtttcgttcacttactttcttcaatcgagacctaaagatagagtgtaacaaacaaggcacttgtaaaaaaaagaagacgctgcgacggaggaaaagtcgaccggtgaaatatatgagtagaccggagatggtatctctaaaaaagaaacgtttccagagaggacgaagtaaatatcgagatatcgatctagattttgatccaacaatatcgacggaggaagacgcatcaccggagaatcgatgtctgccgaaatggatgacccggccagagatggtttttccagagtcgatagagccaattgaatttatacaccaaaaaatggtaaaaaagaaaat

SEQ ID NO: 165039 - DNA, 487 bp, Arabidopsis thaliana landsberg
gcggggcattgctgttgatctacgagcgcttcgtcgagcgcgcggagatcattcgggagaaggggaccaaccgaagcaagttcttccgcggccaggtggacaaatacacgtgggtggatattggctcctcgtacttgcccagcgacatcattgccgcctttctggcagcgcaactggaacaggccgacgccataaccaggcgccggctcgacatctggaatgtttaccacgaggctttcgcggaacttgagaaggaaggcaagctgcgccgaccggtgatccccgcgcattgcacccacaatgcgcacatgtattacctcctcacggccagcctgaaggaacgcacggggatgctcgacagcctcaggcaggccggaatcggggctgtgttccactacatcccgctgcactcatcacccgcgggcatgaagtacggtcgcacgacgacgccgttgccggtgacggacgacgccagcgagcgattgat

SEQ ID NO: 165040 - DNA, 1742 bp, Arabidopsis thaliana landsberg
attaaattaaataataatcgatggctgaaatttggttcttggttgtaccaatcctcatcttatgcttgcttttggtaagagtgattgtttcaaagaagaaaaagaacagtagaggtaagcttcctcctggttccatgggatggccttacttaggagagactctacaactctattcacaaaaccccaatgttttcttcacctccaagcaaaagaggtaatttcgaaaccttgtccctcaagttacttttttagttatgctcttagatttagaagtgtttgatcttctgatgtgtagatatggagagatattcaaaacccgaatcctcggctatccatgcgtgatgttggctagccctgaggctgcgaggtttgtacttgtgactcatgcccatatgttcaaaccaacttatccgagaagcaaagagaagctgataggaccctatgcactctttttccaccaaggagattatcattcccatataaggaaacttgttcaatcctctttctaccctgaaaccatccgtaaactcatccctgatatcgagcacattgccctttcttccttacaatcttgggccaatatgccgattgtctccacctaccaggagatgaagaaggtatatatatgttgagatgtatacagcaaacgaactcacacattcaggttctctgagatctcctaatacacaagataatcttgtctcttgcagttcgcctttgatgtgggtattctagccatatttggacatttggagagttcttacaaagagatcttgaaacataactacaatattgtggacaaaggctacaactctttccccatgagtctccccggaacatcttatcacaaagctctcatggtaatctcatctctggaatgaatgaataaatgtaccttaaaagcaaattttaacaagtactgacaaaaacttgttataggcgagaaagcagctaaagacgatagtaagcgagattatatgcgaaagaagagagaaaagggccttgcaaacggactttcttggtcatctactcaacttcaagaacgaaaaaggtcgtgtgctaacccaagaacagattgcagacaacatcataggagtccttttcgccgcacaggacacgacagctagttgcttaacttggattcttaagtacttacatgatgatcagaaacttctagaagctgttaaggtatgatcacatgcacagactattttccactctcttttgtgtatatatacacttaaatttatgtatacataatgattgtaggctgagcaaaaggctatatatgaagaaaacagtagagagaagaaacctttaacatggagacaaacgaggaatatgccactgacacataaggtaattgataaatcataataaaatttaggttcgtatatatgaaccaccattaatatatatatatacatcacatgttttaatgttatttgaaatataggttatagttgaaagcttgaggatggcaagcatcatatccttcacattcagagaagcagtggttgatgttgaatataagggtacaattatatcatttcacactagtagaacattcgatatatttaagcttttttgttattatcaaaatgtggtggtccaaatgaatataactcattaattttttttgtaaaatgcatgtatgcaggatatttgatacctaagggatggaaagtgatgccatgtttcggaatattcatcacaatccgaaatattttccaaacctgagg

SEQ ID NO: 165041 - DNA, 2146 bp, Arabidopsis thaliana landsberg
  unsure (1)..(2146): unsure at all n locations
atggcaaaccgtttcctccgaccaaacctcatccaccgtttctccaccgtgagtcccgtcggtcctccgaccaccgtcatcccagaaatcctttcctttgaccagccaaaaccagaagttgatctagatctctccgaccaagctcgactctttgcttctgtcccaatctccaccctcctccgctcaaccgcaattctccatgccacgtccataggccctatggtcgatcttggctcgtggctcatgagttccaagctcatggacacgaccgttacacgcgatctagtactccgtatcgtgaaagggacgttttacgaccatttctgcgccggtgaagacgcggcttcctcagcaaggtgcgtgagtagcgtgtatgagtcgacgggacttaaaggtatgttagtgtacggcgtagaacacgctgaagacggtggcgcatgtgatgaaaacattcaaaaattcattgaaaccgtcgaagctgctaaaaccctaccttcgtctcacgtaagacattctcaaatctattttatttgtcttgtctcaaaatttcatcttttagactttttctatacatttctctattttttccaaagcaaactcttcataagttttcacggtaatttgttttctttctgttttggtttagaattactttaattattcgatataaccatcactttaatactgatcaaatatttttagaggggttacatatataatcactttgtgcaagtcggatctacaaacaaaccactatacatgtttataggtgtagtcgtgtagaggcaaatggagagaaatgaggtcaattgaccccaatagttctttgctatgtttatattaattttctgttggataatttgacacaaaactacctccaccagttcgattcttctatatgttttcagatatttttattttttgaaaaatgatgccactagattttttgttttcaatatctgccactccaaaaacgtggagtaaccgaccaattataacctttataagaaatacaaatatataataaattaaattacaaaagagactaccccgtttaataaaccttaaaaaacaaaaaaagaacaccaacttgtctgatttttttttcgataacgatttcttctttgtttgttttaaacgacttgtctgaattttagttttgtgttttttttttgtctgtaaatatgaaataacaatcaaagtcacgtcggttcctcgtcagacttcaaagttaacacgttaatcacgcaatgaggacatatttgaatcagaattgtcaaccacacgctaggaatattcctcgtttacaataatatcggtttaaaccggttctactgctaataaactttttattgggttttgtctgaacagttaagctcagtggtggtcaagatcacagcgatttgtccaatgaatgtcctaaaacgggttagtgatttgcttcggtggcaatacaagaaccctaatttcaaacttccatggaaactcaattcatttccggttttctccggcttaagtcctctgtaccacacaacgtctgaaccggaaccattaaccgtagaggaagaacgagagcttgaaaaagctcatgaacgcctcaaatccgtgtgtcttagatgtcaagaatcgaacgtaccgttactaattgatgccgaagacaccattctccaaccagcaatcgattacatggcgtattggtcggcgattatgttcaattcggataaagatcgacctatagtttacaacacgattcaagcctacttgaaagatgctggagagagattacacttggctttacgagagtcagagaaaatgaatgttcctattgggtttaaattggtgagaggtgcttatatgtctagtgaagctaagttagcagattccttgggttacaagtcaccggttcacgacacaattcaaaatacacatgattgctacaatgactgtatgagtttccttatggagaaagcctcaaatggatcaggcattgcggtcattctagctacgcataacacagactcgggtaagacattgaaccatacttattactccataaaaaaatcttacacatgaaaattcattntttctttttatgatccatgataggtaaactaggggcaagaaaagcaagtgagctagggatcaa

SEQ ID NO: 165042 - DNA, 1981 bp, Arabidopsis thaliana landsberg
tgacatttttttctaagaagttttggacttatggcaaaaaccataacatttaatttactcggttcgagcaaagttagaagggatctcttctctaaactagatgaatttaatctggtcgtgggtcatacctttagaagatgtagggcatttggccttgaacttctagatattaaaaaaaaaaaaaaaaatactctccactcaaacgcagcttaccctcgcgatttcaggatccaaaaatgttttagtgcaaccaagtctagtgctgatgtttggtacctctggattcaaagacattatagctagtgctgagtatgattgttggtagaggtactggagatgcagattctttaatgaatttgattacatataaccctttagaagagaagagatttgatatgtataattcatgtaaggtagttcatagatgacgatattttcacgtttgacatattcatcgtgacaagagggttgcttgggtttgaggtgttggaaacggtggtcgaattaatggacatggtgattaaaggtttaggataaagatgggtatgataccacattagtctattaattaccatgtagaaggttgaaatattgaatgatttattgtaattgcttaaaacacgaaaacgtacatcattttttttttttacaatatagggaataaacagatttactccaaatataaactgatacacaacaagtcaacaacatgtatatctatgtacacaccgattacaattctgaataatagttttcggaagtttttgctaatataggaatttcggaagtgttttggtaattaatgcattatggggaaatatgtatattaattgatatatattggaaaattaaggtatacttaaattttatgtgaaaaccaagattaaaccggtctaccaagagtgtctatatatataacatatatcgcgacgaaagaaattattaaagttgaagaggttgaacaaaatcaatagaggagaaagagagatcaaatggagtgggagaaatggtacttacatgcggttcttgtgccaagtgctttacttatgatgttttgttaccacatctatttgtggtataaggttcgaaccaatcctttctccaccctcctcggcattaactctcacggccgccggatttggatttctgctatgatcaaggtttttcataatcatcgccattgcattcttcttatcaaaaacgttacagttttataacaatatgatggtataatttagtcgttattgtcatatttcttagagatttgatatgaggattaataagttttgatggtagagttgattagtcttggttggtccgaaatcttctcataaaagaaaacatataagctatatttataattggagaaatatgcagattggttattgtttgttgtttaatttttcaggacaatcagaagacaaacatattggcggtacaaacactgcgtaacatagtaatgggagccacactgatggccacgacctgcgtgcttctctgcgcgggtctagccgcagtgttaagcagcacttacagcatcaagaagcctctaaacgacgccgtttttggtgctcatggagatttcgccatatccatcaaatacctaacaattctcacaattttcatcttctccttcttcttccactccctctccatccgtttcctaaaccaagtcgccattctcgtaaacatccctaacttataccctaatccttctggttgcttcttcctcacgtctgagcacgtcagcgagatgttcgaaaagggtatctttctcaacacggtaggtaacaggttgttctacgcaggcttttctctaatgttatggatctttggtcccatcctcgtgttctttagcgttttggtgatggttcttgttctttctcacctcgatttcgtgtcacgcaacaacaataaagaaaaactacgtatagtggatatacgtcgttcctctgattgtacgaatggtggtgaagactag

SEQ ID NO: 165043 - DNA, 4086 bp, Arabidopsis thaliana landsberg
  unsure (1)..(4086): unsure at all n locations
gagtatcaacaggactgcccacatcatggcttcaatgaggtacaacttcttggtacgtttttcaatggagttgattagagataccaaatggctctagatgcagcgagcaatggtaacttcaacacgagatatccagttgatgctactgctctgatagagaacctagcttgtagtaagagcaccaagaatgctgactttgagaggaaaaagattgctggagctgtttcaggtaatcaaattgcagaggtacatgctaagctggattcggttcacaacctgcttacagggaagaagcatgtctaccttgcagctgaggatgagaccattgagccttagactgagttagaaaagggagtcttctacatagatgctcagggctacaagaagtttggacagccacagggcaacttgagtggcaacaggtttacaaggaactagagttcctcgaactacactccaaagcctgctttctagaagacatttccttagagcaacttccagagaacctatggtaattcagtttaccaagccccccatccaccctcatcagagaccagaatagaatccatgcttgagcagattcttgagagccaaacaaagctcgttacggagtttaatggcaagtttgatgctgtctacatagatcttaatgggaagatcgacaatctgagctctcgctagaagaagctagatgtataggaagctcaaactacacaatctatcaagagacaagagggttttcttcctggtaattctgatgctaatccaaggaagagttgtaatgccatcttgatcagagaaggagatgatgtgtgggaagaattggatactgaagacgagttggagacgacaccctcctgtgtcgatcaacaccatatgggacgctcttctcagagacgactcaatacgacagtgtcgatcgatacccctctagtgtcgatcaacactggatcaggactgcaccttgtgaggtgcaagaacctatgcagcccaagtctgtctacactcctcctgtcccttatccaaggaggcgtcgttctaagcaggagcttcatgctgctaagtgcacatccataatcgaaaagatcctccacactcttcctaaggatgcttcagagacatcttccgcctcactcaacaggtatgtcaagcgacttgttgacaatggaattagctcagatgaatcgttttagtgtgttttacatacttaggacgattttgcattaggattgcatgtgcatggcatatttggttgttttcaggtactttggatgcttttgaagttcaaacagaggaaaaacagaacatgaagtcagaatgcccaatgacgccttcaacaaaagtactctatcgcagcctctgagccctgccagggtcaatcactctatcgcaaccccggagaagccaacagctcagtttcactcagtcgcgaagccggaggaatcacccactctatatcgttcacgtggcaatctttggttggtcccggactttcgctgcgggattcgacaccaacaattagccccccaagtctttcgaagtgttatccttattcggaagactttaatgctttaatgtacaaagattgcgctcgatgattgtatgatttcccgccaaaatcttgttactcccttgattccgacactgtccatatttacccgtatgacatctgttaccattatgaccacatcttaattatttaccattaaagcgggaaaatccttcaccttcccccacgactcccaaggcggttccatcatcatcaccagcttgcgtaaggtaaatttattttactctctccttattatttttcactctttatctttcttttagaacaaagttcctttctattttctctctgtaattttctcttctaagaatcaccggactatccattttctcacgatgaattctgaaaatgaaaggcccgaatccccatctttcgaaaatgtggttctagtaacgacctttacacccggccgaatgacatcgccagtccacattatcaatctacatgcactcttcaatcccttaaccgactgagagaactctgccgaatcccacccgaagttatgagggattcacagatgccagagcccaccgaatcgccggaggaccaccgtcccggattcttttgcgtctatgaaatctacttcaaaggttgcggattgaccttcccccttcccgaagctttggttcggtatttggctgctcttgaaatcgccctacctcaattgacccctaatctcctccgcaccatcctatgtattattaccatcgcggcggaggccggtttcgtcatcggggttcccgagttgaatgaacttctcagtgtgagagttcgtcgaagaaaactgggtacttctcggcgtacccgaacgccaatcagaacctcatttcgaatctcctgaacaaggatgagaattggcatcatccttggttcctagttaaaaagagccctccctcgattggaaacctttccgatatgcttccatcgaagtggtcnnnnnnnnnnnnnnnnnnttaggtcacgtacgatttttgcttatccttgtttctgatttaatcgattttattgctttcaactcgcagcttttatcactctaaccctcccgaatttaaccgtagagttcgtcgaatttttcaagatcgtcattgaaggagagaccctttggaattctttcactctcgaccggttcgtcgaagccaatcacaagctcatgacgaatcctcccgggcaactacttcaacttccaccacctccacctctgcctcacggaacttctgctagggccatcgcttctcgtcgcaagactttatccaagccgatgacagaggcttgtgaagcaaacaagtcgttccttcagtccgctgttgacaagaaggaatatagcagaactctcctggttgatgatggtagcgctgaaggtgcaagatctgctggtgcatacagacctacacctcaccgtgaaggccatggtagccggtcacctcgcagagaccaatcaccacgtcgcgactcgcctcgacctgcttctcagactaggttaagcagcgagccgatagcagacctgtatcggaaaaagagggaaagagcaacccgcagcagttcttctcctaaaagagataagacgagagctcgaactgaccgttctcctcaattgtctcccccacctcgctcaatgggtccccctcctccagtcatcgcatcttcttcttctagatctgggggtgaattgactggtcggagtgcagatcctcgacaggaagaggctgagccccgagatgccaaccctaagtctaaggccgttctagttcctcaaaccaaatcacttgcaggttagaaattaccatttatcctctttacttgctacatcgtttgattcatcggcctaacttctcatacacgggttcgaatctctttattactttgacagcgatggaaacagagggaaacttcttccaatgcttcaagactcggaaagacacaatcctgccaacctttgacaggtggcgtcctgcaattcgcgagcgattcctacttcacgcccatcactcatctcgggttagctctctttatttgtgacctttaagctccactctttcgcttatacgctaattcacctttgtaacccttggttcaggcaaacatcgaactcaatgacatgattaagtattatgagagattgttgcttgatagggaacaggatgttatggcctggaaagataagttttcttctcttgagtccgatctacgctcttccactgaagtcatgcaaaaattggaagatcaattggacaatctttccttcaaactcatgaaatcgaacggggagttgcaggatcagtatcagaggtatgacaagatccaggaggaactctcgaatgctcggggcagactctcagaatctgaatctagtgcttacgacttgtccaaccagctatccgaattgcaggccaagtacaaagcaatcgccaaactttgagatgctgagttggctaagtcggcgtctaaagccagaaatgaggtgaagggtcgcaggatggagttgattcaaggggccattcttttcattcaaacctaag

SEQ ID NO: 165044 - DNA, 844 bp, Arabidopsis thaliana landsberg
  unsure (1)..(844): unsure at all n locations
tggttcttacatatttgtagcctctagtatcttgcataatgatctttgtaacccaatcaggagcaatatttgactaaagatgtctttgtaccccaatcaggattcatacttaagtagctacttacgttaatgagctggaaactatgaaggctgtagtattatcccccaatgatggcttgtgttatggcagaaaagttttgtgtgggtgttctgagagttggcttcttattttcatttatgcaggaactgagaatggggaaggaaatcatgctacaaatgagcaaatggcagagtccagaacctctctgcctctaaacccagcctcntgcttcatcatatagcaaagaaagaacagtcgtatggggatcttctcctgaccacctggaagtgccgatgaaagcataccatcaacattcgacctgctcagattctccttgcgtatctgaatccggctcagacatcttcagcaagcgagaagtaatacagaaactgaggcaacagctgaagagacgtgacgacatgatagttgaaatgcaggaacagattctagagctgcaaaactcgctaaacgcccagatgggacactctagccatatccaaacacagctagacgcaacaaacagggacctgtttgaatcagaaagagaagtccagagactgagaaaggcaatcgctgatcactgcgtgggacacacaggtagcaatggttggagtggcgatgtgaacagcgaaaacaactacgagtcaccagaaaatggaataagggatggagaaagaatagagatgttgagaaaagaagtgggtgagcttaaagaagtgatagatgggaaagagtatctactta

SEQ ID NO: 165045 - DNA, 1105 bp, Arabidopsis thaliana landsberg
tgagacattggtttcttaaaggtacgaggttaagtttagataataatggttttttaaagctttatcaccaatatattgagaaccttaatgaaattggtcgtaatgtagatagggttttcaaatttagcaatgtaagtagaatctttttccctctacctataagtatccgttttcaggttttgatcttagatgatgatgatgatgatgatgacatgtatagcttgtttggatactagtttgaaagttgttcttgtggttaatataaatttcaggaccggtacgtgataccggataattctagggagcgattgagaggcgaggttgaaaaactagttgctgaaagaaaaatagagaaggtaactccatacattgcctaataccaaatgcaagttgcgagatagcgttatagaattttgtttggtcagctcagtaaaaaaaaacttgcaaatgcaggtaggaaaccgctacatgatgatgatgccccaacgtgttcctgctactagagaagattccacaacgccacaacgtgatcctcaggcagaagcagtagcaaaactagtcgcagagacagaacacttagagttccaagcaaaagaggctcaagaacttgcagatagatacagtttgatgctaaattccgaatgcataatcttggagttagccgtagaaatccttaaccgatgtaatgtccaactcttatccacatcatcatcatcatcatcataaccatcatcatcatcatcactggccttttgctttgttccttgcaggtgctaatggtcaaatgattttcctctgtacttctctcgtaccaagagcaccagaagaaaatcctcagatggacgcagtagcaaaattaatcgccgaggcagaacacttggagttccaagcaaaagaggcacaagaacttgcagataaacacgcccagttgctagaattagaaagcgagataatcttgcagttagccgtagaaatctttaaccgatgtacgtaatgtccacctcttaaccacatcatcatcataattcaaaaccatcatcatcatcactgcctttttgctttgttccttgcaggtgctaatggtcaaaagattttcctgcggtaa

SEQ ID NO: 165046 - DNA, 890 bp, Arabidopsis thaliana landsberg
atggagaggaaacataaccctaattcctggtctgatcttcctcacgatctcttgaacttggtgttcgaacgcctcagctttgctaatttcaaccgagccaagtgcgtgtgttcgtcttggtactctgcttcgagacaatcggtgcccaaaaatcagatccattggctgattctcttccctgaagacaacaacaacaagaacaacagttcatgcacgttgttcaatcccgatgaaaaagacaaactttacaaaacgcaacatcttgatgaggaatttgcaaagagtgtttgtagggcaacctatggaagttggttcctaatggtagatcctctgtttaatctctatattttgaatatctttacccgcgagagaatcaatctacatcccgtggagttactgtggaaagattacgagttaggcgtttcaagtcgcaaccgaatgaagtcgagaggtgggaacgtacgatctcctgtgttttggattgacgagaaaaccaaagattatattgttctttggggacttagagattggtgtgtattttattccaagaaaggagatacctcgtggaatcaaatcccccaaactccagactgttaccgtttgcgttacaaggatcacaagctttacttccaggctacttctctagtttcaaaatcttcgatctttctggagagattccacaacaaacctttgactcgcttgtttttgtggaccattgtcactttcgtcgttgggtcctttattccacacttgtagtcacactcacaggaaaagtcctcaacgttgaaaaaatgatggactgctctttcaccgttttcgaggtttgttcatcaggaagacggattaattctctgggagatgagtcaattcttttggaacaagggatcact

SEQ ID NO: 165047 - DNA, 4416 bp, Arabidopsis thaliana landsberg
  unsure (1)..(4416): unsure at all n locations
gaccttgggcggctgggcaagcaggtaaacaggtgggaagctctcatcataccaaaaatgtgatgaccacatcaagacctttggagttgcttcatatggacctcttcggaccggtcgcctatctaagtataggaggaagtaagtatggtcttgttatagttgatgatttttcccgcttcacttgggtattctttttgcaggataaatctgaaacccaagggacccttaagcgcttcctaaggagagctcaaaatgagtttgagctcaaggtaaagaagataaggagcgacaatgggtccgagttcaagaaccttcaagtggaggagtaccttgaggaggaagggatcaagcacgagttatccgctccctacacaccacaacaaaatggtgtagtagagaggaagaataggatgctcatagacatggcaaggacaatgcttggagaattcaagacgcctgagcgattttggtcggaagccgtgaacacggcttgccacgccataaaccgggtctaccttcatcgcctcctcaagaagacttcatatgagcttctaaccggtaacaaacccaacgtttcatactttcgtgtatttgggagtaaatgttatattctagtgaagaaaggtaggaattccaaatttgctcccaaagttgtagaaggctttttgttcggttatgactcaaatacaaaggcgtatagagtcttcaacaaatcatcgggtttggttgaagtctcnnnnnnnnnnnnnnnnnnnnnnnnnnatggctctccaagagagcaagttgatcttgatgatgtagatgaagatgatgttccaacggccgcaatgcgcaccatggtgattggagatgtgcgaccacaagaacaacaagagcaagatcaaccttcttcctcaactttggtgcatcccccaactcaagatgatgaacatgttcatcaagaagaggcgtgtgatcaagggggagcacaagaagaacaaaatatggaggaagaagcaccacgggcccctccaaatcaagtccgagcgacgatccaacggaatcaccccgttcaccagattctgggtgacataagcaagggagtaactactcgctcaagattagctaacttttgtgagcattactcgtttgtctcttctattgagcctttcagggtagaagaggccttgcaggatccggactgggtgttggccatgcaggaagagctgaacaacctcaagaggaacaaagtttggagcctggtgccatgtccaaagcaaaatgttgtgggaaccaagtgggtgtcccgcaacaagcaagacgagcacgggtagtgacacgacacaaggctcgacttgtggcaaaaggttatgcccaactcgcaggtatggatttcgaggagacttttgctcctgtggctaggctagagtctattcgaatattgttagattatgccgctcaccactctttcaggttgtttcaaatggatgtgaagagtgctttcctcaacgggccaatcaaggaggaggtatacgtggaacaaccccctggctttgaggatgataggtaccccgaccatgtgttcaagctctctaaggcgctctatggacttaagcaagccctaagagcatggtatgaatgccttagagatttcttaattactaatgctttcaaggttgggaaagtcgatcccactcttttcactaagacttgtgatgatgatctttttgtgtgccaaatttatgtcgatgacataatatttggttcttctaatcaaaagtcttgtgaggagtttagcagggtgatgacacaaaagttcgagatgtcgatgatgggcgagttgacctacttccttgggttccaagtgaagcaactcaaggacgacaccttcctctcccaaacgaagtacacacaagatcttctcaagaggtttgggatgaaggatgctaagcccgcaaagacaccaatgnggactgacggacatctcgacctcaacaaaagaggtaagtctattgatcaaatggcgtaccggtctatgataggttcattacattatctttgtgctagtaggccgaacattatgcttagtgtatgcatatgtgctagatttaaatccgaccccaaggagtgtcannnnnnnnnnnnnnnnnnnnnnnttaggtatttagtttctacgccttgcttcgggatctggtaccaaaaggggtctacttttgacttaattggatactcaaactctgactatgccgggtgcaaggttgataggaagagtacatcagggacatgccaatttctaggaaggtccctggtgtcctggagttccaagaaacaaagatccattgccctatccatcgctgaggccgagtacattgccgcaggaaagtgttgcgtgcaactgctttggatgaggcaaacccttagggactttggctacaatctgagcaaagtcccactcctatgtgacaatgagagtgcaatccacttggcggataatcctgttgaacacagccgtactaagcacatagacatccgacatcacttcctgagagaccaccagcaaaggggagatatcgatattgcatatattaacaccaaggtattttttgccgatttttttaccaagcctcttgatgaacaaacctttaacaaacttaggcatgagctaaatattcttgattctcggaatttcttttgttaacttgcactcatagctcatttgtatacctttgatcatatctccttcatatgctatgactaatgtgttttcaagtctatttcaaaccaagtcataggtgtattgaaagggaattggagtnnnnnnnnnnnnnnnnnnnnnnnnnnnnnnnnctcatccttcgccgtcactccaagcaactctccattcttgggggagaaaagcatgagcatcaaagaaaaggactttgtctttggggggagagagtaaaagcccaaagcaaaaggaccggacttcgtctttggtataatcttaactcatttatttatgaccaaaggggaagatagtacttcgatgggctctaatgattccgtttttggcgattcatgccaaagggggagaaaatatgagcccaaagcaaaaggaccgcaccaccaccaatttcaaaaatttagtgctttccaagagtatttatcaactggtatcctattgtgttcaaaaggaggagaaaattagttttcaaaaatgtatatcaaaaccctcttgaacactaagaggtggatctcctttagggggagttttgttaagtcaaaggaaaagtatttgaaacagggggagaaaatttcaaatcttgaaaatgctttgcaaactcttattcatttacctttgactatttgcaaaagatctttgaaatggatttacaaaagggatttgcaaaaacaaaacatgtggtgcaaacgtggtccaaaatgttacataagaaaggatcattccatgcatatcttgtaaagaagttatattggctcaattccaagcaacctttacacttacattacgcaaactagttcaattatgcacttctatatttgctttggtttgtgttggcatcaatcaccaaaaagggggagattgaaagggaattaggcttacacctagtccctaattaattttggtggttgaattgaccaacacaaaattggactaactagtttgcccaagtgtatagattatacaggtgtaaaacgttcacactcagccaataaaaaaagatcaagttttggattcatcaaaggagcaaaggggcaaccgaaggcacccctggtctggcgcaccggactgtccggtgtgccacggacatgtccggtgcaccagggggactcagtttcaaactcgccaccttcgggaattccctagaggcgactcggctataattcaccggactgtccggtgtacacggacagtgtccggtgcgccaaaggaggtcggcctcaggaactcgcctgcttcgggaaactccaacggcccgtccgctgaaattcaccggactgtccggtgtgcaccggactgtccggtgcgactccggagcaacggtcatctccgcgcaacggctctctgccgcgcattcaatgcgagtctgcgcgcgcaggagtcagaatcgcccatgctggacaccggacagcaaacagtacctgtccggtgtgcaccagacaccaaggcggcccacaagtcggaagctccaacggtcagaatccaacggcagtgatgacgtggcaggggcaccggactgtccggtgcgccatcgaacagacagtctcccaacgaccacttttggtggttggggctataaataccccaaccaccccaccattcattgcatccaagttctctacttcccatctactacaagagctctagcattcaattctagacacaccaaagagatcaaatcctctccatattccacacaacgccctagtgattag

SEQ ID NO: 165048 - DNA, 2718 bp, Arabidopsis thaliana landsberg
taattttgctggatctctcattttttaattcgaaaacgaaaaaaaaacaaatactccttgaaatcttttctctttctcttcgattccttgaaaccgttctctcctctcctctctcgattctttgtggaaaactcagagaaaactcatctctttcacttcaatcttctcccttctctctcaattctcaacaagaaccctaattctctctcttttctctcagaatcgtttctcctccttctgtaaccctaaccctaatgccgccgaaaacaatgccgcctctaaaaaagaggaagagaggagttggaacgaaggagaagcctgcaccggcaacgaagccaatcgttgctgtcacgaaggcaacggcggagcctccgacgacgacggaggagccgtcgctgacagagaaagatccggagaatgttgaggaagaagagagcgaagaagaagagaaagaagaagaagagaaagaagaagaagaggaagaggaaggggaggaagaggaagaggaggaagaggaagaggaggaagaggaaaaagaagaagaggagaatgttgccggagaagagtcctccgatgatagtactagaagcttgggggaagagacctccgccgatgagaatatggatgaggagacatcgactgcagtggaaattccggcggctatggtaaggatttcgagtcaattctcagtatttgaatggtttgaaactggtagaacaggataatactatgatttctagataatactgtcattactaggatataactatgcgttttttggtcaaactgtcaatactaagaaacaactacttgtatgatttctggataatactgtcattactaggatataactatgcgttttttggtcaaactgtcaatactaggaaacaactacgtgtatgatttctggataatactgtcattactaggatataactatgcgttttttggtcaaactgtcaatactaggaaacaactacgtgtatgatttctggataatactgtcattactaggatataactatgtgtatgattctatgtaccatcggtagtaatatgaatgaatgtctgttgcaggagatcgaccaggaaacagaagcaataccaccgctgagtatgtatttcccgccctcggaatatgtgaagaaaatcaagctttcaactcggtgctatattcatgaagtgttgactacattcgataagttggagccgccgatgagcaagtccgagagggcatggtttgagaatcatccaagtttccaatacatcttccacatgccaagagacccgaaccaccgacttatggggatgtggatgctccttctgcgcacggcgcattgaaaggaaaaaagaagcgtggttcatcgtcaatggcgtacccatccgatatgggatattggaacatgcattgatatcgggcttcaattgcaagaactatacacttgggtataaaaatacgggaaatttggagttcaagacgaagcatttcaagaagactgttgtgaaacgcgaatgaacttgctgcatgcatgcgtaattctcatgttcgttgcatgtgcaagtaaaacacgttatcaataattctcattttcgttgcatgtctaaggaaaacacgttaccttgaattggttttttaaataaataatgagaaaagttttgtgtcttaatctgtgtgcaaaagttaaacatcaattttgctggaacagagggagtacaagattggtcgtattccacttggacgtaatgatgcggctattattgtgaagtcagtgtcagacgccacaacttctttgtggaggcctacaccatcagttttcacacttggtgaagctttagggaacaagattgtctggcctttcgataagatcattctagacagtgatgttgtatttccccttctgagaatgagaatacaggatcttcagtaatgtctttttcccatcacttgtcgattatctagctgaacctaaacacatatacctactcactttttatttatgcatcatgccttaggctaaagattcatcagccggtaaaatcatcataattgattggaatatggctgattctgtggttggtgagggtcggttgtgttcaacagaccgactagaacttgtgaacaatatgcctcttggtccttctgctggagttgttaagtttgagaaactgtttaacaaagccgcatatttgtggagaccaagtccaggaaagtttgttatgggagatgtactaaatgagaacattgcatggccacttcatagtatacaatatgtgaattcatctcctccacggtatgaaacagcatcagaagataaaagaccatcaccaccactggtaaatttctgcactttaacttacagcctataaaatcacttaagtattatttctgcttgagtgcttggtattatttcttcctgaatgcttggtattatttttgattcttgtagagcttaagtaacagtactgctagcaccagcaaatcaaccaagaagaaatgcatcttgttagtttacaagaacaaaagagaaagagtagcagaaggaagagtctgttcctctaatccttcagacatagtccatcatatgcccctaggtccaaatgcgagcaaagtatgggtagaaatttcaaagattggagatgcccctgtgtggagaccaaactctgaaattcaaaccatagcaaatgcagtaggtagcattgtggcttggcctactgatg

SEQ ID NO: 165049 - DNA, 1056 bp, Arabidopsis thaliana landsberg
ggctgacggtggagtccaactcattgtaccgccggggagttggttcactttaagtttcaacctcacaagccattttactttgtttatccagcaaggtgcaactattcttgcttctcaggtaataaatatatctaagctcaaaattttagctagtatcgtacacctatttatgaatgcactaaaaaatatcaaccattctatttgagataaataatcacatttggttttatttcgtttgtaacaaacaggatgagtctgaatatcctatgattccacctttgccgtcatacggagatgcaaggtttactggtttagtatacggaagtaacctaaccgatgttgttatcaccggtaagcacaacaaaacttaaatcattaaaatggtttgatggatatatatatatgagattgaatcaaaattatatatttagtttataagatcaaatttgttgttaggtaacaaaagaacgactaatggacaagggaagtcatggtggttgaagtatcgaagtggcggtttcaagtcgatatcaagacctttgttgatcgaaatcatcttctccgaaaactgaagaggtgacactaatcaacacacaatccgctatccgaatcaaaaccgctataggacgtggcggttacatcaaagacattttcgctaggagatttacgatgaagacgatgaaatacgttttctggatgaccggttcgtataagctgcatcccgtaggcgggtttgatcccaaggcgttgccggagattagcaatatccattaccgtgacatgaccgcagaaaacgttacaatttcggcaaagctagaagggatcaagaatggtccatttacgggtttatgcatgtcgagtgtgactatagctttgtcgccggacccgaagaagctgcagtggaactgcacggatgtctccggagttactagtagggttacaccggagccgtgcagtttgttaccggataagagaactacaatggactcagactgtgattttcccacggataagattcctattgagagtgttgtgttgaacaaatgttatgcttag

SEQ ID NO: 165050 - DNA, 1507 bp, Arabidopsis thaliana landsberg
atggatcctaaggggaagggaatcgtgatcaacgataaagagaaggagtccttcgtcaacgagcccaaagatgacaagcctaacgactctggctcgggtcatagacggaaggaaggaaagaagaagaagacaaggcgcatcaaggagatcatatactacgacgatagtgatgagtctacttcttcccaaaaggatgatgacaacgactacaaaaagacggtcaattcaaacttttcatttgattattctcgtattcaacatagttcgaattcgcatttgctttccattcctcttggaaacctccacacttcgatggggaggactacagattttcgcccacaaaatgcgtagtcatctattctctctccatccaagcatatgggagattgtagagaatggaatgaaatttgatagctcggatagccctatgtttattaatgaacagattcataaaaatgcacaagctactactgtattgctagcctctttatgcagggacgagtacaataaggtgagcggcttggacaatgccaagcagatatgggacaccctcaagatttctcacgaggggaacgacatcaccatgctcactaaaatggagttggtggagggcgagcttggaaggtttgcaatgataaggggcgaggagccaacccaaacatacaaccggctcaagacccttatcaacaaaataaggagttatggaagcacgcgatggacggaccatgacgtcgtccgactattactaaggtcctttaccattcttgatcctcatttggtgaataatattcgtgagaatcccaggtacaccaaaatgtcgcccgaagaagtcctaggaaaattcgtcagcgggcgaatgatgattaaggaagcaaggtacgtggacgacgccttgaatggaccgatcaacgagccgcaacctcttgctctcaaagcaacaagaagcaaggaggcgctacctagcaaggtggcacaaattgaggcagccagacttaatgatgaagagatgctctcatcatcaaacgcttcaagacggtgtaaaaggtcacaaggggcagccaagcaagaccaaggcaaaagggaagcgctcatgcttcaagtgcggtaagattggtcattttatcgctaactgccccgataaccatagtgaccaggaacaggggaacaagagggaaaagaagaagaattacaagaaggccaagggcgaggcacatatcggaaaggagtgggattcggattgctcctccgactccgacaatgaaggactcgccgccaccgccttcaacaagtcatctctcttccccaacgagcgtcacacttgcctcatggcaagggagaagaaagtaagtactcgaaactctacttatgcttcttctagtgaggatgagtctagtgatgatgatgacatagactattcatacttatttaagggcctagatagaaccaaggtagacaaaataaatgaattaattgatgccttgaatgataagaataggcttttagaaaa

SEQ ID NO: 165051 - DNA, 1426 bp, Arabidopsis thaliana landsberg
  unsure (1)..(1426): unsure at all n locations
agttggtttctaaagacccgaatcgagctatctcgttgttttgggcggcgattaatgctggagatagagttgatagtgcattgaaggacatggtagttgttttaaaacagttgaaccgattcgatgaaggaatcgaagctatcaagtcttttcgatatctctgcccttttgaatctcaagattctattgataacttgttacttgaactctacatggtaaaactttctcagtatgactaattgtgaagctatttctatgctcagtatgtgattttgatggattttggttttgcagaagtctgggaggattacagaggtcgctgagctgcttgaacacaaactgagaacacttgaacaagacaaacattatggtggcaggatcaaaatagcgaaaagaagccatgaggagcagaataacaagacaatcgagcaagagaaagcacggcaagacaatctcccatgtccgctttatacctgaaagagtagtttctctgactttcttgctgtttggatatgtaggattctagggaacttagcttgggttcacttacagcttcataactatggaattgcagagcagtattacaggtttgtgaaacaccatcaatcccattaagaatgttagttttatcattgccttaacaagtgaaatgggttttactgtgataggaatgctttgtctttggagcctgacaataacaagttgtgcaatcttgcaatctgtttgatacgtatggaaagaacccatgaagctaaatctctgcttgaggatgtaaaacagtctctagggaatcaatggaagaatgaaccgttttgcaagtcttttgaacgggctactgagatgttagcagaaagagaacaagcaacagtagcggataaaccagaagatttgctgacaagtagcttttcagataacttctcttcgagatgttcaggtgggatgaaaggaaagaaggctctagctggaactagcactgaactgggtaacattcacaagacaaactcnnnnnnnnnnnnnnnnnnnnnnnnacaaaactcaccaggtctgactacacaacccccgggaatgtaaatgggtagatgaggaagtagatcagagtaaatgggatgcgacaattggtgcttctcgaaagctcaggttctggacagttggtcctgttcgtagtctaagattcggtaatgattatcagaagaacttgaagagtgtaggaacagcagcctcgactactaatgacgaactgcatcaattcatcagtagtgatgcagattgcatgacaagcaaagcaaggaagctgtgtccagaattgatcaaagataaggaagataacgaaaaagaaagtgaaagaattgcttcagaatcttcttcagcttacgctaagatcacagacattggtcaaagaaaggttcttcacattgatcaaagaaag

SEQ ID NO: 165052 - DNA, 597 bp, Arabidopsis thaliana landsberg
atgaatgcaggttgtatcacattgtgttgtccatgtatcacatttggccaagtcgctgagattgtagatcgaggatccacatgtaagtaacttataatacaataaatcatagaaaaagtttttgccaaatttggcgggagcaagcgagcgctaatgataaataattgttgattcgaaaaaattcagcgtgttgtgcggctggagcattatacatgttgatagacttaataacaagttgtgggcgtatgtacgcgtgtttctatagtggaaagatgagagctcaatacaatattaaaggagatggttgtactgattgccttaaacatttttgctgtaacctctgtgctctgacccaacaataccgtgaactcaagcaccgcggtttcgatatgagccttggtaatttatttcttcatgatacatcttaccttttttcattttttctgattgatttgttagtgtaatcgaaaaattaattaacactcgttacaaattaattttcgtattttaggatgggcagggaacgcagagaaacaacaaaatcaaggaggagtggcgatgggtgctccagccttccaaggcggcatgacccgctaa

SEQ ID NO: 165053 - DNA, 1705 bp, Arabidopsis thaliana landsberg
aacggaagcagtttgagattactcataaggactttaatgagatcttctccatcaagttaaagactgaaggtgcagacattctcgaagctacaacaaaggttgatgcacgggcaaacaaggcaatgattgtactggcagagtttaatttccttccaccttgaggacaaggtgatacttcaaaaggggagtattgataagtatccaattgtggtttattgggcctcttttagtatgttattgggctgccaatttgttggcatcttaagcccataacctttgtatttaacaactctttctcccttacgggaacactatcgaaatagattataacaatatgtttatcctcttcatcatctctcttctctcttgttcttcttctttctaattctgaattcttctgcttctcaacctaattcttctattttctcatctccttctggttacttacttgataagtgattctgaccttatacaaatccatcacttattagagcatgatgttgatgttgttaagcgtctagcctgtagagtttgtaccggtaacaaacaaccaactgaccctgggagagctaatcgcgtatgcgagcgtggtggtttaaaggttagccaagttctatggatttgggaaggttacagaaattttggagtgttaagattaatacagaagcttgataagactaatttacaaaaggtcatgagaagggacttgaaaaagttgcgtgttgggtataaaaaaggaattttgaggcggaagctacttttactcacaggttttgatttggaaaagttgctcaagtcgttagatgttcacttaagtgagaacattagcaaagaaactcttttcttgttcatcgaccttgaggacaaggtggatttttcaggggcgagtaaaggtaatgacagaagatgggttagcgacacagtaaagaagaaactaagaaatgtcaaagatgatgttaacaagggtaagaacagtgtctcaagagttgtttgtgacgttgatttgggttgtgtctactctttgggcaaagaggagtttgtgtgttctattaaagctactgagccactaccaagacgtcaattgctatagttgaactatgagacaacaatattaacaactcaagaagtttcaaaaatattggttgagagagatgttgttgagaaatatcagaagcacaacgatttaagaaaaagtacggaagttgtcgttatggtcttgggatacttgttagagatagaacaaaagattacaagtaggttgatcaagatcaataaggacgttgcagctatgatatcaaataagttcatttgtcttgtgagagatcaatctactttgatagagaccatgtcgacccagctctttcagtttcatcttggaaacttggttaagattgataccaactgtgaagtgtctcaatcgtcacggccacctgaactgttgtttggagaatggcaggaacaggagaaccttagagcaacccgtgaagcccaaaatatagatatgacagtggagaatagaccgtttgacatgaagaagaaaacgtgtagcactcatgtttggaagtcactgtctaaggaccctctcttacagtttgcattcttggggaaagtatcaagattccgaaacagagtttccagtgatggcaagcttttggagctgttcttttcaaagttggtctcaataattgagaacacaactgcgtga

SEQ ID NO: 165054 - DNA, 423 bp, Arabidopsis thaliana landsberg
  unsure (1)..(423): unsure at all n locations
tggattcaggagggcctgctcgacannnnnnnnnnnnnnnnnnnnnnnnnnnnnnnnnnnnnnnnnnnccgttcggtggtctccgttgtgggcgccacgctgcacgaactggtcggccaggacggcgaagtgctggaggcgctgcaggaactgaccaggctggcggtacaccgccggactggcctgcgcgcacggctcatgctggacgtgggcggctttcgcgcgcgccgtcgatcggaactcgcggaactcgggcgggacgtggccgaggaagtagcgcgtactggcgagccgaagaagcttcgggcgatgtcgccgttcgagcgtaagatcatccacgacgcggtggcgtcggcggggctgcgcagcgagtcggaaggcgaggaaccgaaccgccgcgttgtggtcttcccctccagctga

SEQ ID NO: 165055 - DNA, 417 bp, Arabidopsis thaliana landsberg
gtactcgacgagaggaaacagagaaggatgctttcgaacagagaatctgcaaggaggtcaaggatgttgaaactgagacatcttgatgaactctggtctcaggtaataaggcttcgcaacgagaacaactgtcttatcgataagctgaaccgcgtatcggagactcaaaattgtgtattgaaggagaactctaaactcaaagaagaagcttctgatctccgacagcttgtttgtgaactgaaatctaacaagaacaacaacaatagttttccaagagagtttgaagataattagtattactcaaagtgtccaactttatcagacaaaacgtaatctattaacacaatcaaaagcagaaaattttggttttataccttggagagtgttctgttctatacagtgactttgaatccgttc

SEQ ID NO: 165056 - DNA, 664 bp, Arabidopsis thaliana landsberg
accctaacccgggaaataggtcaacaatacctcaaaacgaaaacaaacaacctcaagtctttttttttggtgctggtcggccagtcgatggcttttatcttaggtcttacggtttccgtataggtggccaacagttgcacgttgcttaccagcaagaacatacaatgagatcaagaactattggagaacccatttcaagaaaaaggcaaagcctacgactaacaatgcggagaagataaagagtcgtctcctaaaaaggcaacacttcaaggaacagagagaaatagagttgcaacaagaacagcagttgtttcagttcgaccaactcggtatgaaaaagatcatctctttactcgaagaaaacaatagcagtagcagtagcgatggcggtggtgatgtgttctattatcctgatcaaataacacattcatcaaaaccctttggctataactctaattcattagaggagcagttacaaggtagattttctcctgtaaacatacctgatgctaatactatgaacgaagacaatgccatatgggacgggttttggaacatggatgttgtaaatggacatggtgggaacttgggtgttgtggctgctactgctgcttgtggcccaaggaagccctatttccataacttggtgattccattttgttaa

SEQ ID NO: 165057 - DNA, 2462 bp, Arabidopsis thaliana landsberg
ctccatgaaaatggcaaagaagatatctgagttacataacaagctggactgtagctacaatgatctcaatgtcaaggtggaaacactgaataccaaagtccgatacttagagggacattctgcatcttcctttgctccaaaacagataagccaacttccaggaaaagcaattcagaacccaaaagaatatgctcacgctatcactctgcgtagtggaaaagcacttccaactagggaggaacaatggacagtcactgaggacgttgaagatcaagatggagaggatttaagtctcggtaaagatcaagctgaaaaactactcgagcaaccactcgaccagccactcgagcaaccactcgatctgccactcgaccacgttactcgaccaacaactggacctatcttcctagcagcatcactaactgctccaaaaccagttgctgtcaagaacaaggaaaaggtctttgttcctcgtccttacaaaccacagcttccatttcctggccgtcacaagaaagtgttggcagataagtatagagctatgtttgccaagaatattaaggaggttaagttgcggatacctcttgttgacgctctagcgctaatcccagactctcacaagtttctgaaagactcgatcgtggagagaattcaaaaaatacagaagaagatcattcctaagaagcttagtgatcctggttcattcactctaccatgctctttaggtccattggctttcaacagatgcctatgtgatttaggagcatcagtcagtctcatgccgctctctgtcgccaaaagattggggttcactcaatacaaatcctgcaatatatccctcatcctagctgacagatcagtaaggatccctcatggtttgctcgaaaacctaccaatcaagatcggagctgtggagataccaactgactttgtagtcctggagatggatgaagagcccaaggaccctttgattctagggagacatttcttagcaactggaggagctatgattgatgtcaagaaagggaagattgatctaaaccttggcaaagactttaggatgacctttgaaactgcgcaatgaagaagcctaccatagagggcaactcttttggatcgaagaaatggatcaattagctgatgagttactagaagagctggcagaagaagatcatcttaactgtgcgttaaccaaaagtggcgaagatgggtttctgcatttgaaaactttgggataccagaagctgttagactcccataaagcgttggaagaatcaaaaccctttgaggaattgattggaccagcaacagaggtaatggtaatgagcgaagaagggtcaacacaagttcaacctgcacactcgagaacatactcgaccaatgactcgacctcgactgccagcgactctagagagctgatcattccaacttcagatgactggtctgaactcaaggcaccgaatgttgatctcaaaccacttcctaaaggtctaaggtacgcattccttggtccaaactctacttaccctgtgatcattaatgcagagttaaatgatgatgaagtgaacctgctattatctgaacttagaaagtataggagagcaattggttattcattgtctgacattacgggaatttcacctagtttatgcaaccataggatccaacatgaaaatgaatcctactctagcattgaaccacggaggaggttaaatcccaacttgaaagaagtagtgaaaaaagaagttttgaaactgcttgatgctggtgtcatctaccctatctctgattgtacttgggtttctccagtgcattgcgtccctaaaaaggtggaatgactgtagtttaaaaggaaaaggatgaactaatccctactagtattataactggtcatagaatgtacattgattataagaagctaaatgctgcatctaggaacgatcattttcctttaccattcattgatcaaatgcttgaacgcttagctaatcatccatactattgctttcttgatggatatagtggtttctttcaaataccaattcaccctaatgatcaagagaaaaccactttcacatgtccttatggaacttttgcttataagagaatgccatttggtttatgcaatgctcctgcaacatttcagaggtgtatgacctctatattttcagatttaatcgaggagatggtggaggtcttcatggacgatttttcggtctatggcccttctttctcctcatgtttgttgaatcttggcagggtattgaccaggtgcgaagagacgaaccttgttctcaattgggaaaagtgtcatttcatggtgaaggaaggcatagtgttgggtcacaagatatcagaaaaggtatagaggttgacaaaggaaaaattgaagtaatgatgcggttgcagccaaaaaaaatggtgaagtacatcaaaagtttccttgtcatgctgggttgttc

SEQ ID NO: 165058 - DNA, 1313 bp, Arabidopsis thaliana landsberg
taccggaaggagaaaatggaaactaatctaatgttgataaagtgtgtcttattagcatcatgtctcatacatccccgtgcttgctctccttcttgcaattttccggcgatcttcaacttcggcgactctaactccgacacaggtggcctctctgccgctttcggacaagccccttaccctaacggccaaaccttcttccactccccttccggtcgtttctcagatggtcgactcatcattgacttcataggttcttagttctgaccacacattcataaatttcgattgtttacttagttttctcacgacccatttgattattcctatttttgaaatcagcggaggagttaggtttaccatacctaaatgctttcttagactccatcggttcaaacttcagccatggtgccaatttcgccaccgctggctccaccgtccggccaccaaacgcaaccatcgctcagagcggtgtgagtccaatctctctcgacgttcaattggtccaattctccgatttcatcacacgatcacaactcattcgcaatcgaggtactttaaaagtttcaaccttttgcaaaagattatcagaacgtttttgtaatccgatttggtttacatataggtggagtgtttaagaaattacttcccaagaaagagtatttctctcaagcattgtacacattcgacatcggtcaaaacgatcttaccgctggattaaaactaaacatgactacagatcaaatcaaggcttatataccaaatgttcttgatcagttctctaatgccattcgtgtaagcaaagataaagtctttattcactagatagatacgtagctgtgtgatttaactgaattaaccaaccgtctttaatgtctttgtagaaggtgtatagtaaaggaggaagaagattttggatacacaacacagctccacttggttgtttaccttatgttttagaccggttcccagtaccggcttctcaaatcgacaatcacggttgtgcgattccgcgtaatgagattgctcgatactataactctgaacttagaagaagagtgattgagttgagaaaagagctctctgaagctgcgtttacttatgttgatatctactctatcaagcttactctcatcactcaagccaagaaactcggtatacttcaaaccttttatcatgttttggttactcgggttcggtttagactggttctaatggtttactatatgttgagtttggtggtttaggttttaggaatccaaaaggtggcttgttgtggacatggtgggaagtacaatttcaacaagcttattaat

SEQ ID NO: 165059 - DNA, 4263 bp, Arabidopsis thaliana landsberg
atggactaccccgaagagttcgttgcggtcggtaaagcaatcatgttggaaaaaggaaattacggacactggaaagtgaagatgagagctctcatacgtggtctaggaaaggaagcctgtattgctacgagcattggatggaaggctccggtcatcaagggagaagatggagaagatgtgctaaaaactgaagatcaatggaatgatgctgaagaggcaaaggccatagctaattcaagggcactgtctttgatattcaactccgtgaatcaaaatcaattcaagcaaattcaaaactgtgaatcagctaaagaagcatgggataaacttgctaaagcatatgaagggacaagtagtgtcaaaagatccagaatcgacatgttagcatctcagtttgaaaatctcactatggaagaaacagagaacattgaggagttcagtgggaaaatcagtgcgatagcgagtgaagcacacaatctaggaaagaaatacaaagataagaaactggtcaagaaactgttgaggtgtctcccatcaaggtttgaaagtaagagaacggccatgggaacgtcgttggacactgactcaatcgattttgaagaagtagtgggaatgctccaagcatatgaattagaaatcacttccggaaagggaggttactccaaaggacttgctttagctgcatcggcaaaaagaatgagataaaggaattgaaggatacaatgagcatgatggcaaaagacttcagtagagcaatgaggagagttgagaagaaaggattcagaagaaatcagggaactgatagatatcgagaccgaagctcaaaaagggatgagattcaatgtcattaatgtcaaggatacggacatattaaagctgaatgtccctccttaaagagaaaagatctcaagtgctctgagtgtaagggtcttggacacactaagttcgactgtgttggatcaaagtctaagcctgatagatcctgcagttctgaaagtgaaagtgactcaaatgatggagacttggaagattatataaaaggtttcgtgtcttttgtaggaatcattgaagaaaaagatgaaagttcagacagtgaagcagatggtgaggatgaggacaactcagctgatgaggattctgacatcgaaaaggacgttaacatcaatgaagagttcaggaaactgtatgacagctggttgatgctgagtaaagagaaagttgcctggctggaagagaagctaaaagttcaagaactaacagaaaagctgaaaggagagttaactgctgcaaatcagaagaactctgagctgattcagaaatgcagtgtggctgaagagaaaaacagagaactttctcaagagcttagtgacactcgcaagaatatccacatgctgaacagtggaacaaaagatttggatagtatacttgctgctggaagagtgggaaaatcaaattttggtttaggatacaatggtgctggatcaggtacaaagacaaattttgtacgaagcgaagctgctgctccaacaaaaagtcaaacaggttttcgaagcaactatgatgctgttccagcaagacgcgtgtaccagaatcacgatcactatcattcccgaagaactgtgacaggttacgaatgctactactgtggaagacatggtcatattcacagccccctgctacagatatgcagttaggttgagcaagctgaagagacaagggaagctatatccacatcagggaagaaattccaagatgtatgtgagaagagaggatctctattgccatgttgcatacacttctattgcagaaggggtgaaaaaaccgtggtactttgacagtggagcttctagacatatgacaggaagtcaagctaatctaaataattactcatctatcaaagaaagtaacgttacgtttggtgggggagcaaaaggcagaatcaaagggaaaggtgatctgactgaaacagaaaaaccacatctcactaatgtctattttgtggaaggacttacagctaatctgattagtgtaagtcaactttgtgatgaaggtctgactgtaagtttcaacaaagtaaaatgttgggctaccaatgagagaaaccaaaatactctcacaggagttagaactgggaacaactgttatatgtgggaagaacctaaaatctgtcttagagctgagaaagaggatccggtgctgtggcatcaacgtctgggtcacatgaatgcaaggagcatgtcaaagctagtgaacaaggaaatggttagaggagtgcatgagttgaagcacattgagaaaattgtgtgtggtgcctgtaaccaaggaaaacagattagagttcaacacaagagggttgaaggaattcagacaactcaagttcttgacctgattcacatggaccttatgggaccaatgcagacagaaagcattgctggcaaaaggtatgtttttgttttggttgatgatttctcacgatatgcttgggttcgttttatcagggaaaaatcagaaactgccaacagcttcaaaattctggctcttcaactgaaaaatgagaagaagatgggaattaagcaaatcagaagtgatcgaggaggagagtttatgaacgaaacattcaacagtttttgtgagtctcaagcaatctttcatcaatactcagcacctagaactccacagtcaaacgaagttgttgagagaaagaaccggacacttcaagaaatggccagagccatgattcatggaaatggagttcctgagaaattttgggctgaggctattagtacagcatgttacgtgataaatcgagtctacgtaaggttgggatctgacaagacaccatacgaaatttggaagggtaagaagccaaatctgagctacttcagagtattttcatctcgagggcgtctgccttatgacccgtcggatcgatgtagcatccatcgacatcatcaggctgagagagatgcggcagatccatccatttggacacctccttatgagccactgacgattcaatttctcacaagccaaggggttgagaggtacaaggatttcaagcttcgtgatccctatgagcaaaggtatgtgccgcgtggtcctccagagatgcgtgacatgatgaaagtgatagaggataatcacttgctagacactgtagctgagatcgatccgtttgtgaaagaagtgatttgggagttttatgctaatttccatattttcaatgaggaaactaagaagtccaaagtctttgttagaggcaaactgtatgagttctctcctcagatgattaacaagacgttcagatctccggctattaagtggcatgcaaaggctgaattcgagagagtgactatgtccaaacatgctctcgctaagtacctatctgatgggaaagtcgtcacttggaaggatcttcgcactccggtcatgcctactcatctcgctggtctgtatttgatttgttgcatcaactggattccttcgaagaataactcgaatgtcactgttgatcgtgctaagatgctgtatcctctgaatgagcggattccttttaattttggaaagctagtctatgatcaagtagaaaaggctgctcgctctcctggacaaattcagaacatcctgccatttccaaatctcatctacagagtgttgatgtttcagcgagtgataacactggaaaactatgagaagcctggtcctcgcccaaagctgtttaatccagacgttcgtggtgggattgaacatccaaagcgtcgaggagagtatgtgtttggcacgtccttacctggagacttaaggcatgtctctaccttgttgacgacaatagcaacacgtatggaaggtatggtgtccttgtcctgtactcagtgtctggtttaattggtagagtgtctagatagagtttttgatcaattatgtcatgcaagcagggggagattatgaactagtccctgagaactctaattcctttgtaaactctctagatgttgataacgaagaaggctagatctagttgtgggggagtttaggattaagggggagtttttaagctgtgtttgttaatcatgtccttttggttttagtaggtttttgtttctaagtactggatgatgtattttgaaccttaaaaacttgtttatgcaatctatgatgagaccctctattgtttatttccgctgcttattatctctatgccttgatgtgtgcttgtgagttttctttaggggtttcttgcaggattgcttaattacaaatctg

SEQ ID NO: 165060 - DNA, 464 bp, Arabidopsis thaliana landsberg
atgagcaatctatctactagttcgacgggatctacaggttctcgtggaagaggaagagtcgacagaatgccaaaaagatgttggtgtagggaaggaattgttgccctaacatccaaatctgatacgaatccttacagaagatactttcgttgtggttttgctgcaacaaacaaggtaatttcattgatattcatcaatgtttaagctgaattagatttttttacttatgaattttattgttcattgatagctaaggaatgatgaacacactttcaagtgggttgatgaagctttgatcaatgatttagacaagtttaatgcaaagattggggaagttgaacaacaagtgaaagagcttagaacacagagtttggagtttgagaaaatggtttgtgagaaagtccaaatgaagattgagaatgagttatttgagaaagtggacgatgctttggctgaatcaaaag

SEQ ID NO: 165061 - DNA, 869 bp, Arabidopsis thaliana landsberg
tttccaaattcataacctccgtatccactcctagaccttactcactcatcatcttcttcgacgccgttcatctccacggcaatagccagctacgtcttccagagttccgccgcgaattcagactcgtctccgccactttcatcaccaacaacaacaatgaatctaacggcacaaagctcttcttctgcgagatcgaatcaactcactccgaggcttctttccgccgcttcgccgtcgagtcactaccacacatttccctcgttagccccacgacagagaatttaacagaatcagatcaaatggacggtggagatttcactggattagccgaatcaatggcagagttcgtcgaacgtcaaacaaaactcaccgttggttcaatccaacgaccaccactcatatcaaagacacaaatcggaatcatcgttgctataatcataatctcgactccgattctcatcaagaagattctaaaaggagaaacacttctccatgaccatagaatctggttagttggcgcggttttcgtctacttcttcagcgtctcggggacaatgcataacatcattagagaaatgccaatgtatatcaaagattatgaagattcaagtaagtttgttttctttatagaagaatcagagatgcagcttggagcagaaggtttctttgtagggtttttgtatactgttgttggattgcttttggcgtttgttactaatgtagttgtacgagtcaagaaactcgatgagcaaaggatggctatgcttttggctctgtctatatcgttttgggctgtgaggaaagttgtttacttggataattggaagactggttatgaaatttacccatattggccatcgagttggcgg

SEQ ID NO: 165062 - DNA, 2173 bp, Arabidopsis thaliana landsberg
  unsure (1)..(2173): unsure at all n locations
gagcggcaaggcattctgtcagggatcagacgggcatgcaacaagttctctatcccacgcggctgagtattccacacacctggcaataccacaaggaccgtccgcattaacggcaccggaaatgggactggaccgaaccgagccggcaattttgagaaatcgggaaacagatcgaaacgaaccacaactccctcctccccgagcagaggttaccgaagccgatcgtatcgacgctttggacaatgaagactccgaggagaacattagatgggctgaagaatacgccagagagcaggaaataagcgccatcaaattatccctagtaaaggcagaaaacgagatgaagctcgtaagatcccaaatgcataacgcagtctcctcagcaccgaacatcgactgcattctggaagaatcccacaacacgccgttcacacacaaaatctccaatgcaataatctcggatccaggaaaactaagaatcgagtatttcaacgggtcttccgatccaaaagggcatttaaagtcgttcatcatctctgtggcccgagccaaattcagaccagaagaaagagacgctggtctctgtcacctgttcgtcgagcacttgaaagggccagccctggactggttctcgagactcgaagggaactctgtgaatagttttcaggagctatcgacacttttcctaaagcagtattcggtgctaatcgatcccggcacatcagacgccgatctatggtcactatctcagcagcctaatgagccacttcgagatttcctcgcaaaattctgatccaccctagccaaagtagaaggaatcaacgacgtggcggctctctcggctctgaagaaagcactatggtacaaatctgaatttaaaaaggaactaaacttgtccaaactactgacaatccgagacgccctgcaccgagcctcggattatgtatcccatgaagaagaaatggaactactatccaaaagacacgagccgcncaagcaaacgcctcgcatcgataaatcccaacccagtgctccgaaccacaaaaagggcgctcaaggtgggacattcgttcaccatgaaggacaaaatttctccggagcccataattaccaagttgatacaccccgaggcgaggccgcccgaggtcgaggacaaggccaaggtcgaggacgcggtcgagaatcctacacttggacgaaggatcaacccgcaggaaacgagcaggaatattgtgagttgcacaagagttacggccatcatacttccagatgtagtagcctcggagcaaagttggcagcaaaattcctagcaggagagatcggtggagctttaaccatcgaagacttggaagcggaaaagggtaaaaccgagcaggtcaatgctgtggccaatcccgagcaggcggcccccgcagcaaacttcgaaggacccaaaagaggtcgaggtaatcgcgaagcagacgacgatgagccagaagctgctcgggggaggatcttcacaattttaggagatttggctttctgtcaagacacggcggcatcaatcaaagcttatcaaaggaaagccgacgcgaatcataactggacgcggccatttaatgggccaaatgacgaagtaacttttcacgaaagcgataccaacagtttagaccgtccgcacaacgatcctttagtcattacacttaccattggtgatttcaacgtcgaatgagttctggtcgacccgggaagcacactggatatcatttttcttgcaaccctgcaagaaatgaaggtcgacatgacgcaaattataccatctccgcgacctgtgctcagattttctggagaaaccactatgactctcaggaccatcaagttaccagtccgagccaaaggggtaacaaaaatcgtcgatttctctgttaccgaccaaccgaccgtttacaatgcaattatcggtacaccatggttaaatcaattccgagctgttgcttcgacatattatctctgcctgaaatttcccacgagcaatggcgtgaaaaccatctggggaaatcagaaaaatgctcgaatctgcttcatggcagcacacaagctcaagaaccccgtcacagagtcgacgaccgacgcgaatcataataaagctaagcttggccgagctgaagagaaagcaattttcgagcagttatag

SEQ ID NO: 165063 - DNA, 854 bp, Arabidopsis thaliana landsberg
  unsure (1)..(854): unsure at all n locations
ctcaagttattcatccaagtatgggtttctgcaatcatttcagtaacttattgttactacttaacacccaatatcaaaaccagtcttcttcgattattctctgtttcttccgatatgtggtctgttctttgttcttcctttgttcttctcctctgtgcatttctctttaatcacagcgtttttcctcacatggcttgctaatttcanactcatcctcttctccttcgataaaggtcctttaatcccaattccaacaaatttccctcgattcttctgcttcacttgcttccccatcaaggttcagcaaaaccctaaatctcaaaaccatttgcccaaattggttttcgccattaaacttgcaatctttgcagtgctattacatttgtatagctacagacaaaatctgtctccgactatactattaggtctctattttgtgcatctctacttagagattgagattatattaacgtttgttaaagttgttgtttttatctctcttggctgcgatcttgagccacagtccaataaaccgtacttagccacatctctacaagacttctggggtcgccggtggaatctcatggttccggcgattctccggccagccgtttacgcaccaatgcggcgagtctctgaacgcaaaatgagttccggttgggctctgtttccggggattttggcagcgtttatcgtctccggtttggttcacgaattgctcttcttctatttgatacgtgagatgcctacaggagaagttactctgttctttgtgttacatggcgtttgtactgctgtagaattggcggtgaagaagaaaacgacggtagcacagcggtggcggttgagtccgg

SEQ ID NO: 165064 - DNA, 538 bp, Arabidopsis thaliana landsberg
tttgtaaaccactcgacccccaagccgagtagatgcttcacgacatcaacttaccactcgatttcctggtcgagtagaagacttcaccactttacttcaccactcgaccacctggccgagtaccatgagagtcactcaatcacttcactcgaccacctggtcgagtatatcacttctaccacctgactatcactcgatcacaccactctaccatgaagtcgagtatcaccatcaccattactcgactagataatcgattgccagctccagagtcttttccagtccgcactcaaccagacactcgagcacaaggaagaaaagaagactttagcttatcagtcgaccacctgggtcgagtactgttcttaatccttcccaatactgcgtcgttttgagtattagggtttcaaaaatattttgccataaataggatgtactttacgttttcgtttacctaagttttattccacagacactatgttcttgaccttttgtttttaacattttaaaaccgagggcttttgcccatcttcaatag

SEQ ID NO: 165065 - DNA, 1062 bp, Arabidopsis thaliana landsberg
actagaaaagataagagacagcgtttattttcttctctcatcctatatatatactgggatatttgaggcaataaacgtctattgccccactctcacgcgaatgtaaccggttttactaaacaaataatcttttttaatcggttttacaatgttacttttgtgaatatcaaaaatattgtgactggattttggcaatagaaattaaagattaaaatatttgtaaaaattctcctcttatgagaaaaattacccttttatagagagaaaacacttgacatggacttatgacaaaactttgttgcaaatttccgtcataaatattaaaaatttatgtcgttatgcaccgactacaaactaaaaaataatattttcaaggtaacaaattaatggccaaaaaagaaaaacaattagtggtgatgatgatgctccacatattgtctccaccaagccaaaaagtaaaacacaaaaatctccataaatagaactgagcctaggcgtgtgttctccacacttactcgattctctatatatatatctcaacaaaacaaaacaaacaaagaaacaatggatcaatcaggtagtaacacgaacatggacatagagaaggaatcaactacatttgattactccaaacgttcccaatggctacgtgcggccgtgctcggagccaacgatggtctagtctccaccgcgtcgttgatgatgggagttggagctgtgaagcatgacgtcaaggcaatgattctctccggattcgcagggatggtggcaggagcttgtagtatggccataggagagttcgtctcagtttactctcagtacgatatagaggtggctcagatggagagagacagtgtggagatagagaaagagaagcttcctagtccgatgcaagccgcggctgcgtctgcccttgcgttttccgcaggtgcgattgtaccgcttttggctgctgcttttgtgaaagagtataagatgaggatcatttcggttgtggtggcggttacggtagctcttatggttttcggatggttaggagcagcgctagggaaggcaccaacg

SEQ ID NO: 165066 - DNA, 970 bp, Arabidopsis thaliana landsberg
gaatcagaaaacccgtccgagagcagagaaggaggaagtggactacatgcagagagctcagtggctaagagctgccttgcttggagccaacgatggtctggtcacagtcgcttcgctaatgatgggtgttggttctatcaaagaagacgtcaaagcaatgcttctcgttggttttgctggccttgttgcgggtgcttgtagtatggctattggagagtttgtgtctgtgtgcacccaaagggatattgaaactgcacagatgaagagagctattgaacataagacatcactatcagcaatcgacgaacaagaagaggtaatgtagctagtgtctaattacacactaaactttactcacacataaaaataaaaatagaaacctatgtatacgtattttcccatagttattacctacaccaatctggcactattttttgaatcatattaacaaattttccttattagttagcatgtaggcttttgaattttcagctcatatatatattttaaaatatatcatttatattttatgattaagtacaatgtgactcttttgatgacatgtgattactatatgtataagttggcgtttgaaaaacaatgagataaaaatttcgtatttaaagatatatgagtcacatatttattgccaattcattttgtaatcgaaacttcacactatacaaaattatccttgttttcttttagatgtacatgacatttctatatgattacatttagttataaaatgtatgtttaatggtaggaggagaagaaagaaaggctgccaaatccagggcaagcagcaattgcatcggcgttagcgttttcagtgggtgcagcaatgccgcttctgggcgctgtattcatagagaatcataaggtaagaatggtggtggtagcggttgtggccaccatagcattggttgtgtttggagtgactggtgcggtcttgggaaagacaagtgtg

SEQ ID NO: 165067 - DNA, 463 bp, Arabidopsis thaliana landsberg
  unsure (1)..(463): unsure at all n locations
atgccgccgaagaagagtaaggcagatggagaagaaaaggcgaaacctttaacgacgttggcgtcgtctagagtgactcggagcatggacagtcgaactcgaagtcagactcaacaaaacggtgctaaagcggctggatccgccactaagccggtgacgaagaaggctaagaggaagaattcagcgattgagactgggagagccaagaagggaaagaaggaagaggaagttgaagagccagaggaagccgttgaggaggaggttgagaaggaagagccagaggttgaggaccctacgagaccaagattgttatagaacactggtaatttttgcgtaaatgttttcgatttctttagagataatgtntggaatcataagagcanaaatgtaggtttttttctttgaaattgaatctagaagcctcnaactttggggtatgtgttgagacttgtgtgtccgtgtg

SEQ ID NO: 165068 - DNA, 647 bp, Arabidopsis thaliana landsberg
gaatgacaaatttgacaagctactccttgtgcacagaagcacattccttttctcggtgatgatgagtttttccaagtccaggatggggagactctgcagtcataaggggtcagctatgtgcaaaaccaaggaggttacaacaaaggtttcaacaacttcaagcagaaccatcccaatctgtcttacagaagtataaatgttgcaaacccgcaggaccaattctacccctctcagcagcagaatcaacccaagccctttgttccatacaaccaaggtcaggggtatgttcctaagcagcaatatcagggcaactatccgcagcaacttccaccacctaggttcacacagcagcaacaacaaccagcttcaacaactccagattcagacttgaagaacaggttacagcaggttctccagggacaagcaacaggagcaatagatctcgtcacgaagatggcagaaatccacaacaaggttgattgcacttttaacgatctgaatatcaaacttgaggcacttacctctaaggttagatacatggaaggacaaacagcgacaacttctgctccaaaagtaacaagacttccaggaaagtccatacagaacacgaaggaatacgccaccgctcacgctatcaccatttgtta

SEQ ID NO: 165069 - DNA, 229 bp, Arabidopsis thaliana landsberg
gccggcccttcgccagcgagaggacacgcttgttccggcatgcattcgcatcaaggaaagcggtatccgcctagtcggcggatgcttcagtagggtaaaaaaagaatagttgaaaacgacgacatcaaggatgtctacggcgaagccaagggcatgggcttcgataccaagatcctcaagaaggtcgtcgccctgcgcaagaaggacgagcaggaacgcatggaagaag

SEQ ID NO: 165070 - DNA, 909 bp, Arabidopsis thaliana landsberg
  unsure (1)..(909): unsure at all n locations
gtagaaagcccggtgacgttggacttagggactttattttcaagtatttgccattacatagagctcccgtcatagaaagcttgcgttttcattctaatagcccagatattaaacctgaagatatcagacgatggattgaaattgcagtttcacgccatgtacatgatcttgatattgatcatttttcggagaatgaaaacatattcctgagtagcttttttgcctgcaaatcgctcgtgaccttgaaactaagaagcgtgactctcagggatattccctctatggtttgtctcccttctctgaaaactttgctacttgacaatgtgtcatttgtagaaggaaaatctcttcaggagcttctatctatttgtcctgttcttgaagatctatcggtgtattgtgatgactatgaaaatacaaaagagttaactattgttgtcccgtctttgctgagtttatcactctatatacctgatgaatggttgttagatgggtattggatagatactccttctttggaatatttgaaacttgaggattggaattcttgtgatcacttatctttgattaagaatatgcctaagctgagggaagcatatgttgatgttaaatgctttcttcccaagagtgtcattgaatcaatcacatctgtcaagcatcttacaatatgttcaaaggttccatttctatcaactgcaggttgtcaatctaaattatagaactctttgttaataattttggtattgtgggcaggatgggtatggtgatcgttttgttttcaaccagcttgaacatctgaccctatgcgtgtgtagaggggattcgccgagtctcnnnnnnnnnnnnnnnnnnnnnnnnnctaacttacgaatattagaaatctctgtaatggaagtaagcttcttcgat

SEQ ID NO: 165071 - DNA, 529 bp, Arabidopsis thaliana landsberg
cagagctgtcccaaccgtgtggctcgccttgcatggcaagcgggatcaaaagctcaagttggctataagcggcgtccagacagctattgtggcacgccatcagttgtgatcgacaatacgttggatcgccagtatgcagtgtcagcgtccgacgcagcatgggtaacagacaccaccttcatcagaacgcatgagggcttcgcttacctctcagtggtgatcgatctctattcacgacggtggttggttggcagatacaaagtcggcagaccgctgatctggtctgccaggcactgctgatagcggtgtggcgcagaaagccgaagaacgtagttctgatccactccatcagggctcacagtttatctcccgcgaatgaacctggctcctccatgcccacaatctcaagcactcaatgggcaggcgcgggaactgccatgataatgcgttcgctgagagcaaccttaaatgtcaaacggcgttcaaaagggacccccgatcggcgtcgaagagggacccccttttggat

SEQ ID NO: 165072 - DNA, 1806 bp, Arabidopsis thaliana landsberg
catgattttcccctcccgaataaagttggtttatcttatacagggactgactgatacaaaagtcacataaaaaaaaaaaataagacattaatttgaagaaattgaaaggagaggtaacatatgcgaagttgattgagaagattcgcatgaagagaaatgtagatgaggcttcgacgaagcttaaagtaagttactttcccttctcgttccaaggacataaggtaagaccaaattacattcgagatgatgaagatgtagagtgttattttgagggtgtgagtgaagaaggatttagaagcgtattgcatgttgaagttatcaatgatgttgaactaaatctgaggatggatgagaatgaacagtttgatcaagtattaagagaggatttggttagcgaaagtgttacaaataatgaagatctatctcttattggtggagcggatgagattggtggagcggtggagattggtggtggtgttctttctatgtatgtaggagaaccatcagaacaatatccagttgtggtggagaatgaggatagagatttagaaggaaatgcgcgtggaccaattttatgggatgatgagcttgaaattacagttggccaagaatttggaagcaaagaagcaatccaaagtttagttgagaaggctggacataacaatgtctttgagtttgttgtaaagaaatcggagccgttgagatatgtggtggcatgttcagaagcacgtaatggatgtaattggtatctacgagctgcgaggcgtgatacgtctaagccttattctatacgaactcatagaaggattcattcttgctctcggtcaagtacaactacagggcaaaataaaaggagaggcacaccgactatggttgcttcattattggccgaagattatccgggtaaaattgccactccaactccaaaagatcttattgacttggttaaaggaagatttggtgtgcaagtctcatattctaccgcgtggagaggaaaaagagaagctgcaaatgatattagaggtaccccagaggaaggttttaggcttgtgcattgttatatgtacatgttacaaaagatgaatcatggttcagtttcgtatgtggaagtggatgatgaaaataagtttaagtacttgtttttcgctttaggagcttctgttgaaggttttcgagttatgaggaaagtcatcattttggatggaactcatatgaagtctgcatatggtggagtcctaattgttgctacggctcaagatcctgatcatcaccattacccgattgcttttggtgttgtggattgtgagaaaaacgagagttggacttggtttctcaataagctcaaatcggttataccggatgatcctgaaattgtgtttgtttcggatagaaaccaaagtctcatcaaggcaatagccgatatcaatccattgtcccaccacggacattgcatctactatttgtctcaaagacgtgaaactgaaggtttctggagtaaacaaaggcatttgtggaaaaaagtatagggaatgtgctcgagcttatacgaaggcggagttcttaaggctttatggagatttttcgagtacatatccttcggcacgtacatatctagatgataatgcggatgtgacaaaatgggctagatgttattttggaggagaaaagtgcaacatagacacaagcaattctgttgagtctataaatggtgttttagagaaagcaaggaactactcgctattacaattgatagatacaatagtggggaagatagcggagtggtttgccaaacatagaaaagcttcg

SEQ ID NO: 165073 - DNA, 560 bp, Arabidopsis thaliana landsberg
acaccaggcattaactgatgcatatgaatggataccaacacagagtgaatcgacgacaagggctcctagcggacatatgcaatacggatggaagaaaccaaaccatggtttcatgaagtgcaattacgactgcagctaccgtcaagggggactagaaactaacgctggatggatcatcagaaacgaagctggaacttttgttatggctgcacaaagtaaaggtcgacaatgcaactcggacttagaagcggaactacaaggtttattaatggctatgcagcatacttgggtcagaggatacaagaaaatcatattcgaaggtgacaatagaagtgtggcagaatgtgtcaatggaaaaacccgaagttttgagttacacaacttgataagggaaatccaatattggcagaagaaatttcttgaagctgaagtcacatgggtgcctagaacgagtaataaagttgctgattgcttggcgaaatttccattcccaaataatacttctttttctttcttctctttggtcccatattgtacaattcctccatgaggattatact

SEQ ID NO: 165074 - DNA, 669 bp, Arabidopsis thaliana landsberg
agcgcgactacgaactgcgtagcgcggtccagcgacgttgggcgtcgaggcgcttgacaagatcacttgcgccacatccgcgccgtcctcgacgaacttctccgccatgtcctcttcgtcaagcgatccaagtgcatttttgggtccccatcggtggcgtacctaggccacgtcatctccgcccacggtgtggccttggacccgaccaaggtgcaggccattcacgactggccgacacctcggtcggcgcgcgcggtgcgtgggtttttgggcctcgctgggtactaccgcaagttcgtccatgactatggcaagattgcagcacccctcaccgcgctgatgaagaaggagggcttctcctggagcgacgaggcccaggcagccttccaggacctcaagatggccgtgacctcggctccggttttggcgctgccggatttcaccaaggccttcatcgtcgagtgtgacgcatccacacatggctttggggcggtcttactgcaagaacatcatccgatcgcctacttcagcaggccagtcgccccccgtcaccgcgcgctggcagcttatgagcgggactcagtcgggctggtgcacgtcgtgcgacactggcggccgtacctgtgggggcgcgcgttcctcgtccgcaccgaccactacagcctcaag

SEQ ID NO: 165075 - DNA, 527 bp, Arabidopsis thaliana landsberg
acctaacagaccactcgaccccctggtcgagtaggggatttcacaatttcatctcatcactcgaccccctggtcgagtgtattcacctccaccacctgaccgtcactcgatcacatcacatgacctcgaggtcgagtgtcttcacctccaccacctgaccatcactcgatcacgtcactctatctggaagtcgagtatcttcatcaccaccagtcgactacatactcgatggcaagcttcagagtcaccattccgcactcaaccagacactcgagcacaaggaagaaaagaagactctatctcatcactcgacctctcactcgaccaaatgggttgagtacagttcttaatccgtcccaatactgtttcgttttgagtattagggtttcagaatattttgctataagtagcatgtactttacattttcgagaacaaatttttatctagttttattccgcagacactgtgttctagaccttttgtaatccgaatttccctttatctatttagtattcagtatttgttc

SEQ ID NO: 165076 - DNA, 1000 bp, Arabidopsis thaliana landsberg
caaaaaacaaagggattttatgattagcaaaacagattaaattcttttgataaacgaatcattgatggactataccattaatagtcaagctttccaattaatgacatttgaaaagctgatatttgcagaaccgattggtttatattttattttttttgaatttaatgttaagttatattcaaagaaaaaataaacgtttatacatgtgaatgcaaaattttcttagcatatagaataaagttttatatccttggtgttatatcgatgcgaaccacacttggaatccttccacatatttctctaccttcccttttacactagccatgattaaattatctcgatttaaatgtcaattcctacacaatcatctagttttcaatgtgctaataatttactaatgatcattttgataatagtatataccatactattttttttatttatatccaaagttctcataagaaaactaaagtttttgagtttgacattcgtggctcgtggactactagacggttgagctgaaggtaagaatgtgttgtactggttgcgtcaggatcgttaggaacgcgatctccaaactccgaggtaacaactaattgctttgctttaaaatttaaagacaagattagtgtaatgaacgaaaaaagagactagatgtaatgaatttgattaaattttaggagttgactcagtggaggtggatagagagttaggaagagtgagagtggtgggttatgttgacagaaacaaagtactcaaagccgtgaggcgagcggggaagagagctgagtatacgccataccctgaacctccactttacttcacatctactcaaaactatttcgtagatccttcgaaagagtttaaagagagctataactattatagacatggctacaatggtacagaacaacatggtaatatccccgtaggttctcgtggagacgacagggttagtaatatgttcaatgacgataacgttaatgcatgccgtctcatg

SEQ ID NO: 165077 - DNA, 188 bp, Arabidopsis thaliana landsberg
acgaatttcaaaggcagatagatcataaacagatgcctccagatcaccaaattgaaaggcacactcatattcacacgacgcgttaccgagggggcagtctagttgaggaggtcatcgagaagcttgagagattcaaagtacgtacggttaacatcttggtgagaggagaagatgacgaacagaagaaa

SEQ ID NO: 165078 - DNA, 527 bp, Arabidopsis thaliana landsberg
gtaccgtccccagaagaaaaaagactacttcttacgaattcgtccttccataacacccacaagaaccgcaatggcttgggcagggtatgagtcgcatgaacggcgctggtgatccgaagctaatcatagagaagaatctggactcgaacgatgttgatccacgtcaaaaccgactctcaatccctatcaataccgtaatccaaaacgatttcttgacgcttgacgagtcaaggttgattgatgaagacgaaatcactaacgaagggaatatgggtgttgcagcgtttcttgttgatcagcgaactaagaagtggaacatgggttttaaacaatggtttatgacgactgattcagggagcagttactggagttttgtgttgcgaggtgaatggagcaacgtcgttgagactaatggactgaaagaaggcgacaaaatcagcctttggtctttcaggtccaacgatatcctctgttttgcccttgttcctccaacgagctctgttgttgagtctttagataagtgaaaa

SEQ ID NO: 165079 - DNA, 1257 bp, Arabidopsis thaliana landsberg
  unsure (1)..(1257): unsure at all n locations
atggtttccttaattcccctatttgcttctcttacaccgtacttagtctcagcattacttctattccttgggctcgagcaacttttataccgtgtcaagaaacgtaacctccctggccctctctttgtctttccgataattggaaatgttgttgcacttatccgcgacccaacttccttctgggacaagcaatccgcgatggcggaaacttccgtgggcctctccgtcaactaccttattggaaaattcatcatatacattaaagacgcagagctctccaataaagtcttgtccaacattcgtcccgatgctttccaacttactggacatccattcggaaagaagctcttcggtgatcacagccttatctttannnnnnnnnnnnnnnnnnnatccgttcgccgtcaccttgctcctaacttcacccccaaggcactctccacttactctgatctccaacaaatagttatgctccgtcatctacgacagtgggaggaaagtttctccggcggaactaagccggtttctatgcgagaccttgtccgtgaactcaatcttgagacttctcaaacggttttcgttggaccctaccttgacaaggaagctaggaacacgttctgtactgattacaatctgttcaatctcggatctatggcgctcccgatcaacctgcccggctttgcgttcaacaaggctcgccgggcggtaatgaacctggagaagacgctctccgtctgtgcgggaaaatccaaaaagaggatggctacaggagaggagccaacatgcttaatcgatttttggatgcatgcattcgtcacggagatagaatccggtaatccaccgccgcttcactccgaagacgaagccatcggcggtttgctcttcgattttctctttgccgcacaagacgcgtcgacgtcatcactcctttgggcggtgacgtttctagaatctcatccgaaagtgctgagcaaagtgagggaggaagtggccaagatttggtcacctcagtctggccatctgatcacggccgatcagctcgcggagatgaagtatactcgcgctgtggcacgtgaggtggtgagatatcgaccaccggcaactatggtcccacacattgctactaatgatttccctcttacagaatcgtacactatcccaaaaggtacaatagtgtttccctcgctctccgacgcctcgtttctagggtatcatgaacaaaaccggttcgatccggaccggtttagtcagacaagc

SEQ ID NO: 165080 - DNA, 1024 bp, Arabidopsis thaliana landsberg
tgcaacagtttcttcatgcgcaagcaacactttgtctgtagctaatttggacagaatcagtgtttttggcagtgtaaacggaggaaccgtattcaaagttaaggtcaagacaacctcagagatctacgcgttgaagaaagtgaaataaaactgggattctacttccctccgtgagatcgaaatccttcgcatggtcaactctccttacgtcgcaaagtgtcacgacatcttccagaatccttccggagaagtatctattctaatggattacatggatcttggctcgctcgagtctctacgcggggttacagaaaaacaactcgctttgatgtctcgtcaagttttggaaggaaaaaattacttgcacgagcacaagatcgttcatagagacatcaagccagcgaatctgctacgtagctcaaaagaagaagtcaagatcgcagactttggagtgagcaagatcgtggtcaggtctttaaacaagtgcaactcgttcgtaggcacgttcgcatacatgagtcctgaaagactcgatagtgaagctgatggtgttacagaagaagacaaatcaaacgtttacgccggagatatatggagttttgggcttacgatgctcgagatcttggtgggttactacccgatgctaccagaccaagccgcgatagtatgtgcagtttgttttggagaaccaccaaaagcccccgaagaatgctctgacgatttgaagagtttcatggactgctgtttacgcaagaaagcaagcgagagatggacagcttcacagcttctcaaccacccttttcttctccaccaagattagggttagggttatctccgaagatattgtattggttactgaaaacattagactctcagtgatccaaagagatcaaaagatgcaccaaagtaggttttggtctaccacttgtaaaggatcggagatgaagtgatgatattagtggatttccgggagtaaaactcccggcgagatgtagggtctccacaccccccctctgaactcgtt

SEQ ID NO: 165081 - DNA, 4580 bp, Arabidopsis thaliana landsberg
  unsure (1)..(4580): unsure at all n locations
cctaagcagcaattcgaggggaactaccagcaaccaccacttcctgtgtttgcacctcagcaaaaccaaggtcgtgctgctcctgacgctgatatgaaacaaatgctacaacagctgcttcacgggcaagcctctggctccatggagatggcaaagaagatatctgagttacataacaagctggactgtagctacaatgatctcaatgtcaagatggaaacactgaataccaaagtccgttacttagagggacattctgcatcttcttcagctcaaaaacagacaagccaactaccgggcaaagcagttcagaatccaaaagaatatgctcatgctatcaccttgcgtagtggaaaagcacttccaactagggaggaaccaaagacggtcactgaggacagtgaagatcaagatggggaggatttaagtcttgagaaagatcaagctgacaaaccactcgaccagtcactcgagcaaccactcgaccagtcactcgagcaaccactcgaccagtcactcgagcaaccactcgatctaccactcgacagggttactcgaccaaccacccgacctgtcatcccagcagcatcaccaactgctccaaaaccagttgctgtcaaaaacaaagaaaaggtctttgtccctcctccctacaaaccgcagcttccatttcctgggcgtcacaagaaagcgttggcagacaaatatagagctatgtttgccaagaacatcaaagaggttgagttgcggatacctcttgttgacgctctagcactaatcctggattctcacaagtttctgaaagacttgatcgtggagagaattcaagaagtgcaagggatggtggtattgagtcatgaatgcagtgctatcatacaaaagaagatcattcctaagaagcttagtgatcctggttcattcactctaccatgctctttaggtccattggctttcaacagatgcctatgtgatttaggagcttcagtcagtctcatgccgctctctttcaccaaaagattggggttcactcaatacaaatcctgcaatatatccctaattcttactaataggtcaataaggatccctcatggtttactcgaaaacctaccaatcgggattggagccgtagagataccaactgactttgtagtcctggagatagatgaagagcctaaggaccctttgattctggggagacctttcttagcaactgcaggagctatgattgacgtcaagaaagagaagattcatctaaaccttggcaacgactttagaatgacctttgatgtcaaagacgcgataaagaagcctacaatagaagggcaactcttttggatcgaagaaatggatcagttagctgatgagttactggaagagcttgtagaagaagatcatcttaacagtgctttaaccaaaagtggtggagatgggtttctgcaattggaaacattgggataccaaaagctgttagactcccataaagcgatggaagaatccagaaccctttgaggaattgaatggaccagcaaaagaggtaatggtaatgagcgaagaagggtcaactcgagttcaacctgtccactcgaccgagctactcaagcaaccactcgaccttgtctaccgacgaacctagggagcccatcattccaacttcagatgactggtccgaactcaaggcaccaaaggttgatctcaaaccgctgccaaaaaggttaaggtacgttttccttggtccaaactctacttaccctgttgtcattagtgatgagccaaaaaccgatcaagtgaacctgctattatctgaactaaaaaatataggagagctataggatattcactagatgatatcaagggaatttcacccaccctatgtactcatagaattcatttagaaaacgaatcttattctagtattgaactacaaagaagattaaacccaaacctgaaagaagtggtaaagaaagagatacttaaattgcttgatgctgatataatctatcctatatctgatagcacctgggtatatctagtccattgtgttcctaagaaggggggaatgacagtcataaaaaatgatcatgatgaactgatacccattaggaccataacgggacataggatgtgtatcgactataggaagcttaatgcagcctctagaaaagatcatttccctttacccttcattgatcaaatgctagaaagattagcaaactatccctactattgttttcttgatggatatagtggattctttcaaattcctatccacccaaacgatcaagaaaaaactaccttcacttgtccttatgagactgttgcctacaagcgaatgccttttgggctttgcaatgcacctactactttcagcggtgtatgacttctattttctccgatttgatagaggagacggttgaggtattcatggacgatttttccgtgtatgggtcctctttctcctcatgtttgttaaatttgttcatggttctagaaaggtgtgaggaaaccaatcttgtactcaactgggagaaatgccacttcatggtccaagaaggaatagtgcttggggcataaaatctcaggaaaggggattgaggttgataaagccaaggtcgatgttatggttcagttgcaaccgcctaagacggttaaggatattaggagtttcttgggacatgcgggattctacaggagattcatcaaggatttttccaaggaattctacaaggagtggaaaattgccttggtatgtggatcttgttaactacttaactgctggaatagtccctagtgagttaagctcctaccagaagaaaaagtttttcagagacattaatcactactattgggatgagccattcttatataagaagggagtagatggtttgtttagaagatgtattgctgaagaggaagttcagggagtgttagagctttgtcacaattcaccttatggaggtcactttgctactttcaagacagttcagaaggttctacaagcgggattatggtggccttctatgtttaaagatgcacatgagcacataacaagatgtgatcgatgccagcgagttggtaacatctctaggagaaatgagatgcctcagaacccaatcttggaaatggagatttttgatgtatggggaatcgactttatgggacctttcgagccagcttcatatggaaacaagtacatcttggtagctgtggattatgtgtcaaaatgggtggaagcaatagctagcccaacaaatgactccaaggtggttttaaaactttttaaaaccatcattttcccaagatttggtattccaagggtagtgataagcgatgggggctcacattttatcaacaaggtttttgagaaccttttgaggaagaatggggttaagcacaaggtagctactccctatcaccctcagaatagtggacaagtcgaggttagtaacaagctgatcaaggctatcctagctaaagttgtaagcatatcaaggcgagattggtcaactaagcttgatgacaccctttgggcctataggacagcatttaaaaccccaatagggagaacccttttcagcttctttatggtaagtgctgtcatctccctgttgaagtagaatatagagccatgtgggcaaccaagcttctaaatcttgacataggggcagcacaagaaaaaaggtctttagatcttcatgagcttgaagaaataaggttagaatcatatgagagctccaagatctacaaagaaaggactaaagcttttcatgacaagaagattctgcctaaggattttaaagctggtgatcaagtgctactattcaactcaaggtttagactatttccgggaaaactcanatcaagatggtcaggccctttcactattaaagaggtactaccctttggtgcagttgagatagtttcaagagagggtaatgagtttaaagttaatgggcaaagactcaagaagtacctagcggacagcgtcattcccgagggatcaacagtccaccttcaggaacctcaaacagcttgaaatgagtacgaaagtcaagctaatgactttaaaaaagctcacttgggaggaagtcccatgactatccctgtaaatatctttttcttttcttgttgtttttgatgcattttgttagtgtttttaggatataagtatgaagagctaagcgaagtggattctggctctgagggtacagcagtacactcgaccatagagcaatcaaagacactcgaccttgttttggcttctccacgctaggagagatcactcgaccgcggtgctagccgcagtataagagagaggtcgagtatccacaaagcggtgttggccgtagcagaagaagagaggtcgagtatactcgtggcggtgctgaccgccacaaaggagatgaggtcaagtacccacagggcggagatgagacacaacagggagtttctggcctaatagcaatcacaagcagctattgacgaatacatccgctcgttcttcaactgaggtaagctcctcacttcaccattgtattataccatctcctatttttattttgtttttgttatgtgttttgtcc

SEQ ID NO: 165082 - DNA, 636 bp, Arabidopsis thaliana landsberg
ttgcgttacttctttttttggtttagccttaaggttttgatgagtttgctcatattatttcttgcattcacaggattggtcgtcatagtgcgtttgctcaattgaaagagttgttcaaggagcacaacgaattgattatcggatttaacacctttttgccaactggatacaagatagctcttgatgatgacgtagaagactcttttagctcgactgcaagaaactattgaaattatcttgtcatattttttctactcaaatgatacgatcaaaatctctaaattagtctctctattcagttcttgatggtttatcgagtatctttgctttgccatgcatgtaggaatttcactatgataaagtttgaccttttgctatcttctttacgtccacttaatttctttatttacttaatttgaccttcggcaaaagcattattatctacttattattttttattcttaatgaaaaaaaaaaaaactgaagtacatatgaaatttgtaatattctaacgagaagttaaaatcatagattgaaaaaagaactatattgagatcatattgagatcatagtttgattgttacaaatactaaaaatcattaagaattttttcatcatatcgttgcagtattttct

SEQ ID NO: 165083 - DNA, 333 bp, Arabidopsis thaliana landsberg
cctggagctgtcatgtccgatttcatcaccgtgctgcgcgaaacctgccccacccccgtgctggatgccaccaagtgcaagcgcatcggcggcgatccgcacaccgtcaacctcaatgcctacacctcggcggacggcagcaagatcatgggcacctggatctgcacccccggcaagttcgaggtgaactacgacaagtgggagtactgccacttcctcgacggctactgcatcatcacccccgagggcgagcagccggtgcacctgaaggacggcgacgtgttcgtcatcgagccggggctcaagggcacctgggaagtggtgcagacggtg

SEQ ID NO: 165084 - DNA, 487 bp, Arabidopsis thaliana landsberg
gcaatggtgagattttcatttttcttatgcattcctttgaacatggagaacatttctgaagcaaaacctatctctgtttcagttctcggtattcgctatgggaagtattgtgggataggttactttggatgtcctggagagccaccttgtgatgatcttgatgattgttgtatgactcatgataattgtgttgatttaaaaggtaaaccaatcaagaatatctacgtaaaactattctataaacagagaaacacaaagtgaagttaacatcttttaactactttgtccactacaaatctaattgcactctgcatcttggatctgagaatgctgcatttggtgctttttttacaggtatgacttatgttgactgccacaagcagttccagcgttgcgtaaacgagcttaaacactccatccaagaatctaacaaccaaaaggaaggaaattccaaggaatgcccttattcaacagtgataccccccgt

SEQ ID NO: 165085 - DNA, 1166 bp, Arabidopsis thaliana landsberg
tatgatctattatgttgaagacgcatggtgttttagcttgatctttggtcccattaacgaaagaatccatccttttgtcctgaaaatgttatcttccgctctctttctttcagatgtttgtaaaggatttgaagaaactcaaaggaagcgatttgcaattaaatcaggctcctccacggcaggaatcgctgatattcactcttctccttccaaggtacccgtgacgataagcagtacttgtgattgtttactgacatcttgtgttatactctggtttcaggctaacttctcatttcactatgccgatccacattttggtggtttaatgcctgcggcttacctaccacaggcaacagtaagtatatcctccttgattacatatggtgaggaggatatttatgctaaacctcatttttacttaaggtggacttgttatgtaacattatgctctgaagtagttacatatacagctatagaaagaaatgccatccttaaatggtgaattagtcttgcaatttatttctccatttgagatttcagtttgcttaaaaactttctgcagatatggaatccccaaatgactcgagttccgctaccattcgatctcatagagaatgagcctgtctttgtcaatgcaaagcaattccatgcaattatgaggaggaggcaacagcgtgctaagctagaggcgcaaaacaaactaatcaaagcccgtaaggtatagtattttggtcagcgtttcggtatcttactttggtttaatgactaaacataactcattatcaaatatcatacagccgtatcttcatgaatctcgacatgttcacgctcttaaacgacctagaggatctggtggaagattcctaaacaccaaaaagcttcaagaatctacagatccaaaacaagacatgccaatccaacagcaacacgcaacgggaaacatgtcaagatttgtgctttatcagttgcagaacagcaatgactgtgattgttcaaccacttctcgctctgacatcacatctgcttctgacagcgttaatctctttggacactctgaatttctgatatcagattgcccatctcagacaaacccaacaatgtatgttcatggtcaatcaaatgacatgcatggaggtaggaacacacaccatttctctgtccatatc

SEQ ID NO: 165086 - DNA, 1693 bp, Arabidopsis thaliana landsberg
ctttttctttgcggggaacaaaagacgaggagatagtaaagcggagacaagctttggtgtgatgcttcaagagaatctcaatttagatgccacttcaaacgcaaacgctaacacaacgtcatccacatcttcttaccagctgcaagaatctgattcctctcaccatcatcaagctttgtggcgagatccacaaagcgatttcaaaccgcagattttaacgagtggtggtaatcgcgggtttttcttagatcatcagttcagtcctcatggtagctcaagtaccgacagtagcacagtaacatgtcaaggtttcgctgttgacaactcgtcaaacgccatgtacgcagcaacaacaacaactcctaattcatcttccggtatgtttcatcatcagcaagcaggtggttttggctcttctgatcaacaaccgtcgaggaatcatcaacagtcatctcttggctattctcagtttggatcatccaccggaaactatgatcaaatggcgtcagcgttaccatcgacttggtttttaagatcttctccgccgccaaaaccacacagtcctttgagattctctaataacgcaacgttttggaaccccgcggctgcgggaaacgccggtgctcctcctcctcatgacgcgtcttctaactttttcccggcgttacaaccgccgcagattcatccgcagagttttgacgaacaaccaaaggtatatatttatagctacacgaactactttatttagatttatggatatgatctatataatttatatgtattggttggtcgtagaatatatcggagattagagattcaagtagcaacgaagtaaagagaggaggaaacgatcatcagccggcggcgaaaagagctaagagcgaagcagcgtctccgtcaccagctttcaaggtattttgctttgttgatattattttttaaataaggggaaaataaacaataaagcttcttttttggtatgaaaataaaagcatctttaacgacattgaaataaaaccagctttccatggttttgccaaaacaatccgaatctttctattaaacaaaaccgaaaccctaatttgaacaataaaattaggtttatcatttaccaccaaagtatatgcatgataggatattatgaaacattcttttattgcgaagttgttttattttatatcaagaaaacaaacattcttcccacaattcttgcataattgcttatactagatctctggagtttattacttcatagtattttttttataacaaggatttgttttgataaaattttgctgaattagaggaaagagaaaatgggggacataatcgctgcgctccaacaattggtttcacctttcggaaaggtactatctctctctctctcattttctgcaaatttttgctttacctttcagaaagatgatgagtgtgtattagtatatttggatactgacattattacttatcatgttattgttattatatctttatggatttattttatatgtaaggtctatttcaatagatatttatgttggagatgaatgaatgatataccatttcttagattttgttttactgaatctcatgtgcttttgtgtcagactgatgcagcctcagtgctctctgaagccattgaatacattaagttcttacaccaacaagtttctgtaagttagcccactccttc

SEQ ID NO: 165087 - DNA, 634 bp, Arabidopsis thaliana landsberg
tgcaagtcaagttcagttcccatgaacccaaatcagaaattatctcaagaagatggtgagctgattgatgatgcagaacattatcgcaagctggttggtaaactcatgtatctcacattcaccagacttgatatcacttatgcggttcataggctctgtcagttcacatctgcacctcgagttcctcatttgaaagcagtctacaaaatcatctactacttgaagggaacagttggtcaaggtctgttctactctgcgaatgtggatttaaagttgtctggatttgctgactccgatttcagttcctgctcagactcaagaaaatcaacgactgggtactgtatgtttcttggaacgtccttagtagcttggaaatctaagaagcaggaagtggtctccatgtcttcggcagaggcagaatacagggcaatgtccatggctgttcgagaaatgatgtggctcaggtttcttcttgaggatctttggattgatgtttcagaagcttcagttttgtattgtgataacacagcaactattcacattgcaaacaatcctgccttccacgaaaggacgaagcacaacgagcgaaactgccatcatattagagaaaagatcattcttggtgtgataaggg

SEQ ID NO: 165088 - DNA, 1594 bp, Arabidopsis thaliana landsberg
gattcgaattatgaaaatcatcttttgggcattatcagtatctgatctgttactatgatttcaaacaaagttgtgttttttgggaatttccaagttcctctctcttagatctctgggtggaaattttgttgatgtagcggctaggattagagagatattggagagtgcaggaatgtcacaagagagcttaccgtcaaatgtggtctcttcagctcaagttcttgcaaatgtggctaatttgttgaacatacgggacactgaactgagcaggtgactgtactgttagctctctcattagatgtgttgctatctcgaatcgggaaactgatgcagaagaaatatgtatagtttccttgtagcaatgggagacatatctctgaggaagactggagtggaagagaagagggctaaagcacagaaggagtccaatgctcttcttgactatacaaggaaagcgatacagaggctgacgtatttgaagaagtaagtttcgtaataaagcaccatataacttataatatgatcttggtggtggtgtacatgtaaaccttgccatttttcctttgggatgtgacttatctaactttatctgtgtgagctgttacagaatccttgcgcagctagaagatgatgtagtcccttgtgaatcacagatggagaactggaaaacaaatttggaagtgatggcggtgaaggaggaacaatacatacagcagtacaagaagtatgaggtagactccttcttcttttagtttttacattctcagttggtaataggtaaactgagaatcagataccttcctgcaattagctctggtgaggggtatttgagaatcatatacttttatgtaaaaactggaacaaaatggattgttctgtaactttagtgccctttagtgacactggtttttggaaaaatggtaagccatactaaaatagctaggtgcttttgaaacaggatggattagtaagggttgctagtaattgaggatttgattctagggctaaagtttttttaagttttgttactctcatatcataaaaacacacacacactctctgattaagttctagatcgtatcagaaatgcagtgatgatgttcactaggtaagtcaatatgagtttttgaagtctaatgtgcttctagtggtttgttgtgatttatatggatgatttggctccttcaaataatctgacagagtcaagatgaatggttttgatagcagatgttactcaatcgtgttggctacactcctaagatcagccacagagagctggtagaaatggcagagcaccggaaggaattggacaagatgacaaaaccagtccttgatactctacgaagctaccaggatttacctccggtaatcttcatctctggttctccaagcccttattgatctgcattgtcaatctcctctttgttattggtcattgctagtcctggttcacagtagattggttgttcatttctgtaaacaggacaaagctttagctgcactagcaatcgaagacaagaaaagacagtttacagccgcggaaaagtatctagaagaagtattacaatcagcccttgagacaaacgatgagtga

SEQ ID NO: 165089 - DNA, 1102 bp, Arabidopsis thaliana landsberg
atggtcaacaatcaagtctccagtaacgtagttgatacagaagggaacccaatccctccaatccagacagatgctcctgaagccgctgctcccgcgaccctagcagaactgaggagtatgatggctcaacttcaacagaaggtaaacgatcaagaacaagcaaatcggtccttagcacagcaactcgaagcagcaacctctcaaggacaaatcaggactatccgtttcggcgcgaggcacattcacgatcgacgggcggcagcgcgatctcaatcccacacggctcgtattccaaacacctggcaataccacaagacccgtccgcagaacggcaccggaaatcggacgggaccgaaccgagccggcaatttcgggaaatcgggaagcagatcgaaacgaaccgcaactccctcctctccgagcagagattgccgaagccgatcatatcgacgcttcggataatgaagattccaaggagaacgttagatgggctgaagaatacgccagagagcaggaaataagcgccatcaagctctccctagccaaggcagagaacgagatgaagctcgtaagatcccaaatgcataacgcagtctccgcggccccgaacatcgactgcattctggaagactcccacaacatgccattcacacataggatctccaacgcgataatctcagatccaagaaaactaagaatcgagtacttcaacgggtcttccgacccgagccaaattcagaccagaagaaagagacgtcggtctctgtcacttgttcgtcgagcacttgaaagggccagctctggattggttctcgagactcgaaggaaattctgtggatagttttcaggagctatcaacactcttcctgaagcaatattcggtgctaatcgatcccggcacatcagacgtcgacctgtggtcactatctcagcagcctaatgagccacttcgagacttcctcgcaaaattccgatctaccctagccaaagtcgaaggaatcaatgacgtagcggctctctctgctctgaagaagcactgtggtataagtccgaatttcgaaaagaattaaacttgtctataccacagacaatccgagacgcc

SEQ ID NO: 165090 - DNA, 886 bp, Arabidopsis thaliana landsberg
cgagagatttgtttaaaggttgtgtgtgtgttttcgcgtttttgttttgtcaggtcggcaagatctttgtcgagtagtcatacaccaccagctggatctgtcttagctcagagaatggctcgtggttacagtgaaccaactcttgaagagcccttgcttcctgaggatgtcacgcatccttccaccaaatcattgctttgcgtggttagccttgtccacaatgccttgtttggatttcacaatataaagcagtttcattatgatctaaaatttgattgttctcttacaggtctcggtgttcttgtttcttggaacattcaaccttcccaatttgctaagtgaatcaagaactatggctttgggtgagggagatagagtatttgtagttcgagcagcaagaaagcttttgcaggtactcataagtcgcacattatcatatatgcatgtcgagtctacggtcttcagtgaatcactcacgctcttttttgtcaaaggaatttctggttactttttcttaatctataaaacaacttcatgttaatggaagttgtgaatactattggttctatttcaggtcactagcagcaacgtagcagaacatagcggtggagaaagcagcagaattggaatgtttttgggttgggcaatggcagccatatacatgggtggaaggcttccccaaatatgtctcaatgtaagctttttaattgtctataactagtttattctttcgatctatcatttatagcagttttagctaaagcaaagttccttttcgatatctctttttttggcagatgaggagagggcatgttgaggtaagcaagttaaatgacacgacgcaaagatacagtcaagtaacagttttgtatctgatgaatccatt

SEQ ID NO: 165091 - DNA, 1463 bp, Arabidopsis thaliana landsberg
ccgaagaaactgtcccacagggatcatgaagccgatggatgggaacgcgccgatttcccaatcacctgcgaatcttgcttcggtgacaatccgtacatgcgaatggtgatttctcgctcccatctcttaagttttgttgatgttttctgtatagtggagttgttaacttagtaatttaggtttaggttcaggtttaaagttattgtaggtgctaatgattctcatagcttgcactgcacgtttttttcttcaaatccttattaaagttgttgtttatatgtagacccgagcggattatgataaggaatgcaagatatgtagtcgtcctttcacagcttttaggtggcgaccaggccggaatgctagattcaagaaaaccgagatttgtcaaacttgctctaagctaaaaaatgtatgccaagtctgtcttctggatctcggttttggtcttcctgttcaggtcagagactcagcactcaatattaattctcactactctgtcccaatgagccatgtcaacagagagtactttgctgacgagcatgacccaaaggtatgaccatggattctcctttttctttttaactaagtattttcaagtctgctttttaggttatgtgatcattgtgaaagattgatgactaatcaagtctagttttttgtagactagagctggactggattatgaatcttcatttgggaagatgcaacctaatgatactattttaaagcttcagagaagaacaccttcctatgaaaagaaccggccaaaaatttgtagtttctacaccattggtcagtgtaaaagaggtgccgaatgttcattccggcatgagatgcccgaaacaggagagctatcccatcaaaacataagagatcgttattatgggtaagctattggatcttctctattgcttgacatttagttgccttctcaaatgcttatttgagttgtttctcttatgtacttttcatatgttcgcagtgtaaatgatccagtcgcgatgaatttactcagaaaagctggtgagatgggcactttggaaccaccagaggatgaaagcatcaaaacactttacgtcggtggacttaactcaagaatctttgagcaagacatacatgaccacttctacgcttatggagaaatggaatctatcagagtcatggccgaggaaggcaaatatgatcaaagtggttcaaaccaacagcaacagggcagtatcgctcatagtggattaatatctcagcagcagactcaacactcacaaatgcagcagtactatatgcagccaccaccacctaacgaatacatacattacccatcaatggacacgcagacaatgggtgcagccatttcaacccaagagggtgatggttcaagcaccagtgagaataacagagcttattcttcttactcttacccgatgccaccacaccagccgtactagccaccaccaccatat

SEQ ID NO: 165092 - DNA, 732 bp, Arabidopsis thaliana landsberg
ctttataagtattcccttgtcgattatcttacgaaatccgaactatgcttctctggaattcttattaggttcaatgactttggaactgacggtggtccagcagctaaagagttagctccaaagcttgatctgaccaaagcacatctctcttccatattgggagtatcattgcccaacttagaggtatgcccattgcgttgattccttgtcttcatgtctcttatgctgtctatatatatatatgttgcgtctgacttggaaaactaattttgaaaggtgaaacaagtcgtgtgggctattgttgctctgaaaggactaggaggcttactctttgttatcggcaacatctttggtgcctatcttctggttaggatttcttcacttttgttttaagtattcaaaaagttaagttgttgtattgactttggatttcaattctttgtttcttattaggctgtctacttggtggttgtcagtcccattttatatgatttctacaactatggacccgaggaccgccaattctctcttctattgactgaattcttgcaggtttgtctatacacctttcttcatttattcgttttggcttgctcttgccatgttcttcgagctgaacctagtctgaataaagaatattcctttatggctcttctaaaccttcttaaatgattctcattcttttgaatcaatgttttatcacagagtgttgcgcttatcggggcattgttt

SEQ ID NO: 165093 - DNA, 978 bp, Arabidopsis thaliana landsberg
gactagaggatgtttttgttggttatctatttgggaggaagaaggcaacgaaagtagctcatgtgtgagtactttcaacccaaactttaaattaataacaaaaaaaatgacttcttatacgtcttcacatttaaagcttttagactttatgtatctcaatagcttaaccttggagcttactatctcttgattaaagaaaattgaagctttggatcttagtgttatggagaatgttgatgctttaaagctacataaaaacttgcttacgacatcactgctgattatcctttcagtgtgtgggagcaggtaatccaaaagggggatacggtcattgatgctacctgtggaaacgggaacgatactttagcaatgttgaagatggttatgcatgattctgttggttgtggtggttatgtctatgctatggacattcaaaaagatgccattgaaagcacttcatctttgctcgatcaagccgttggttcaaaagaggttagatgattaccagagcttgcttcctatagcagtgtggttcttactaatatcgagccttgttccatttctgctgaagaaatacagaaggaatgcgtcaaactttttaacctctgtcatagtaaaatgggagagattgtccctgaaaacgcccgagtgaggtacagtgtaaattcattgactcgatgccacattgttgatgaacccctggcaaaaatttcctcactttgcacactgctttaggttttcgctaatcttcatatgatgatctcaggatggttgcattcaatctggggtatcttccaggaggcaacaagtcgataatcactctctcggatacaacattatcggcattgaaagctgctgagagaatcttaaagcccggtggtctcatcagtttggtggtttacattggccatcctggtggaaggtaataaagaaatgatagcaaaaattctctaattatctaatcagatatgaactttc

SEQ ID NO: 165094 - DNA, 2655 bp, Arabidopsis thaliana landsberg
atgtgtaggattggtttttgatcgtactcgttgcaattttaggtttttccgggttaagctatagtgaatcagtgatgaaatatggagcggtcggggatggaattgtcgatgatacatctgtaagttattggtgtatatatattatatatcagtacaagcagcataattatttagtcatcatataaaaaaaattgaacttttgcatggtatatgtgggcaaaaaaaaacaaggcgttccaaaaggcgtgggaggatgcttgtaagggaagctccaaaatgggaagtgtaaacgtaccagcagggaaggtgttcctcctcaactcccttcacttcacgggtccttgcatacccaaacctctccttttcattgtaaatccctccaccactttacttgattgatattacatgaatactcgaatatgaacctactcctccaagttaattataaagttacttttgctgatatatgtatatatagatcgatggagagatgatagcgcagagtgatccacagaagtggggaaatggtgagaacggggtaataccatggctcatattcgatcaagtagatggacttgcaatcgtagggcgcggcttgttggacggccaaggcaaatcatggtgggatattcattgtagagaccatcccggacccgtaagtttcctttttttttaactttttatttttcttgggttataatgtatcctaacaaaccatctctatgtgataatacattttgtaacctataacgtgtcacagaattgcatctgccttgcaccaacggtaagtttgctatttacaaaaggaaatacgtagtatgtatataataacttggacgtctctataactatagatatatttctcgcagatgatgacatttagcaactgcggaaatgtaacattaaagagtttgagatttagaaatagtgcacaaacacatgttcttgtgatgggaagccaaaatgtgtatatcgatgatatcaaaataacatcaccggaggctagccctaacaccgacggtattcacatcacatcttccaccgccgtttctatcaatcattctgacatcgccactggtatatttccttacctaaccatataaaagatcaaacaaaagtttaatttgtttatttattctcacaattaattaaacaggtgatgattgtgtgtcgatcggagatcaagtgaataatttgaatgttacttttatgaattgcggacctggtcacggtgtgaggtgattaccatctccttatcgacctcgtaatcttatatttttcataataaaaaatgagaactaataagaaattagagacagcattgggagtttaggtagaggaggaacagaggtagcagtggaaaacatacgtgtgtcgcacgttaacttcactggaacaacaaacggagctcgaatcaagacttggcctggaggaactggttacgtccgaggaatcgagttcttcgatatccgtttctcgtctgtacaaaaccccatcatcattgatcagttctacggttgtgcccctacatgcgttgagactgtgagaacctttttctttctatctttcaagttaatattaaatgtaaatgagctaatgttttaatgtaatgtatcagatgaagggagttcacatagagaaagtgagatacatgaagatgagtggaacatcggcgacaaaggtggctatgaaactcgagtgttcaggggagagtgttccatgttccaaccttttcatgagagacattgacttatctccggccgatggtattgattctgtctcctctctctgctcttttgctcacggctccgcacaaggcatcattcgacctttatcctgtttctaactatttagtaatttgtaaagttatggggtgtaaattgaattactatgtaaatgcaggggtcatattggaataaacaacaatgttttagttaaaaggcctgtataacaatgcaggcccaaacaaaaagatatgagcccaatagtcactgaaattgttttctcaaacccaaaaaacctaaaaccttaaacctccgtatgtgttccgtcgttagcctcctgctaatctccatctcagatcgcaatttctcccttttccggtcactgctccggcttacgactatagcgttccgagataaagttcggctgtgttaattaaattcgccgtcggagggattttacggatatggctgttgttgaatcgcatggggatttaggttattgtcgattgaggtaaatggatgtcgagggtttgctcaactcttcgctctccttatctttgaagctggttctatagattggttagtagatcttacaaattgcaaagattggagatttgggggatttgaataagctacatgttattcgggtatgtttaggctcgagggagtccctggatcatgctatctctgcgacacattcgcagattctgccattttccttcctctgcagccaccggtattgcatatgtttcaacagagtccaatcagatccagggtttgaaaccgctcgaggaacctgcccttgtgaagcttaaatctgagcgagaccctgagaagctatacaatctctttaacgctaacgccactaaccgtttggtgattgaaaatcgaaaagcttttgaagatacggtctctagattagctggggcag

SEQ ID NO: 165095 - DNA, 1056 bp, Arabidopsis thaliana landsberg
aagcatggcgacaacacggggcttctgtgcgggaaacttctttacgtttccaccatttaaccaccgggggaagcacgggaacactttgatgacatcttaagctcccacatggatgagttctctgtttcccttctgtatctctctcccaactcagaaactcaaaccaaaacatagcaacaacaaccatttgatcaaccaagattcaagatcaattgggtgtttctgaagacaactctaatttcttatgaacacttacatccaaacacacaacaactccaatccctgatcttctcagcctcttgcatttgcctagatgctctatgtcattaccaagctctgatatattggcgggttcttgcttcacgtatgacccgctctttcacttaaaccttcctccacaacctccattgatcccttctaatgactactcagggtacttgcttggtattgataccaatactactactcaaagagatgagtctaatgttggagatgaaaataacaatgctcagtttgatagcggaatcatcgagtttagcaaagagattaggcgtaaaggaagagggaagcgaaagaacaacccttttactacagaacgtgagcgaagatgtcacttgaatgagcggtacgaggccttgaaattgctcattcctagcccgagtaaggttagttatttacttatgacaacaatctttcttggtttagcttcattcattatctccaatggcactttgcttaattcatattatatgttatttagggagatagagcatcaattcttcaagatggaatcgattacatcaacgagttacgcagaagagtaagtgagcttaagtatttggtagagaggaaaagatgtggtgggagacacaagaacaatgaagtagacgacaacaataacaacaaaaacttggatgatcatggtaatgaagatgatgatgatgatgaatacatggagaagatgcccgagagccatgtcatacaccaatgttcaagcaacaactcgctgacatgttcatggctgctgaggaaatcaaaagtcacagaagttgttgt

SEQ ID NO: 165096 - DNA, 2230 bp, Arabidopsis thaliana landsberg
atgccgcctaagacgcgtggaggaggtcaaggaaaaagaaaggagatagaagcgccggcgccgacgatgacagagaaagttaaggcgccggcggagaaagtgaaggagaaggtgccggcgaagaaagcgaaggttcaggcgccggcgaaggaagagaaggttcaggcgccggcgaagaaagcgaaggttcaggcgccggcgaagacgactgcgacggcacaaacgattgcgacggcgatggcaaccaatgcggctccaacgacagcggctccaacgacaacggctccaacgacggagagcccgatgcttgatgattctacgttttatgatgctctgaagcatattccggctgaagaaactcaagagaatatgcaaactgatgaggtggaagatgaaaatgaaaaagaagaaggaagtgaagaagaagaatcagggagtagtagccaaaccttgggctccgattccgattcagaggagacggagacaaacaaagaagtcgcgtgtgctaatcccgtggaagaggcggagagacaagatgacggcctagccgttatcgaggaggaggaggagaggagctccgcgagcgacgaggacgtcaatgtggaaaagtccgtggaggatgagggacacgaggacgagagagacgaggacgtgatagtggaaaaacccgtggaggagaggaccatagacgaggacatcgcaaatgtggtaagtattccatttcgtaataccgatctaattgggtaataatgcaattgtgaactgtggacagtactagtaacattgggaaatgctatgttgatatttaggcaatattggcggatgtgggtaataccttagagtagtactacaattgtgatttatcagtagttagtactagtaactttgagaaatactatatagtaaaataggagtatctgtgtaatactggtaattacggggaatacttttaggaaatacagagtaataatgtggcagtactatttacaattgagtgatatatgaataggagtatctgtgtaatactggtaattacggggaatactttttggaaatacagagtaataatgtggcagtactatttacaattgagtgatatatgaatgaatgtttgtttctttcaggatatggaggaagcgatggcaatgcagccacttggtatgtacttcccggcgtcggagtataccaagaagatgaagttagcaacgaggtgttatatctcggaggtgttgaagaccttcgctgacttggaacatcctctaacgaatgatgaaaaaaattattttatggagcatccgagtttcaagcacatctaccacctgccttccggatatacccacaaattaatgcggatgtggatgctttttcttcgaacggcatctattgagaagaagaaggaggtttggttcgttgttaatggagttcccatccgctatggtattagggagcatgctttgatctctggtttcaactgcaaggcctatccagctaattatcagagtgctggtaatatgaacttcgccaacaggtacttcaaaaccggggtaattagacgtgaagacgtgaaaaccaagctaatggagatggaaccggctagatcaaaagataggttgcggatggcggccctctattttctaacaagcatcattgtcgtgcctactaagaccggagaatgggctagtccaattgatgatttctgtgtgagggctgcaagtgatcttacgttttgtaagacatttccatgggggagatattcatttgagtgcattgccaaatcgacctcacacacattggatcattttaacggtgtcgtcccgaacactcaggcaccatggcctgttcccggattctgtgtgccgcttgaggtaagacttttgttttatccttgttacattttcgtaattgaagctaacaattaaattgcatgtgttttgtgtagtttttagcatttgaggccattccatcacttaggaaaagattcatagaagaaaaagagggttcacatgccggttgtccaaggatgtgcaaggtgagtttcaagaggaccgagatgaaagggtttacccttgagcaaatcaaccatgtactcggaacaactgaggttagtatttcctataattccttgagcaaatatgagcaaatatgaatttatttctttctaatatttcattgactattatttccataggtcaatgagagcctaattagagagaaggctgaagaagtaccc

SEQ ID NO: 165097 - DNA, 2153 bp, Arabidopsis thaliana landsberg
caaagacaatgttgtttgttgttagatattttcagtttgggtttcaacaccgtagccgaagagatcagacacaacttgaagcttgaagagaagcatactaaatggagagctcttgaacagcctttgagagagctttatcgagtttttaaagaaggcgaaatgtatgttcggaattgtatgtctaataaagattggtggggtaaagttatcaactttcatcagaacaaagattgtgttgagtttcatatacataatctgctttgttacttttcggctgtgatcgaagccatcgagaccgcgggtgagatttcgggtcttgacccttctgagatggagaggaggagagttgtgttttcaagaaagtatgatagggagtggaatgatcccaagctgtttcagtggaggtttgggaaacagtatttggtaccgagggatatttgcttacggttcgagcattcgtggagagaagataggtggaatctcgttgaggcattgcaagagaagaggaagtccaagagcgatgagattggcaagactgagaagcgtttagctgattttctgttgaagaaactaacgggactagaacagtttaatggtaagctcttccccagttcgatacttgttggttctaaggattaccaagtgaggaggagattaggtggtggtggtcagtacaaggagattcaatggttaggggatagttttgtgttgagacattttttcggtgatcttgagccgttgaatgcagagatttcttctctgttatcgctttgtcattcgaatatacttcagtacctttgtggattctatgatgaagaaaggaaagaatgttctcttgttatggagttaatgcacaaagatttgaaaagctacatgaaggagaattgtggacctagaagaagatatcttttctctgttcccgttgttatcgatataatgcttcaaatcgcgagagggatggagtatcttcattcaaatgagattttccatggagatttgaatccaatgaacattcttttgaaagagagaagtcacaccgaaggttacttccacgcgaaaatctcgggtttcggtttaacctcagttaagaatcagtctttttctcgggcttcctctagaccaaccacacctgatcctgtaatatggtatgcacctgaagttctagcagagatggaacaagatctcaaaggtacagctccaagatcaaagtttacacataaagctgatgtctatagctttgctatggtgtgttttgagcttataaccggtaaagttccatttgaagatgaccatcttcaaggcgataaaatggctaagaacataagaacgggagagagacctctcttcccattcccttcaccaaaataccttgttagtctaatcaaacggtgttggcattcagaaccgagtcagcgtccaacattctcttcgatttgccggatcctccgctacatcaagaagttcctagtggtgaatccggaccacggtcaccttcaaatccaaaaccctctagttgattgctgggatttagaagcaagattcttgaaaaagttctcaatggagtcaggttctcacgcaggatcagtgacacaaataccattccagctttactcatacaggattgcagagaaagagaagatgagtccaaactttaacaaagaagagaattcagatgcaggggaatctgtttctgaaagtgtttcagtagttgaagatccaccaacaacaatgccaatgtatactaagtcattatgcttagatgcaatatctgaatactcagatacaagatcagtctactcagaagctccaatcaaaaagacatcagctttaaagaaaagtggtgacaccatcaaaaacagaagaaattcaatctcaggtcagataagccaaaccacatagaactaaagctctctgatggatcaaaccaaatagattaatcatccttttcaattgcaggtttaaggtctccaggatcatcgcctataaaaccgagatcaacacctaaagtatcatcaccactaagtccatttggaagaagcagcagcaacaaagcaaacaaggatacaagattgcctttgagtcctatgagtccactgagccatggaagacgtagacaactaactggtcctgcttcaaactctgagcttacatag

SEQ ID NO: 165098 - DNA, 1479 bp, Arabidopsis thaliana landsberg; identical to SEQ ID NO: 28802

SEQ ID NO: 165099 - DNA, 4274 bp, Arabidopsis thaliana landsberg
  unsure (1)..(4274): unsure at all n locations
tgggacagatgctttggatcaagttcttgactctgctaggatttacagaaaatggaaattctggatgtgtcgggcttgttcactgaagttctattatcctaaaaagtttaggagtcatcttgagcaagaacatgccgcaaaatttaaaccttctacgacaaagcatatggcgcagagggtagatgaagtctgggctggtatgatatcggttgcaggttgggaacctgttgatgtagtagctgccgctgaaatgatcaagactcagctcgagtttgtgaaagagtttgtatatgtgaatgggtggtccaaagactggcctttagctgcagatgaagagcgcaggaagttactcaaggaaatccgattgctccttgtgttgttgttggagcgtaaaattctctcttgtagtattcgagactggatgatgcggtttcctgttaagcatcttatcgcacaatttgaagtttccgagaacactattactaccgagtgccgtttagtggaaacacctcagagtatctgctttttggaatgtgatgaacttaatcaaattctagaccttctcaaacgcatcaagtgtgaaagggatgatggtacagaactgatttccatggcaacggacagtttatggcgtcgtactcaagttaaagaaaagattgatattgaccatgagtgttcacttatgcttctggataagagattgctgagaggcaagattgcttcatttgatgatgaagggtcaatagatgtttgtgatcacaatgttcactacgccaagacacatcctcagggccatgatatcataacttggttacttgacgactattctttaatagataagagctttgggttccccagatctattggggcacacaatcttgatataaggatggctgttctgagagccattcacttcacgcgtaggactttggcaaccagatatgcaaagaagtggcagatcctatgttacgacgaatgtcttaatgacgccaggaacttatgtatacaagaagatgaaagtagaatgaatgttccggaagatcaaaggaacatatatgcatctcttctatgcgacagttgtgaagagcagttaacgatagacactgaagatcctctttttacagaattatacttgtgtgcagtacgagatgttctcgaaggagcatcacatccgacatttgatttcactaatgcagaagattgcctggaacttatacatgggcttataaatatcagtgatgatatagtgttgcaggccatagaccttctgaaatcagtggtcacccaaaaggttcgtccatgattttaatattcattaacaacagaataccatgaaattgtccatctaaaagtatctacatgacttgcaggttcttttaatggatacaaagatcttgctgattgataattcaaggataagtttgctaaacaacctcacaaggctttctgcttttgataaccgcacttatatccttcaactgcttaaacctttcttgctggttggtttgaaactgttatatacagaaagattttattttccgtcaaatttttcctttgaattgtttctcatatgttattatgtctcttctcatccagaacgaaattgtgaatatggaatccaaagccaagtcagatgcagcagaagcagatcttttaaacgagttggagaaggagaagctacaatcgaaggagaagccacaatcaaaggagaagccacaatcaaagaagaggagagatagaagcaaaaaggtctttgaagttctaatttctctatttgcttctctgaaaaatattttacataagatatatcggttaaacctaagtgatatcggttttaagttctcggaacaagtcaataacgtcttcctatcttatagggatatcatatcttctatgtagatatcgtttccttacttgtaggattccatggtttgtgtatataatacttatatggttgattgatcttcttgacgcaacagaaaccttcaacgagcatatctagtctccttgataagactgttgaacagtaagtacctcaatggtcagtttcgcatgttataaattgttttcgggttttctctgaccaaaacgttttgtttcatgtacagtaaaccttctgtcaaccttaaaccggagagtacatcttcatcactaagaacgatcgaagaaggttctatggaaccagaagatgctcttgcaagtgagacgggtcaattgaaaatttcatccaaaactgaaattcaagtggaagctactaaagatgaccctggtagttaaaagcttctcgatttgagcaataatttgaattatattcttgtgaggttcataacttcttatttctttcattgaccattttaaagatatgcgaaacatgcctggagaagattcactgtcggaacatttggagtcagtagctggagaagctacaaccagatacaattcagcatttgacatgacgctgaaggtaaagcaattatcaatcaaaacaagattcaatacctgaactctcatcttttgattccttattctttttgagaagttcacaaaaacatgtggtattgcaggccctcttgaacattaaggttctcaaagaagatttgctgaaccaaccatttcaagaccaccaggaagaacaagttcctattgcactacaaaatttatttactgctgttgtttcagaagcgatacaagatgagggagtctacagttgcctcttgagggacttacttacttcccaagaagaagttatttccatggttcgtgtggagaagatatgcttctaagcattattttgttaattgtttgttgtcattaatcttatttaatatcctaaaggtattctatttttttactctttgcagtcaagtgatgctgctaatgtagtagtagccatccttgatttttggcgttgctggaaaaatccagaaagggagagcttggtaactcgcctctttacctcggcggaaaataaaagaatgagttgtataaaatgcagaaggattacaaattatccacagcaaagttgttatggcattgttacggcagcagatacaatcagagaactgaaggtatttatcatttatcatcctcgttgtctttccagcagaaactgcaggtacttccccttatatagttgttttgtgcttaaacacatgcagtgtgctttggggaatagaaattttgtagatatcctaaaggtgatccgcttgagatataaaatggtatgtgacgcanaaggttgcggaaagacgaactctgttcagcacatttcaagtagatgcccgcctatcttcacaatcggtaaggttttgacccccatgattgtgatgttttttttgtactcatatcatatatttatgttggtgttttttggggttttaacattagtgttggaatgggagaagaatgaaactgaaatagaaatatatgaaacaacgaatgctttgcactgggagatagatatcagcaggttatacgaaggcttagaaccaaacactaactaccggcttgtgtcaatggtaaaatctgaaacattgtgacaaatgtttgtgctattgttcttctgtatttctctactacagtctgagaatttgggaatgcagattggttgtgttgaagaaggagaatacatttgcatggcttatgaaaagaaccggtgggtgagccgcagacatgaagcttcagcagaggaggtgagatgaaacagttgcctttgtctttattgccctgaattgtgaactttgttgggttaagacatatattgatgtgtggtgatgccataggttgttggcaactggaagagtgtggtcaaaatttgtggagaaaggaagattcgttcagaggttcttttttatgaagctgttcaatgatagaaatgtattagtatggaactgaagtttgtaatcttttggttcattacttgattttagtaataaagtactaataagataattgcaacaaaatatataaacaattgttaacgacttaaggtttttgctaattcttctcacacaacataaaccaatttcgatcatcccatgaccatctttgatcccgaattcgaaaactttcacacaaattttttgtcttatctgttaattcacacatttctggggtgcttttttctgtttattctggatggtgaaattaaatagaagctgttgtgtaatttactcaaaacaatgaatgcacacaagatgttcgacagaattccccaatggagatatcgaagaagaactgttcgaaaaagaagacacgacgacttgggtttctct

SEQ ID NO: 165100 - DNA, 1465 bp, Arabidopsis thaliana landsberg
ctctccttccatggcggatctctgaaaaagtctccggagattttcacaatgccttccgttcaaatccgttcttctccgtctcattcacagccggctatgacggttactgatctcaagcaacgagtcatcgcttgtctcaatcgtctctctgatcgcgatactcttgctctcgccgctgcagagcttgattcaatcgctcttaatctctcaccggagactttctctttatttataaactgtcttcagagtacagactcttccgcaaaatctccggtgaggaaacattgcgtttcgcttctctctgttctttctcgttctcatggtgattctctcgctcctcacctctctaaaatggtctccactgtcattcgccgcctccgtgatcctgattcctccgtgcgtgctgcttgtgttgcggcttccgttgatatgactaccaacatcaccggacagcctttctccatcctgttcgggccaatgatcgaaacagttatccacgattgtgatcccaatgcgcagatcagcgcagccgtgtgccttgctgcggcggtagacgcagtggatgagccggatgttgagcaactgcagaaggcgctgccgaagattgggaagttgcttaaatcagagggtttcaaggcgaaagcagaacttcttggagccatagggagcgtaataggcgctgttgggggccgaaacagcgaaaaggcggttctagattggcttttaccaaacgtctcggagtttctaagcagcgacgattggcgtgcgaggaaagctgctgcggaggcaatggctagagtggctatggttgaagaagaattagctcctttgtataagaagacatgtctaggtattcttgagagcagacgattcgataaggtaaaatttcaaaacaatttatggtagaatttataagaagtgcaatcacttttgactttagtgttcttggttaataacttcatatattacttgtgcaggtcaaacttgttagagagacaatgaatcgtacattgggtttatggaagcaacttgaagctgattcaacagaggtctcagagtcttcttcctcctccaaatcagcttcttctggtttgtctgcgacttcaggaaagagaagcaacacattgaaaggcaaagataggaatttaaacgcaccactaagctcaaagtcgaatgatgttgagcctttagatcgtggtgacactcctaaggatcttgagcaggaagctgttgtgccgaaagagaagcggaacccttcgacattgggagctaaacgggttctgttcccggcaaagatgcataaggtcaaagagaatgggtcgaacaagtcacaagttgttcagagtagtgatgaggagagtcctaaaactgacagtggtagtagcagttcctctcaggcaaagagtaatgcagaagagttgaaaataataagacaccagattacacagatcgaaaaacagcagtc

SEQ ID NO: 165101 - DNA, 445 bp, Arabidopsis thaliana landsberg
  unsure (1)..(445): unsure at all n locations
acgcaccgagcggaaaaagtgtctgcacacgctcggcaccgaccagtggtcggaccctgagaccggctcgcgcgccatcgcaaagtggcatggctcgatcgctgacggccgatcctgggctgtcacctcaccaactggcgacgtcgtcggcaccatcagccgcgacggcccggaccgagacttctgcacgagtcggacgctctggagtcagcgctgtatgtctacaaactcatcgtcggccgtggtcaggccggcgccggcctgggtgaactgatgctcgactgggcttgccggctcgccgctctggagggccggacctgggtccggctcgactgctggcgggacaatccagcgctccatcgctactacgagcagcgcggcttccaacacgtgaggnccgagctgctcccgcnccgcaaatacggctggctaagtcagcgccccg

SEQ ID NO: 165102 - DNA, 2317 bp, Arabidopsis thaliana landsberg
atggacgttgcacgccaagtgtttgtgttattgtctgtgttagtggtgtgttggggatttgagagatgtgaggctactgggaagtttggcttcgaagtccaccacattttctctgattccgtcaagcaaagtcttggtcttggcgatctagttccggaacagggaagtttggagtacttcaaggttttggctcatcgcgatcgcttgattagaggtcgaggtcttgcctctaacaacgatgaaaccccgatcactttcatgcggggaaatcgcacgatttcaatcgaccttctgggattgtaatgcctcttctcatccttatacataacaattcgtttcatgctttattgcttattgaatctgattggtatatccatgtgacttcagcttgcactacgccaatgtctctgtgggaacaccggccacttggttcctggtggctctggacaccggaagcgatttgttttggttgccttgcaattgcggttccacttgtatccgtgacttgaaagaagttggactttcacaggtgcctttttctcctgtcgaaagcattcagatatatatcttcttcaaactatttattccttaactctttttcttctttgacatagagtcgaccactcaatctatacagccccaacacatcttctacaagttcaagcattagatgcagtgatgaccgttgttttgggtcgagccggtgttcttctcctgcaagtagttgcccttatcagatccagtacctttctaaggacacctttaccaccgggacattgtttgaagatgtattgcatttggtcacagaggacgagggtttagagcctgttaaagctaatatcacgcttgggtaagtaatgactttgtttttcttaacaaaaatcacgttgccgctatttaaacctctaaaattatgttcatttcgtgttctatatgttgaaatgcatagcaaaacagagtaacgattatattgaacttagtttcaaaactaaaaatgttaaaaaagttgcctctcttttaactaacatgtgtttgcgttgcagttgcggtaagaatcagacaggtgttctccagagcagtgcggctgttaatggtcttctcgggctaggtttgaaagattactctgttccgagcatactggcaaaagcaaaaatcactgcaaactctttctcaatgtgtttcgggaatatcattgacgttgtcggaagaatcagcttcggtgacaaaggatacacagaccagatggagacgccactacttcctaccgaaccaaggtacatagtaaagtccaatttgatctgacagcgaataaaagttttcaatttgatgtattatctatactgattctgtttctgtctcctgtgatcttctttataccaaatgaaaatagtccgacatatgctgtgagtgtgaccgaagtatctgtagggggagatgctgtgtggggttcagctgctagctctcttcgacactggaacatcatttacacatttactagagaccaaaatatggtcttattaccaaagctgtaagtgccatagatcagactagtcatctattctaatactgcctgacagaattcattgtactaataccatatctgagtgaagttttcattcttcaagaaactttgtgctatcaaaagcttgtgtcattcctccaagcttgtgtttttttacatcacatgaccatcaaacttatacttttgcagtttgacgatcatgtcactgacaagcgacgtccgattgatcctgagcttccatttgagttctgttacgacttaaggtcatgtgtgcgctcttgtcatatgcttcttctcatttaactagagatgtgttggattttcaaagaagtctctgatacacatttgaattctgatgttctttctcttcacatgcagtccaaacaaaacaaccattttattccccagagtagcgatgacttttgaaggaggatcccaaatgtttctgagaaatccgcttttcatagtgtggaatgaggcaagacatgggtgttttgtttttctttcttccagtttcacatagtttcgtgaactagcgtcttgataattacatttgccttattttttgtctattttcttttcaacctgaataacaggacaatagcgccatgtactgcttgggtattctgaagagcgtggatttcaagattaacattatcggacgtaagtatcacaatactgagatttacactgtagatattcaatatatagaattgacgcagacaaaaaaaagagcataggctgaatgcattttcatttggttggttgcagagaacttcatgtctggctaccgca

SEQ ID NO: 165103 - DNA, 1571 bp, Arabidopsis thaliana landsberg
acagagtacatccaagaagaaacttcttgtcacgcctctgttaccccttcccttgtggtccaataaaaccctaattttctttgctttcttttatccatggtatcagatcctatatctcacttccttatacgaccatctctcatgtctacctatatatattaagatattcacaagaactacaaaagaaagaaaggagatggagtggccaacaacgagcaacgtacaaaacgtgagagtagctctcatgccaccgccatggccggagtctagatcctttaactcgctccacaggttcaacttcgatccttacgcaggtgtatgcacacaccatcgtaccaagactgcatatgttacatgcttgtccgtttatactattagatgcgttgaattgcatattggacgaattcatgaactttaaaaccttatttatcccacttgcaaatgttctcaagaagttttttttttctgtgaatgatgtaaagaattttaaatatgacgtccctaaacttcattccaaatgtcaactaaaacgttacttttctgatgagaagctaagattttcttatcttcagtctacaatatctattaaattaaagtttcttacttttttcttgggatcctacaaaaacaatttcttgggatccaaatgcaaaaaggtaaaacgtcacttttgaaaagttgagattcgtttatggtatagttcactctaagaaaaatggttgcggacataattttattcttcttatacttttggaagttttttttttttttttttttttcgtataatgattatattgttgcgcttctatgtttaaacatttccttttatcctttcggggcgtttgctaaaatgtttaacagcaggaaattcatacacgcctggcgatacacaaaccggaccggttatctctgtaccggaatcagaaaagatcatgaatgcgtaccgatttccgaacaacaacaatgagatgataaaaaagaagagactaacgagtggacaattagcttcacttgagcgaagttttcaagaagagatcaaattagattcagacaggaaggtgaagctgtcgagagagctcggtctgcagccacgtcagatagcagtttggttccaaaaccgccgtgcacggtggaaggcgaagcagcttgagcagttgtacgactcgcttagacaagagtacgacgtcgtttctagggagaaacaaatgttacacgatgaggtttgtgtgttatattgcacaaaattaaaatcatgggatctaattacatattatcgttttcttaatttatcccttaaagttgattgccccccttaaaaaattggattggtggtgcaggtgaagaagctgagagctttactaagagaccagggtttgatcaagaagcaaatctctgccgggaccatcaaagtttccggtgaggaagacacggtggagatttcatcggtggtggtagctcatccaagaacagagaatatgaacacaaatcaaatcaccggagggaatcaagtttacggtcaatacaacaatccgatgctggttgcttcctctggctggccgtcatacccgtga

SEQ ID NO: 165104 - DNA, 895 bp, Arabidopsis thaliana landsberg
  unsure (1)..(895): unsure at all n locations
atggaaatgggtttatctgggatgatgaatcatggaggatcaaattcaaaattacggaaatttgagatagaatcatcatcatcatcaccatcatcatcctctgatcataagtttcattcgatgaatgctcttgagatcttgagagaaaccgttagaattctccggtataatcttggtgctttcatgttaatcgctcttcttttgatctgtcctgtttccgctattctattaccaaaccttttagttgatcaatcagttgttaattcacttacagtgaggcttctcttagtttccaaatcaagtggtcttcctttattgccttttgttagaaactcttgtcagaaattctctgagacagctgtttcttctgcaatgtgtttccctttgttcatcactttgtcactcttgtctagagctgctgtggtttactctgttgattgcnnnnnnnnnnnnnnnnnnnnnnnnnngactaagtttgtggtgataatgcagagactatggaaacgtcttgtgatcacttacttgtggatttgtactgtgattgttgtttgtctcacttccttctgcgtgtttctcgtcgcggtttgtagctctttctatgttctcggattctctcctgattttaatgcctatggagctatcttagttggtttggtgttctcagtagtgtttgcaaatgctatcattatctgtaacaccacgatcgtgatctcgattcttgaagatgtgtcggggccaggagcgttggttagagcgagtgatttgatcaaaggacagactcaggttggtttgttgatatttctaggatcaacaataggccccacgtctgtggaaggattgtttgagcatagaatgaaaagtataagttatggagatggttcttcgaggttatggg

SEQ ID NO: 165105 - DNA, 2662 bp, Arabidopsis thaliana landsberg
agtcaatttggctttcctttgtggatattcatatttttggagcctacatgagaaagaataggtgtcgggctctctttcgcttatatcattcggtcgatttgcggggaatttatcgttggatcggctttctcatcataagaaacattcaattgctattcctcttttgcttgtatccatccattcgatgattaaaaggcgttacatcgatggagcggcttttgcaatttcattaggttcaggagatctcactgtttttctaataataagagatattcaattgctattcctctattgcttgtcaacatttgaagattatcgctattttctcgttagatcggttttcgtgattttaggtttatgagatctcgcaatttgtctcatcacatgaaatattcaattgttattcctcttttgtttgtatccaatttgtcgattttcgctattatattgtttgtcggctttcacattttttcagggttaggagatcccacaatcatttgtatcatcgtttctcaaattgctctgtttttcttgatgtgctcttctttaggttataatatttttaagcctagatcttgttcttctgctcgttcttcatttatttctatattgtattccgatagataagaatttgtgtggtttagaattacagcgtatcctgatagataataaagtgtgtggttaagaattacaacgtatcaagatagattataatttggatagtcaaggattacattgtctagtaataaattttgattcacttttatgatattgccaattgttatgcatttaaaatcctctacaaatcaattctttgcaaattgttttccaaattcgcggtaggtaaaaatgacagctaatcatatttgtggccctatacaagtatagtaatttatctcggtacgacctgaatatatggaaatccaaaattttataatttggaaaaccaaaaatttcgtaatttggggtattttgatcttatcgatattcgagatcttatctctagtatttctttagatatgcaacattggaatttgccttaatttgtccataggttgagaataaattcactcacacttttaattttttgaatgtcacaaacttatatacaatctagtagtcgaggaccatttaaaaacatttttggaatgttaacaacttatattatctctatcctttttctccaatggcagcataggaacgactttgagttcttgccgagtctgttatgggaatctaaaaatactgtgtacatcatgttgcaggttaagtacccactactttggttatttcctttggctttttaaaactgattgtttctaaatcaagccataaattttctgtataaacttctctatatttgtgacactcactttaaatttaattcaatctatgcaggaggtttttgaagcctacagacacctcgcaggacacatctcacttcgattgttccctcatccgttgaatccacttcgagtgtacaatgttttgcttttgttccaggttttgttttggtctcacacctttctttttttcttaagtttaaaaaccatttctttcataaatgcttaagcctaaacttgctctgtgatgttatcatcgtttttcctgttacagagcatggcttgtcacccagacacaagccgtcagtttcttaggggtatttctttctcctcttgtgcaacaaaccatatgatgttgcattgtctttgaaatttttctgcttatgttggttgatttgttgcagctaagatgccaaattatttctatcctctgatggacactggtctcattgataaacgtgacgaatgcatgaggcttgctgcgttgggtgtcattgctcatatgttgaaggcggtaccacatacatattctcttacaatataatctgtttgtgacaaatgctattgaaaaccccactaaattactttgaacatctcacttctctatagtctgaagatggagctgttaatcgttacctaatggaaagtggtgttgttggtttctgcgttaaacccattgagtttggctctacagaaacaaaaaaagtaagtttctttcgcacgctacttctactcattttgactataaatcaaagaagaataaagaaagcattttgaaacttaatacttgttgttcaggttgctttatacatactggacaagattatgtcgacggatcaggggctttattactgctgcgtcttggctgatcggttttacgttatcgatgagctccttaagaaggtgctcttctatctttctaacatggtcagacctccttcatccttgttcagccttgttactggttgctacgtcaagctctcccagaactccaggttttcttgctaaacctcttgataatattttgatattgatacaaatggttaggttttgtaaaagcaaacaacagtttgagtttttggtatatgcattagggctcgtaacggaataaggcgatacacgcctttcttgctgtttgacggcaccttttccagattatatgctgtaagatttcaatctcttgtgttttttggaatttgtatggttttggttcatgcagggaatagtaaagcttatgtgtgtcttgtctgttttttttgtaggaggatccagtggctgctaacaatcgaattcagctgcttcagaatctggacaactaa

SEQ ID NO: 165106 - DNA, 1218 bp, Arabidopsis thaliana landsberg; identical to SEQ ID NO: 17391

SEQ ID NO: 165107 - DNA, 1809 bp, Arabidopsis thaliana landsberg
  unsure (1)..(1809): unsure at all n locations
cgaaacatctaacgtgattctaaggttcatacatcgttgtgttaaacctcatactattaagtaacttatttgtcttcgacgactagctaaactcattccctctagtgctcattaatgcaaagaaaacagaggtcattgactttcttcgtttcctcttgagtttctcatctcatgatcgttgttcctttcgaaaaacaaaaaacatttcaatggcttcttcttcttctcataactgggtttacgacgttttcacaagcttcagcggggaagatatccgtgtaactttcctcacccactttctcaaggagcttgatcgaaaaatgattattgctttcaaagacaatgagattgagagagggaactcgatcggtaccgagcttatannnnnnnnnnnnnnnnnnnnnnnnnnngtggttgtgttctccaaaaactactcttcttcgagttggtgtttgaatgagttggtagagattgtgaattgcaaggaaattgtgataccagttttctatgatttagatccttctgatgttaggaaacaagagggagaatttggagagtcttttaaagagacttgcaagaacagaacagattatgagatacaacgttggggccaagcgttgaccaatgtagcaaatattgctggatatcacactaggaaaccgtaagagatttttaatccattaatattgtttatatatcttgaataaatgttttttcttgacatttaacttttaaagtctgtaatactcgaggctcgaaaccacaacatgtaatattagtttcgtcccaagcgtcattcgaatcggcgacctctaagctttgcatacggtctttaccaattgagctaacgacacttgatcacattttttagttttttcttcgtctatttaacataatcttagaaaagtaactatgaaaatctaaaatgaaatgtgttccgaaatatgaagcatttttagtaacgttttactttggttaccgtcttcaaattatactaaactgttaagagtgacaaaaacaaatttatgtgattgggccaaacatgccaattgccaaatattgataactcaatcttgtgtacagattgcagtggctgtgttactagctgtgacagtgggagccaccggggacggagagatgaagaagggttacgccgtgacggtggtggtgttactttgcatatacgcagctggatttggatggtcgtgggggccattaagctggcttgtcccaagtgagatattcccactcaagatacgaccagctggtcagagcttaagcgttgccgtgaacttcgccgcaacgtttgctctctctcaaacgttcttagcaacgctctgcgatttcaagtacggtgctttcttgttttacggcggttggatctttacaatgacgatattcgtcatcatgttcttgcccgagaccaaagggatacctgtggattctatgtatcaagtttgggagaagcattggtattggcaacggtttactaaaccgacgtcaacttaaaagatgcaatattgcaatgggttcgcattttcaatggattatgtttattaattagttaggattaaaaggatatatgagtcatgactaatcagtaatcacaatattgttttaatatcgaagttgcattggtaacttggaacaagtatacgttcgagaacatattgttttaaccacgtagctacgtggtaaggtgggaggtcaactgaccccaacagattttgtaaattataaatatttctttgtattttaatttttaaatgtaaaacttaagtgaactggttaataatgtttatgatgatc

SEQ ID NO: 165108 - DNA, 1907 bp, Arabidopsis thaliana landsberg; identical to SEQ ID NO: 28149

SEQ ID NO: 165109 - DNA, 1408 bp, Arabidopsis thaliana landsberg
gggtgaataggaggaacaaggaacataaccaaatggggcaatcgtggagattaatgatactctagatcatgagtttagatcacgtgatgattgtcatgataggggtgatgaatatgttgagcctccaactgttgtagaatctagtcagtttaaaaaaagaattgggaagacggtattggtttgactttacgacaagaatttccaagcatggcagcattgcaggaagtggtggacaaaggtgcatttgctaacagtttcagttatgttatcaaaaagtctgataaggagcggtatgttttggcttgttttaaagaacactgtggttgacgtatacgagcttcaaatattcagaatgcaagtatttactctattagaaagtacaacaatatgcatacttgtttccggattagtaagagtattacaaggatgaggaagaggaaatatacccctgaattagtaacagctcttcttcatgatacttttcctggactgttggaaattaaagcctcatcaagtgcatacgtaatgtgtattctgcaactcatcacgggtattgtgtttggcatttatcccaaaatgtcaaaggtcttgccactaacatcaatagagacgtacttgcttggaaattcatggagttaagtcggatttataccatgtcagaatttgagagggagtatagagtatttaaggtgagatatcctaccgtggcttattatttggaggatacaaccgtgaaagaaaaatgggctaggtgttgtttcccgggggaacgatacaatttggacactagcaactgtgtggaatcgttgaattctgtttttctcaatgcaaggaactattctttactacccatgctagatgcgatcatggccaaaatttctgtttggtttaatgaacatcccaaagatgccgcctcaggaactaaaaataataagtttgtgcctttagtggagaactacttgcatgatttataagttgacccggagaaactaaaagtgacggagctaaacacattcagcttgaatacaatgtcacgggagatgaagggatagaattttagtcaacttgctcttgaaaacatgcagttgcaaggtgttcgatatccaaaagtatctttgtattcacgcattagtcgctttcatttccttcgagagagatacagcaagaattcgaggtatggaattacatgaattggttacaaagtattattggacggagatgtgggcaatggcgtattacaggactatttatttagtcccggatatgtcacagttggatatcccagatgacatcacggcgttgaaggtatccatccaccggaaaatgacgtccaaaatgttaaaggactcaaaataaaaggaggccaaggcaatcgctgcaatggctgttatttggcacccatagtatt

SEQ ID NO: 165110 - DNA, 490 bp, Arabidopsis thaliana landsberg
  unsure (1)..(490): unsure at all n locations
tatctgacacttcaaatgtgaacgacattgtaacactaaaaaaagcagttgctgcaaacgggaaattggatgtgctttatctgaatgcaggttttggaaaattcgcgccgattgaatttacaagcgaagaagattttgacgcacaattcaacgtaaacgtaaaaggcttgttctttacgttgcaaaaattgattccgcatttagccgaaggagcctctgttataacaacgtcttcaaatgctgcctattttacaatggcaaatggtagtgtttattcagcatcgaaagcagctgtaagtaccattantcatattcccgccaatgaattggcggacagaagccttcgtgtaaacattgttattcccgccgcagttgnngngaattggatggataaaagtggttttagttgtgaacaaaaagaagtgttcacaaaagcaatggatgagggaactgcgttgaaaaggatagacaatccggaagaaattgataa

SEQ ID NO: 165111 - DNA, 1675 bp, Arabidopsis thaliana landsberg
ttcttcaccttatgctcatgtatgtgcttaagatcaaaaatcgttattcgctgctgttactagagaactgaattgagcccatcaaattcacgggaccataaataaaacgttgggcctagcatctttgtcttttattgcctttgaaccttattgatgatacttattacttaccatctcgccttggttcctcacatttggtttattaactccattcggttaatctctctgtgattattgcaaaatgtgatatctattttatttcttctaaaaacaactgtacctataaaagtagttataatgtacctaaacgcattcataaaataaatgacaatattggataatcatcttcacaacattaaatattatgtctattacattatctttgaaacaaaaacaaaatcttcaatatgtgtgctgtgacttttgtctaactaaatacgaaatatcaatacatggaaaaaaaacaaaataaaaattagtgtatcaacaatggagtgaattccgagttatatattctttccttgccttgaatgtttgtattagtatgaaggtattatatttcaacttcaagtgggggttattatttataagtcacatgtaaagcgaaaaaggtgataacattttcaccgcaaattatgggactctcctttttcattattgaaatattttagcatggaagtttttgggttaaagaaagcaatatagcctaaagaccgtccaaatcaaatgttccgatgttttattaggatccggcgataatacttatatcaactgacgaatattttggaaaattaagatatcatgtggtttgcactcacatgagtccttctcatcaatgtgcatgcttttttgtcgttttctataaagcgctttgatttgatcacttctttgttttgccttcttcatgtctttgtttctttttcttataataataataatatgtttttgtcctttttacaagttatgtagccaagcagtatcagcgaaaatttctatttaagttagccaatctcctatcttgtttttttcttcttaattctaaatcatcactaaaactctattacaatctcgaaaatatatttttttgttttttactagctatatctccgtttgtatctcatctgtcccaaaaagaaaaatcgtctctctcagctaatagagatgtatagatgcacatttaacccacctgaagaagaactcattaactattacttgaataacaagatcacagagaatgatgatctagtggggaagcaaatcgccgaggtcaatatatgtcaccatgaacctgcagatttacctggtaaattatactttataaaccataaaattttataccctaattaaaccccatgtctagactcttaacatttcttcttcatttttatgtgtgttttgaaaagggctggcgaagatagaatcgagtcatacttggtacttcatatcgccggtggagaagtttgggaagctcaaccgaacgaagagggtgtcgaggtcagggcactggaagataaccggaaatagtcgtaccattaaggacgttgatggtaaccctatcggtttaaagaaatttcttgttttccaagaaaacaaaagatcttcttcttcctcgttatccaccactaccacccaacaacagaagaccaattggattatccatgaatttcattccttt

SEQ ID NO: 165112 - DNA, 235 bp, Arabidopsis thaliana landsberg
cttagatacataaaacgacaagtgaaatagcaaaaagaaaaaaaaaaatattccttttgtttctctctatgactctatctacaacatcttttggtttttttgccctttgtgaaaagcaaagagaatgcaagtgtgacatggcaacggttatgaccacaaatttgtacaacgtggcacgtcatagcccgcacgtgagccaacctcatggaagttagtcgcaactcacgtttcacag

SEQ ID NO: 165113 - DNA, 766 bp, Arabidopsis thaliana landsberg
agaaatcaagacgcaaatggggactaactgaagatgtggtcctcatcaatgcatggctcaacacctccaaagatcatgtcgtatccaatgagcaaaaagcaatatcattcttgtaccgtatcgctgcctactttgctgcaagtcccaagctataagggatggaaaatagattaccaaaatgttgtaaagatagatggtctaagataaatgagggttgttgcaagttcgtaggaagctatgtggctacaaccaaagagaaaaccagtggggagaatgataatgatgtgatgaactttgcccaccatagtttctacaccgattacaagactaagttcactcttgaacatgtttggagggaggttaggtttgatcaaaagtggtgcgtccaatatgctacatgcggtaaagagaagcgacaaaaatgtgatgaacactcttccccatcctatgtgcaacatggccttgaagaggatcaacctcgccccttggggtaaaggcagccaaaggcaaagtgaaacccaaagccaaaactaatttggaaggtgatgaaaacaagactatgacagagatgcaaaatatttggtctaattaaggagaaagatttagctttcaaagagaagctacttaatggtaacaagaagctactcatgttaaagagaagctaagtgaagagaagttactagataggctactaaccaaaacccagctcctatctgacatcgagttggctcttaaacacaaaataataactgatatgttgtcctca

SEQ ID NO: 165114 - DNA, 872 bp, Arabidopsis thaliana landsberg
tattgatgcgctatgccaacatgtggaaaacggtaccttctgcatgcaaatgttgagagcctatcctcccgcggtttctgccaccgatttggtactaatctttaagacacatctattaaatttctcatgtttctgttttaaccttaagaaaaaaggtattacgttttctcttctttctttgatatcacaccaaaagtttacatgccaaagtttcagttgagttcttaaacttatgatttgatttatcattacacaattattctttcgctcttttggaattaaaaaactattgtttagattgttaatttaccttggcaaagttgatcatttttctgcgtgcacttggacacttgtaggcaaaagttttgcaagatgtaacataaactttttattttgcaattgtagttatctttataatttattttcagttcattaacatcaaatttgtatgattttgtttagtaaaccatcaataattgtattttctaatctatagttttccctggctaacatcgtgatcaacctcggcatatcctacgccaacaacacgggggcttttgccgccgaaacggccaagaaagagccaacgttgaaggtgcagttcgagtcattccagcatgaatatgacggtattcagttgtatctaagaatggcaaggggggagctcaaggaatctccgatgagtgcagactatgacatttttcgttgtacggatatcacaatgtacctgaaggatgtggtcggaggaaacagagacaacacctctaaaacgttcatggatatgacattgcaaatggagaaccttatcgatgttgcccttggagccaccgtagctcttggcgggtgaatatgagtcgtggcgttgtcaaaag

SEQ ID NO: 165115 - DNA, 443 bp, Arabidopsis thaliana landsberg
gttccagaaaaatgtttatgtggtaagcctgtaaaacatatagtgtgcaaaactggttacaggcaaggcgacagagtctacgaatgcccaatgcttaaagtaagttattgtgttttcatttcattggaacaacaaagtacaagtgaagtatatttatgaagtcttctctctttcgcaggatgtagagtacgagtccagcaaccaccttatgcagtggtgggatcaggcgataactaaggagcttgagaaggtaaatcacaaagttgattccgcactaagacatggacaacgagcatgcaatcatgaaaggttactcgccaaagaagtcgagattgataggcttagggcattactttatacatggtgattaggatgtgttttatgttattgaggatggtgtatggcatttgatcctaattaagttatgatatctggattttatg

SEQ ID NO: 165116 - DNA, 342 bp, Arabidopsis thaliana landsberg
cggtcgtggctcaaagccgaggagaacaaacgccacacgcttcagaaatcggatatctccaacgcagtggctagctctttcacctacgatttccttcttgatgttgtccctaaggacgagtctatcgccaccgctgatcctggctttgtggctatgccacatcctgacggtggaggagtaccgcagtattattatccaccgggagtggtgatgggaactcctatggttggtagtggaatgtacgcgccatcgcaggcgtggccagcagcggctggtgacggggaggatgatgctgaggataatggaggaaacggcggcggaaattgaagtgtagatttaggg

SEQ ID NO: 165117 - DNA, 4589 bp, Arabidopsis thaliana landsberg
  unsure (1)..(4589): unsure at all n locations
atgaagaacaagcacacattcatacaatttgacaatgggtattattcagaagagcatgagtggatttctaacaattctttaagcggtgtattgttgaggacgtcaaaggtaacatactctatgttagtaaaaaagatatgcaagaagattggaatagatgaaacctcaaggaaggtgaaattgagttatattctatgcacatctcagagagagacatctattgtagatgatgatgactttttaggttatctaacggtagtgaatgctaagggaattagaccagctttgaacgtggaggtagtaaataaagaatctgagagggtggaagaaatttcaagggtagagagaagaagttcagttggtgttaattatgaggagttgaatgcatttgatgtggagaatggtggagtagtgacgatttttagaggagaagctgcaggaggtaattgtgtgaatgatgaaccgattattgaagaggctaatagtgtagaagaggctattgagaatgcggatagccgggtttttgaagaggctatggagaatgtagttattgaagatagggagcatgtggatagccggatggatgttgctgaagataatggtgttgatggtagaattgagtattatgagcttccatgtgttggtgaaggaagtcagagtagtgagaaaagtcagagtgttacggaatgggaagatggaacggggattgaattgcatcaagaatttgtttctaaagaggtcgtgcaagatttagttaacagagctgcaaataagtattgttttgcgaccacaactatagcgtcagatccacagcgactcatgttacgatgtcggcaatctaaaacaacaggttgtcaatggtatttacgatgtgcaaaagtaaagagttcagattgttttagtgttagagttcacaggaagatgcacacatgcaagcggtctaataagaactcaggcaattgtaaacataccggcacaccacgattaatcgcgtctattttgcatgaggattatccaggtgagtttcaaactccaccacctaaaagcataatgagtattgttcggggaagaatgggtttgcattgctcgtatgctaccgcatggagagggaaaagacaacacgttagtgatgtgcgtggtagtcctgaaaaaagctacaccgacttgtactcttatctgcacgtattaaaggaggtgaatcccgggacaatatcatatgtggaagtggatgcacaacaaaagttcaagtacttattcgttgctttgggtgcttgcattgaagggttcaaagttatgagaaaagttgttattgtggatgccacttttcttaagaccgtatacggcggtatgctagtttttgcaacagcccaagatcctaatcatcacaattatatcattgcgtctactgtaattgatagggaaaacgatgctagttggnnnnnnnnnnnnnnnnnnnnnnaaacagttataccagatgaaccaggtttggtttttgtgagtgatagacatcaaagcatcatcaagtcagttatgcaggtgtttccaaacgcgagacatggccattgtgtttggcatttgtttcaaaacgttaaagtaagggtgaaaaatgagaaggaagaagtcgcggttaaattccttgcatgcgcacatgtttatactcaatttgagttaacgagagagtatgctcaatttaggagaggatttcctaatgtcggttcgtatttggatgaatgggctcaggtggaaaattgggcaaggtgttattttgaaggggagaagtataacatagacacgagcaatgcgtgtgaatcactgaacagtacgtttgggcgttgaagaaaatacttccttttacctttgcttgatgcaatttattttgttgacttgctaaggacaacttgttattgccgacgttttgatgtcaacaagtatctgtgtgtacatgcgattgccgctgcccaaaactttgtggggaccgaatcgatattagatagtctcgaaatggaagacctaacttcgcgttattaccatatgattacgtggaaattggcatagctcattaccatttatccagtcccgcaatcatcagtttagtaagggtgaaaaatgagaaggaagaaatgatttagtaaaaaaagaaaatatttagtaaaaaagaaaaccgacgtcttcgcgggactcttttctccgatacgtgattttctccgatttcgtcgtcggcgacttgagcttcgatttcgccggcgatttgagctccgatttcaccggcgaattagcttccgaggacgccgtagcttccaagccgataatctgctcccaaagttagcttcctcctcaccgacaaaagtaaatccgatatttttttgatttgtagattaatgtgaatttcttggttgagttagttgttaataacataaattttttgtattgttcgttatgggctgttgtatcgttttgaatcggagagttcaatcgaaattattgatttgagaaatctagaattgacgaactagaacaaatggtaaaactgagacataatagtacagggggtacaaatgttttattgagataaaatatgacagttggtataaatgatattaatgagatataatataggtacaattatgtctcaatctgaataattacgtaattatgttttaataatttatttgtaattatatgcgccgatgaataacaagaacacattcatacaatttgactatgggtactattcagaaaaccatgattgattttcaaacaattctttaagtggtgtgttgttgaagacgtcaaagataacatactcattgttagtagaaaacatatgcaagaagattggaatagatgaaacctcaaggaagttgaacttgagttacattctatgcacatctaagagagagatatctattgtagatgatgatgactttttagggtatctaatggtagtgaatgctaagggaataacaccagctttgcatgtggaggtagtaaataaagaatgtacttattgagcatgtggatagccagatggatagggaaaaagataatggtgtggttggtagaattgagtattatgatctttcatgtgctgctagtgaaggaagtgagagtagtgagaaaattcagagtgttacggaatgggaagatggaacggggattgaactacatcaagaatttttttctaaggaggcggtgcaagatttggtttacagagctgcaaataagtattgttttgcgaccgcaactataaaattggatctaaagcgactcatgttacgatgccgacaatctacaacaactgcttgtaaatggtatttacgatgtgcaaaagtaacgagctcaaattgtttcagtgttagagttcacaggaagatgcatacaatcaagcggtctgataagaattcaagcgattgttaacataccggcacaccacggttagccgcgtctcttttgcatgagaattatccaggtgagtttcaaactccaccacctaaaagcataatgagtattgttcggggaagagtgggtttgcattgttcgtatgctaccgcatggagaggaaaaaaacaacacattagtgacgtgcggggtagtcctgaaaaaaactacaccgacttgtactcttatttatacatgttaaaggaggtgaatctcgggacaatatcatatgtggaagtggatgcacaacaaaagtttaagtacgtattcgttgctttgggtgcttccattgaaaggtttaaagttatgaggaaagttgttattgtggatgccacttttcttaagaccgtatacgacggtatattagttttcgcaatagcccaagatcctaatcatgacaattatatcattgcgtttgcagtaattgatagggagaacgatgctagttggtcgttgttttttaacaagctgaaatccgttatgcggatgaaccaggtttggtttttgtgagtgatagacatcaaagcatcatcaagtacgttatgcaggtgtttccaaacgcgagacatggccattgtgtttggcatttgtttcaaaacgttaaagtaagggtgaaaaatgagaaggaagaagtcgcggttaaattccttgcatgcgcacatgtttatactcaatttgagttaacgagagagtatgctcaatttaggagaggatttcctaatgtcggttcgtatttggatgaatgggctcaggtggaaaattgggcaaggtgttattttgaaggggagaagtataacatagacacgagcaatgcgtgtgaatcattgaacagtacgtttgggcgttgaaggaaatacttccttttacctttgcttgatgcaatttattttgttgacttgctaaggaaaacttgttattgccgacgttttgatgtcaacaagtatctgtgtgtacatgcgattgccgctgcccaaaactttgtggggaccgaatcgatattagatagtctcgaaatggaagatctaacttcgcgttattaccatatgaatacgtggaaattggcatagctcattaccatttatccagtcccgcaatcatcagtttggattattccagatgagataaaacaattgatagtcttaccgccggat

SEQ ID NO: 165118 - DNA, 2732 bp, Arabidopsis thaliana landsberg
  unsure (1)..(2732): unsure at all n locations
caaagctacagagacgattctagtttgtccgagacgaggtcggcggcgtcaccgcggaggtacaaagacgcgtcataaccctaggcggaatgggtctaattcgtccgccgtcaacctgagccgacaagccgaagaagaaaaaggctgccaagcatagggagaggcacgccgatgacgatcgacgacctggtcgacctccggaggagatgcaaggttccggtggaggtacatatgatactcccaaggccaccgctgcatcttgagaacgtgtcggtcgggtggtgctgcgcttatgccaatttcttcgagaaatacggcctatttttcccaattccggcgtgtatccccgagttgctctattgtctcggcctcgccttcccccgatgtgtccgaactttgtctgccatgtgctggcgttattcacccaagctcgggaagtaaacagagaattcacctgccatgacccgcttcaggtctgnnnnnnnnnnnnnnnnnntaggagtgaccaagggacgtactacatcagtgcacgtcccggatctctggtcctcggcggtttgaaagcctgtcgagacaccaatttgcgatccaagtacttctttttcagagtagatcgtcattcgatcgacagttttgatcccgcgaggatgacgaggacctggtttactaacctgggttagatggagacctgagtctcttgattttttgttgtttctgttgaatccttgactgtttttgttgaacggtagtatcgatactaatgttgattttcttttgatggtttacagcaagaaccaaggaggttactctctcagagatggaactcaagctgttaacccttctccgacgtggtcaggccgactgggccactttcagcagagatcatattgatgcaactcttatcgtacctccagcagttcccgcaatcgtccttccagcagcacagcaagatccgatcgaagaggtcccgcggatggaaccgatccccgaggctgatctgcctataggtacgagttccgtttttttctttttttttttagacaatgtacgggttactgaggcagctgcgtaactcgagctgctaactaacacatatcgtgctttgtctgttcagttcctcctgactccagctccacttcagaactcccgctcatcagaagaatgaggcgtccaagtcttcgtgttcaacgagccaacgccggggctcctgctcgtggtgatgatctgtcgaccgcgatgactgcggctcgacagactctagctgtctccagcgcatctgcctcagcatctcatccctcaattcctgagatcaataccggggcctccgctgtagcaggtcgttataattgtgcacagtcctctccgaagagagcgtggacccagccggaggtgcatccggcgactgagttggtcgtgagtgactagggggtcgcctctcccagagaggagacgatagaatctgcggctgctataccggacgcagctgcgtccgcgaataggcggtcctcgggcaggtcccatggcgaagaacgaggctccagaggtgggggcaggtcttcaaaccggtctcagaaagtgaggcagacgtccaactctggtggaggtaccgcggaaagcaggcctttccactggtcttacactcacgaccgtgatcatctgatcgttaaggataaggctgggttggcgaacctgcttcgccacatcaaagggaggaactcctagattctcggagtgaagaacatggccgaggcggcggcttatgctgacatgatggcgaaggagggccaggtaataatcgataactgtctccttctaattctattcttatgctagttataatttctgttttgcctttggcaggcgatagctgcaatgaacaagctggttgctctctatgagcaacgtctgagcaaggttccctcggcgaacgagctcgaagaagggaagaccctcatccaggagctgacagcgagtgtgaaggctagtcaggagcgcgaggtttcgttccaggtatgcctcggttatgacttgtttgtatatattttatcgatgatacgatgattctgacctgattgtgatttcaggcggagatcgagaggttggaaatgaagctgtccacttcgaaagacctcgagaaaggttatgctgagaagatcgggctcatggagatggaggtcgggggattgcaagctgacaagcagacgtcgagaaaccagattcatcgcttggagcagaggagggaagagctctctaaaatagtgatggaccttacttcgactgcacaaggagcaaagaaggcggttcacgatgctaaggttgacctagctgttgcgtactcgaagttgctagctgggatcaaggagaagtggatcgccaagaaggagttcaccgtgctggaaggtcaagcagccgaggtggagtcgaacttggctttgatcgactaaatcgcgaaggctgctatcgatctgaccgtggagagaccttggtagcaagctgagctggatgacctggaggcgaggtgcgcatcaaaggaggtatcagacttcactctgagcaagctggatatcccacaagtgttggagatgtcggtggtacgtccaatggacgttgatgagcaaggaacgccgattggctttgatgagtttgggagcaacaaggatgcatttccaggatgtctcgctgaggatcccggtactgtctttgccgcgccggtcggggaaccgaaggagtga

SEQ ID NO: 165119 - DNA, 1441 bp, Arabidopsis thaliana landsberg
atgcggccgaaacgaacctgccactcggtttttgtactattattttgtggaagccatcaaacctagtaaatctactcctcttgtgctctggttcaacggaggtacctctagaaaatatatattccctatacaaactctctttattggtattacttatagattttttaaaatacaattagactcttctaacaagaacaaactttttataaaaatgtacaggaccggggtgctcatctgtaggatttggggcatttgaagagcttggtccattccgcgtacatagcgatggcaaaacgctttaccgcaatccttattcatggaacaacggtacgtttacctttttttaaaaaaatgataattagaaattttagtctacgttatttataagttgtaatgagatcaatgagaaatgcgattgcatgtggatttgcagaggcaacatgttgttcttcgaagggccataagtgtaggattctcgtactcgagtactccttttgattgggagatatttggggaacaagcggataagctaacagcagaggataactacatgttcttggtgaattggcttgaaaggtttccggaatataaaggacgagacgtttacatctccggtcagagttacgctggccactatattccccaactggcccagatcatccttcaccgtaacaaccaaaccttcatcaatctacgaggcatttcgatcggtaatccaggtctcgatttacttatcgaggctgataatgagaataaatttattttaagtcatggtttggtttcccaaaaagattttgaagagtacagtaaagtctgcgattttgccaactatgatatggacgaatgcccaaagataatgcctaaatttagtattgaacataacaaacacttggacgtttacaacatatacgctcctgtgtgtctaaactccacgttgagcaggatatccaagaaatgcaccacagttttggaggttgatccgtgcagtaaggactacttgaaggcttatcttaacagaaaaaaggttcaaaaagcgatacatgccaacaccaccaaattaccgtatgagtggacctcttgcaataacgaactgactgagaattggagcgaaaatgatagagacaccccgatgatacctatcctccacgagctgatgggcgagggtgtccgagtcatgatctacaatggagacgtggacctggagattccatttgcatctacattagccgtggtgaaggagatgaatctaacggttgtaaaggaatttcgtccctggtttacgggaggacagctgggagggttcacagaggattacaaagggaacttaacctttgtaactgtgaaaggagcaggtcatagtgttcctacggaccaacctatacatgctcttaatatctttaccagctttatccgtaacactccactccctcacacagcctga

SEQ ID NO: 165120 - DNA, 3891 bp, Arabidopsis thaliana landsberg
tcactctaccatgttccattcgggaatttgctttcagggattgtctgtgcgatctcggagcctctgttagcttgtgccactctctgtggcaagaaggttagagttcattcagtataaaccttgtgacctaactttgatcttgcggataggtcttctagaaaacccttcggcatgctaaaagacctaccagtcatgattaatggagtagaagtgcctacagacttcggggtgctggatatggaagtagagcataaggatcccttaatactgggaaaccattcttagcttcagtgggaacagtgatagatgtcagagaagggaaaataggtctcaatcttggaaagcacatcaagttgcactttaacataaacagaactccccaagggtcaaccgaagatggaagaacctctcgaaatgatagagcgatctcaggagaagcatataagactgaaagagtgaaagaacttaaaaagaggtctgataagcaagatgaaactatagagaagctagcccacactattgaggaacttaggagtaagctgaatcagatgcagaaggaagctcaacctaaaggcgggattaacactatcccgagaaaagaattcacttcaagatggtctcaggagacagattaccctccagaagagaaggaagcctattttgaagaaagggggattgagtattctgctgtagacctctccagggaggacgctgagtatgatgatggtattagagaggattatgctgaccctctctacagtttattttcttcttgataagtgtgaagagtcaagctagagacttaaaacaagctcacttgggaggaagtcccatgactatccttgtaaataatttttactttcttgttatttttgatttgttttggttgtgtttgtggttctcagaaaaaaaaaaaagaagtaacatgaaggtagagtaaaaattcaaaacttttactctactgatgatctagaaatcgagtacattggtcgagtttgagtgatgtttaaaacccaaaaacttttaaaccattactttactcgaccaacagaagctacaaagtcttccagggagtcttttaagtttgcagaggattgcgggatttcctagagtttttctagtgaacagagaatccagagaagagacaagaagacaacgagggacccgccgctgacgcccatgtcttccatgcaagagaccaagagacatggaatctcttcactcccactcgatctccacgcaaccccatcttcactcgatttctcctccatcactcgaccttgttttctcctccataaccaaataaactcgaccccatccttcttaaatcaacgctcccttttcttctttactcgacctcgtcatctcctcctcaccacctctcattcatttcgttcactcgaattcgtcattccccaacatcaacaacgtcactcgattccttatcatcatcttcttcatcgcctcatcgctcggccacaactctcttcacctctccatcatcaccgcttgccccctctctccaaaagaacaactcgacctctaccccaagaccatcactcgaccggtgcagctcaccttttcaccagagccaccatcgattactcttcttccgcgagctcaacatcactcgattacaagctcgagtacacacagcctctacaattcactcgaccgcaacgcttgcaccattttccacaccactcgactcgtttctcttcaccatctccgagctggttcttgttcaccaatcactcaatcatcctcactcgaccgcaagaagttttgccacttcaagttaaccaaagaaaacactcgacagcgagttcaccaaactggaaaaaagagaaaaagaaaacaaatttggtacactcgaccggtttactctgttggtttgtgtttttggttttgttggaactaacgtattaacgtttatttttgagttacatttgttttcaggttacatcatgagtaactacagtggaaaatcctctatggaccctgattacaatgtggataaagctgagtcctgcttcgctagaccgagagagcaacatgtttaccagagcttcagggatgaattcgaacgctctgcagcccgacgtaatcagagaaaagctgaaatcgccagaggaaagagggcgatttcaagtaaattttagctgattgatgaggatattgagactgtatatgagccatagtcatggcgcagggagacgaagctgctgaacaaacccgacgaggttacagtggaggagtatatcaaattcttcgagatgaatgacttctggggaacgaggtatccgtgttatgagactttagcccagctggagttactggaggacgtgcagcatctgttcgagaagtgtcatctggagacactcatgtcttacccttaccctgcctttaaggtggagacaatcgagtttctttccatgctgcaagtggagatgtatgagacactcacagactttgagctggataccatggggttaggcttcttgacgttctcagtgaatgaacaacggtatcagctttcgatcaagaagttagaagaactgtttcgtttccctagtggaaagggaaccaaacccagatttgacagagaggagcttaaggatttgtgggccactatagggaacaatctaccgctaaacttgggcgcggtccaagagcaaccaaatctggagtcctgtgatccgctactttcagagatcggttgccaacgtcttttactccagggagtctacaggcaccgtgtctaacacggtcatggagatgatagattatgcgcttacagggattctccgtcggacgaaaggaaagaatgtcttgagaggcgatctcaacaacgcaccaccagtaatgcatctgttgatccatctgtgtggatacaggaagtgggcgttgacgaacggaaagaagaaggtgagaggagcactatgcgtgggtggcgttgtgacgccaattctgcaagcttgtggagtaccgctcaaggaaccagggttagcaccgaggatgatggacttggatcatttgcgccgatgtgagttcttggagtttgacatggctggcgactttcaccgctacaggtttgagcattcatcgattagaatcgccaacattctcctcccctgcattgacgctattaggattctcgagggcaggaacattgacttcaaacctgcgcttgaagatctttattttgagggcagtccggcaactgaggagatcagtcacaccgaaggagctacaatagaagatgttgatgagacagatgatatagatgaggtggagtttgacacgagcatgtatcatttcagtgagcacatacctccagcgagggaaagcaagagtttgagcaaagctcacaggaacaacagcaagctgcataagtggttcaagaaacatgataagttactcgctaagtgcctcagggctatcaagtttctgaaggacaagatcagctgctcctcttccactacagttattccgtagggacagctccctcaggacattccttcgaggagatatgacgcgcccgagccaagtcagcgcaagcctgagcctagagagcaggagattccgcatgtccctgcgaggcattcatcattcgagcctcgtgaatttgggaggaagaggaggacaacactcactcgatctagcagcaggagcagacgacttctgcagtctcgtagtttacgcgaccgcggtgctggccgcagcagaaggagagaggtcgagtatcctcagagcggtgctggccgccagagagctgatgaggtcgagtacccacctgttggagctgatacagaacaaggcggctcgtctatggcctgggagcaatcacagacggccattgacgagcaactacgttcattcttcgactga

SEQ ID NO: 165121 - DNA, 6265 bp, Arabidopsis thaliana landsberg
catgtcattaacataatcgacgtcattactcatctgaaaccgcataacgtttcggttttatttcttttgccattctactgttcatcagcggaaaaaaactgtcgctttctttctctttctctctagatggaacgaactcgttaccctaactccttcgccgttttctcttttctcgtctgttccggccaaaattcttacgccggagtcgcatttctggtatcgtgaagtaacatccctgtcgcagtcgcatttgaactgaacttctctaagttccgttgagtatgttttcggtaagtaagaatccgacatttaagttcaatcccaagtgattcccgtcactgaaaacgttttccgatgcttaataatggtttttaacgatgcttaaagctggtttttaacgtcgtcgttgattgacatatggtggccgatttgttagatctatttgatttgatggctgaattactgtttgtttcccgactgatttatgatttatcaattcatctgtgtctgagtttgttatatgttgtgattgaattatagtttaaccttacatccgtggatgagtttgtgttatatgacggctgagtttgtttatgttatagctgagttgctgttatgttatggctgagtttggtttatgttttgactcagttgttgttatgttatggatgcgttttgtttatgttttggctgagtttctgttaagatggctgagttagatttatgttatggctgagttatgttatatgtggctgagatagatttatgttatgactgagttatgttatctatggctgagttaggtttgtgttttgcctgagttatggtatatgtggctgagtttgttttatgttatggctgagttattgtatgcttacggctgatttatggtttatcagatgtctgaagaccaagcaagggattaccctccaagactttacccagagggggattctaatctggaggttaaagccattaatcacaacataaagctcggagatttccctggaattaaagaatcaataggacaagatctatgggatgaactgaaagagacaccgcttggattaattgctaagcttgttgatagtcattttgtatggtctgataagactgtacattatctactatgcagacagttgagaatactgaagaaggagctttggtgtctcgtggctggtcaacccatccggtttggattgaacgaatttcatcatatcacgggtttaaacacagatcaactgcctacagaaaagatgagcctgaagctgactacaaagtgttcttcagggaattgcgtgtgccaaccggtgaaggtcctaatctagatgaacttaggcagggcttagtaatgtgcagagcttggcctcatgaaaagcgtagatggtttggcttattgactcttctatccattggactttttggcttgcatactatctctaggataccatttgagagtgccaaaagagttttcgatgacgaagccatgaagacttatccatggggtcgagcagcatttgaagcccttgtcgtttctataaagttgttgaggcctattagcaagacgtacaccatcagtggtctggttttcgtgttgcaggcttgggcgtatgattcaatcatcaccatcgccgagcgttttgggaacgttgttaaagcggatgagattccgttgcttagatggggtggcagccgtacccgtgcaattatagaatcggccattactgaagatatcaaagcgaatggtggtgaggtacggtttcggctctgttatgttctgttttttatcaaatatttatgttacggctgagttaatggtatattattctctgtgaaggctgagttatgttctattttttttggcaaatatgttatgtgacgaccgagttatgttctataatggctgagttatattaagtgacgactgagatatgttctgtgatgactgagttagcttaagtgacgactgagttatattaagtgatggctgagttaaacatactgatgggttttattatctctcgtgttgtagctgcgtgttcgtacaatggttgaaaaggctgagttaagcgagctatttcatttttggccagaccaattagaagacccagcactggataacttgatccaagacttacacggggttaagcttgttaaaggttattgggatgtgaagacgagtgagaagaagaagaaactcttaaaagataaaagcgcaggtgtctgaatctcccgctaagaagcagaaggtctctcacagtgagcatgttgattctcttgagaaagatgcagaaaagaagaagaagaagaagaagaataagaagaaggaagtagctgtcgaatctgatgaggacgaggatgttcgttctcgtgagcaggatggtcagggagaccagcagtcgctcgtggatgtggtgtccaacttgatctctcccttaaactctcgatttgacaccgttgatactagcataaaagaaatgtcctcccgtctggatgtgattggatgtcaaatcgaatcgagtgttgaagcaaagtttgaaggaaggtttggctcgattgagaacgatgtcaaacagattaaagggcagctgaaggccatagctgactcaaaatcaagcagttatattagagatatgtttttagccaaaccacagccccaaacgcaggaagacaatcctaaggcccaaactcaaaagacaccagacgttccaaagaaaattacaaataaccaatctactgctcctagtcctcctccggtaaacttttagttggttatgaccgagttaatatctgaatattattcggctgcgttataacttttagttagttatggctgagttatctgaattatacggctgagttatctgaatattttacggctgagttatataaatattttatgactgagttataaacgctggttagttatggctagttgttttcatgttataaatttagttagttagttatggctgagttatatgaatattacacgactgagttataaatttaattagtcatggctgagttatatgaatatgatacggctgagttgagttagttatggttgaggtatatgaatatgatacggctgagtttagttagttatggctgagttatatttatacataggtatgagttttcgttgtttaacgcctgagttttcgttacgtttatgcagtcgaaataagctgatgttggggtaagtaggaagcttgaaggagaattcgataaggtctccattgtgtctgattttgatttcgttgagactgtttctcctctcaatcgtcgtttacgctctaggaagccaccagccccaaatgtgccaaagcagaaaaaggagaaaacattaaatgagctaatctagaaaccgccagcgagaagaggaagaggaagaaagcctttgcagcagcctaaaaaggtgcctcctactgtgccaaagattacaataaagaaaccaaaaccatctgaggaagctaaggaaaaagctgaggaagctaaggaaaaagctgaggaagattcggatgtagttgatgtcacggataaggttatatccgagtataatgaaatgcttcctgagtctgatgaagatgaggaggaaacgagaggctaaagagtgtaaaagaaattcggctcaaactgttaagctggccccggatgggagctcattgattaaccccgaagctatgcccactcacatttttccagttattggagacaacgggctgagctgcatgagaaagggttgtctgccttcacgagcaatctatgatcctctggcaccggttgatccagccaaactgcagaagcttaaggcttatttgacaagtcccgaatggtatgaccctttatacattactaagttgttaaatacgacatgcttacactatttgtgtatattaactttttattatttgttagcaaaaaatcgttgacactggaatacacgaggttgatttctacggagttatcatgaccaaaagaaagttcgtggctagattcaaattatggatggttgggtgataaagtaagttattgttatattctgtctgagtttgtctactttatggctgagttatcgtgttgttcaggctgagttaaataaattatagctggtctattctggtgttcagactgagttgtagttggttatgtctgagttatggtattgttctgcctgagttaaagtagataatggctgatttatttaggtgttaaggctgagttttacttggttacggctgagttgatgatgtgttttgtctgggttggttttatttttgtacagcaaatggctgcgtatatgaaagtcctcgccttgaggcaccagcgagatccctgcccataccacaacaaacgcgtcatgattctagacccgtggttcacgatttattgggttcaagatcaaaccgaagaggttttctttcaaagacaccgcatatgaacaatggattaacggtacgggaggagaagtcccgacacggatgaagtggataacagatgtggatcacttgtatttgatccaccaaaccggaggtaatcattgggtgatccttcacgtgaacttgcttaggtctcacatcgattgctatgattgcatcgtcggagagcatacactagaaagcgagttaaaaatactgtaagcttgtaggccgttcacgaggatgattccgcagataatgagcgaactggttccttccacagtccgtaaaccgaactacgaccaattttaattccggcagaagaacaagaaactggtcccgcaaaacagagtagctggggacagcggcgttttcacgtgtaagattcttgaatgtttattgcttggtgtaaattttgatggcatttgtgatgcaaatatccaggctctacaggttaagatggcagcagagatctacgatgaggcaccagaaaggatgcttgcacagtttgaagagacgtgattgtccttttcgaacatatgtctgtgttttgggattttgagcatgtgattgtactaaatattgacgctttaggattgataaccagaattatgtccgtatgaatctattattatgttaattataacaaaaaccaatgtaatggctgacttatcatcgctcgattcgttttacggctgatatatgctaacgtgaaggctgacttgtcatcgctcaaatcgtgctacacggctgagttattgttgtttaattcgatgtttagctgagttattataacgcggtggctgacttgtcatcagacaaatcgtttgttggctgagtttgtataacgtggtggttgacttgtcaaacccaaacttccctcccatcaaataaaccagacgtgactttaggactatagatacaccggtttacaacacccgaatagtcaagtacccaaacgtcgttataggaccaaacgtcgttacgttagagtaccaaacgtcgctaacgttaaggctgacttatcatcgctcaaatcgtgctagacggctgagttattgttgtttaattcgatgtttagctgagttattataacgcggtggctgacttgtcatcagacaaatcgtttgttggctgagtttgtataacgtggtggttgacttgtcaaacccaaacttccctcccatcaaataaaccagacgtgactttaggactatagatacaccggtttacgacacccgaatagtcaagtatccaaacgtcgttataggaccaaacgtcgttacgttagaggaccaaacgtcgttaggttagaggacccaacgtcgttagaggactatatatacactggtttcctcttgtcttttcacttgtcaattcttagcaactacaactcttcattcttctcttgtcctttctctgagaaagaaaaccattccgagatcatggatgcatccggttcaggttcaggttcaaacaagcggcagtgtgtggatgacggtcccaacaaggggccgtctgtggatgacagccccaccctaaagctgtatgaacaggagaagcgtttcaaatgcgtcatctcttacatcaggagcaacataagggagacggaggaagcacacttgctcgatatcaaactgcatgagaaggaagcggaacttaaggtcttaaggaaagtggagaaattgggggacggatttaacgtgaaatacgagatcgagaaagtgctggcgcaggttggcaaggcctacagagcgcagcgtgaacgcccggtgagtagtattgactgggacaaactggggtatggatcgaccgaccgtccaaattcggagtctgattaagaa

SEQ ID NO: 165122 - DNA, 4059 bp, Arabidopsis thaliana landsberg
ttcgtctgacgcagagttagcatacttgaagctcattcaacatttggcactatataagggatacaaaggttagaatctgttgctcaaggtcatgcgcaccttgttatacaagtcacaaattaacctatacaaagtaccttgatgatccttcgcaataaaaagttatagctgaatattatgtttctgtagaatgaataagaaggccatgtcagtgtacaaaagtcagaactttcttctattttttctgatcatgttcatatgttgctgcttctactgcatgcagggtatttatttagatcttgctccatgttttttcttttcctatgttgacctattttctgaaccaatgtttttctagatgcctttgctgctcttaaagtcgcagaggaaaagttcttaaccgtatcgaaatcaaaagtattgttgctcaagttgcaactactacatgagcgtgccttgcattggtaaggttccctacctcctatgttgaacatgcactcaagttgcaaccaacaaagttgatccattatctgctctctgtgatcacttactatattgtttaagggttatataaattcaaaacagaggcttcctattgttctggaattgttatatcttaagttggctgttctaactttgttaaatccattagtgggaatttaaaactagctcaacgaatatgtaatgagctaggaggcttggcatcaacagccatgggtgtagacatggagctaaaagtagaagcaagtcttcgtgaagctcggactttgcttgcagcaaaacagtatagccaggtttgtaaaaaagtcttattggccatctgttttttaagcccatgtgatatatttatttcaggccatgtgctatggcaatgttagtgtgtcttcattttgctttggtactacgttctctacaggcagcaaatgtggcacactccctcttctgcacatgtcacaaattcaatttgcaaatcgaaaaggcgtctgttcttcttctgctcgcagagatccataaggtaagacatggctacaagaaattactagcttgagagcacattgattggaatctgatattccattgaaaatatgttccgccttatcaaattgcaatcaaaacttttttttttttctggaaatttgttccgttccatgcatacatagctaacatccatctatatgttctgaatgtgctctttctttgctgattgctcttagactacatagaaaagtgttgtactatggtattatttctaatcttttattggttttctgaccggcggccttcacctttcgctttcccctttttgggttctcagaagtcaggaaatgctgtcctgggtcttccatatgcgctggcaagcatctcgttttgccagtcattcaacttggatcttctcaaagcatcagctactctcactctggccgagctttggcttggtcttggatcaaatcataccaaacgagcattagaccttttgcatggggctttccctatgattcttggccatggaggtttggagttgcgtgctcgagcttacatctttgaagcaaactgctatctatctgatccaagttcttcaggtagcttttgtgtcttgtactgctttgacgaggatgttcagaacataattgaatagagcctgactgttatggataaaggttgatcttgttagttgcgagtttctaatttgtttactgttgttaccagtttccacagattctgacactgtcttggattctctaaggcaagcttcagatgagcttcaagctttggaggtataacttatgtcaataagagtgctatatagctttttgttcaaaaacaaacctgagcactatattatcgccacatcattgcataagagatgaacaaacaaacctgagcactatataatcgccacaacattgcataagagatgctatgttgcttttgattcgaaaataacaccaaactcttataactaggttcagcttcgtttagctcatcataactctcctagtaccgtgatttactgttggttcacttagtagttgtgtttattgtgcagtaccatgaactggcagcggaagcctcgtacttaatggcgatggtatatgacaagctgggacggcttgatgagagggaagaagctgcgtctttgtttaagaaacatatcatagctctcgagaaccctcaagatgtggaacaaaacatggcatgagatgttgtgaaccttatttaataagcttattgtgcaaagcttgtaacttaaagttgtaatcatggtccttaccagtactcgttctagtgtccgaatcttgtcgagattgtgtaacttgtaaccttgtataactctaaaatgtaggagactgaggaagtcatcaagataattgagaagatttcacaattgacatttgacatagtctctttctttgtgaaacaagattgtgaatacaatcatgattgatattagtttccattacttgttatcgatcgagcaacattatcaagtcgtttagtgtcacgataaagacaattgagcatgtgaaacaacagacaaagataattactctactaatgacaatcaaggaaacccatttgccaaaaacgtcgtcgttttggaatgaaacagcagctcaaaccccaaaaccgtgttgggacggtaaacagaccccgccctgctcgccggagcactactcggcgacttcagatcttctttcagggttcttccaggaattagattgtcaacgaatccaatcttctgaaacaaaaatcttcggatgcgaagatcgattgtgattgtgattgcgttaacggcgaaggggtttcttcatcggcatcttctggagaaaggtaatcttgtaactgctctctcattacgcatttgcaattcccgagctttttctggtaggagtgattaccgagagagattgagaagtgggcttcactctattaagtttaacgatgcacttactttgttctgtgacatggctgagtctcatcccctcccttccattgttgatttcagtagattactgattgccattgctaagctgaataagtatgaagctgtgatctctctctttcggcatttggagatgttgggaatttcacatgatctctatagcttcactactttaatagattgtttctgccgatgcgctcgactctctcttgctctgtcatgtctaggaaagatgatgaagcttggttttgagcccagcatagttacctttggatctctggtcaatggattctgtcacgtaaatagattttatgaagccatgtctctggttgatcaaatcgtgggattgggatatgaacctaatgttgtaatctacaacactatcattgatagtctctgcgaaaagggacaagtgaatactgcgctggatgttttgaaacatatggagaaaatgggaattagaccggatgtagttacctacaactctctcattactcgcctttttcattctggtacatggggcgtctctgctcgaatactgagtgatatgatgaggatgggaatcagcccggatgtaatcactttcaatgctatgatcgatgcgtttgtgaaagaaggaaagtttttggatgctgaagaattgtacaatgagatgattcgtatgtctatagctcctaatattttcacctatacttcattgatcaatgggttttgcatggaaggttgtgtagatgaggccagacaaatgttttatttgatggaaaccaagggttgttttccagatgtagtggcttatacttctctcataaacgggttttgcaagtgtaagaaggtagatgatgcgatgaaaatcttctacgagatgtcccaaaaaggattgactgggaacactatcacttacactactcttatccaaggttttggtcaagtgggcaaacctaatgtcgcccaagaagtttttagtcatatggtttctcgtggcgtgcctcccaatattaggacctataatgttttgttacattgtctatgttataacgggaaggtaaagaaagcgttgatgatatttgaggatatgcaaaagagagaaatggatggtgtggctcccaatattggac

SEQ ID NO: 165123 - DNA, 2866 bp, Arabidopsis thaliana landsberg
cactctacatgttcattggggatttgctttcagcgaatgtctgtgcgatctcggagcctctgttagcttgatgccactctctgtagcaagaaggttagagttcattcaatataaaccttgtgacctgactttgatccttgcggataggtcttctagaaaaccgttcggcatgctgaaagacctaccagtcatgattaatggcgtagaagtgcctacagacttcgtggtgctggatatggaagtagagcataaggaccccttaatactgggaagaccctttttagcgtcagtgggagttgtgatagatgtcagggaagggaaaataagtctcaaccttggaaagcatatcaagttgcagtttggcatcaacaaaactccacaagggtcaaccgaagatggaaaaacctctggaaacgatagaccgatctcaggagaaggatatgagactgaaagagtgaaagaacttagaaagagatctgataagcaagatgaaactatagagaagctagcccacaccattgaggaacttaggagtaagctgaatcagatgcagaaggaagctcaacctaaaggcgggattaacactatcgcgagaaaagaattcacttcaagatggtctcaagatgcagattaccctccagaaagagaaggaagcctattttgaagaaaggggaattgagtattctgctgcagacctctccagggaggacgctgagtatgatgatggtatcggagaggattatgctgaccctctctacagttcattttcttcttgataagtgtgaggagtcaagctagagacttaaaacaagctcacttgggaggaagttccatgactatccttgtaaataatttttactttcttgttatttttgatttgttttggttgtgtttgtggttctcaggaagaaaggagtaaagtgaaggtagagttaaaattcaaaacttttactctactgatgtcctagagatcgagtatattggtcgtgtttgagtgatgtttaaaaacgtaaaaaattttaaatcatcattttactcgaccaacagaagctacggaatgttacaaagagttcatcaagtttacagaagattgcaggatttcctgaagatttttctagtgaacagagaatcagagaagagctgaaatcgccagaggaaagagggtgatgtcaagtagatatgagctgattgatgaggatatcgagactgagtatgagccagagtcatggcgcagggagacgaagctgctgaacaaacccgacgaggttaaagtgaaggagtatatcaggttctttgagatgaatgacttctggagaacgaggtatccgtgttatgagactttagcccagctggggttactggaggacgtacagcatctgttcgagaagtgtcatctggagacactcatgtcttacccttaccctgcctataagggggagacaatcgagtttctttccacgctgcaagtggagatgtatgaggcactcacaaactttgagctggataccatggggttaggcttcttgacgttctcagtgaatgaacagcgatatcagctatcgatcaagaagttggaagaactatttggtttccctagttgaaagggaacaaaacccagatttggcagagaagagcttaaggatttatgggccactatagggaacaatctaccgctaaactcggcgcggtccaagagcaaccaaatctggagtcctgtgatccgctacttttagagatcggttgccaacgtcttttactccagggagtctacaggcaccgtgtctaacacggacatggagatgatagattatgcgcttacagggattctccgccggacgaagggaaagaatgtcttgagcggcgatctcaacaacgcaccaccagtaatgcctctgttgatccatctgtgtggatacaggaagtgggcgttgacgaacggaaagaagaaggtgagaggagcactatgcgtgggtggcgttgtgacgccaattctgcaagcctgtggagtaccgctcaaggaaccagggttagcaccgaggatgatggacttggatcatttgcgccgatgtgagtttttggagtttgacatggctggcgactttcaccgctacaggttcgagcattcatcgattaaaatcgccaacattcttctcccctgcattgacgctactaggattctcgagggcaggaacattgacttcaagcctgcgcttgaagaactttatttcgagggttgtccgccaactgaggagatcagtcataccgaaggagctacaacagaagatattgatgagacgaatgatatagatgaggcggagtttgacacgagcatgtatcatttcagtgagcatatacctcctgcgagggaaagcaggagtttaagcgaagctcacaggaacaacagcaagctgcagaagtggtgcatgaaacaggacaagttactcgccaagtgcctcagggctatcaagtttatgaagaacaagctcagctgctcctcttccactacagctattccgcagggacacctccctgacgacatgccttcgaggagatatgacgcgcccgagccaagtcggcgcaggcctgagccttgagagcaggagattccgcatgtccctacgaggcattcatcattcgagcctcgtgaatcagggaggaagaggaggaccacacccactcgatctagtgtaggagcggacgacttctgaagtctcgtagttaacgcgaccgcggtgctggccgcagcagaaggagagaggtcgagtttcctcagagcggtgctggccgccatagagttgatgaggtcgagtacccccctgctagagctgatacagaacaaggtggttcgtctatggcctgggagcaa

SEQ ID NO: 165124 - DNA, 558 bp, Arabidopsis thaliana landsberg
  unsure (1)..(558): unsure at all n locations
agctaaaaggggtagatnttgtagtcttccgggtgaattctcttatggggatcatntgcgtgccggtgcgattgcaaaactttctccgattatgggtgaaatgatgaatcatgcggacaaaggaggttatgtaatgggaatttgcaacggattccagattttgacagaaagcgggttgttacaaggcgctttattgcataacaacaaccaaaagtttatctgtaagaatgtgtacctgaaaccggctacnnnnnnnnnnnnnnnnnnnnnnnnnnnnnnnnnnnccaaagcatataaaattccgattgcacatggggaaggacgattttacgccccggaagatacaatgaaatcgattttagataatgaccaggtattgtttcactatgtgaatgaggaagcacaaattaccgagacaagtaacccgaatggttcattacaccacattgcgggaatgtgtaacccggcaagaaatgtcttcggtatgatgcctcaccccgaaagagcagcagatccagcccggcaaatgaggatgaaaacgtaaaatcgaaacaatct

SEQ ID NO: 165125 - DNA, 644 bp, Arabidopsis thaliana landsberg
gattcctatctctacctagtgcaccagaggagtatgtgactaaagaggaccctcctaaagccaatattattgatggaccacaaacgaaatctacatcaaagcgcaagagatgtcctcttttgctcccaccaacagaagaaaaaactaagatagcaacacgcaaggccaactgtcgttttgatgcaggagcatcttcttctgggacgagagagccaacaccggagtggctggtgcggttgatgagggtaaagtacggagaaaatcctataaatgtcataaataaagaactgactgcaaccaatgtcaaaccacatcaccgtcgtctctccatgcctttcagccagatcatagattttgaattcttgaaccccgacgaaaaaaggatcatagaagaacatgccaataaggaacgtgaagaaggagtagacgtgatactcgtaaattttgatcgaagggaatatatgttgaatttgaggagatggaacatggggacctctcctctatacattttggtttcagggcggtataatgtggtcaaaggatgccgtctaaaggaaggcaatgagattcgcatctggtctttccactttgatgaccagctctatctcgctatggttcctcttacgccaactgagtccggttaa

SEQ ID NO: 165126 - DNA, 436 bp, Arabidopsis thaliana landsberg
agggccagccgcggagcggcgtgcgcaatcatcaggccgccaacaacatgaaggttatgaagaagggcgatctcggcttcttctatgactcgggcggcgagaaacgcattgtcggcgtcgtcgaagtcatcggcgaataccgccccgatccgaccgacgaggaaggccgcttcggtcttgtcgacgtgaaggcggtcgcggagatggagaagcccgtgaccctggcggcgatcaaagccgacccgaaactgaaagagatggtgctggtgaagaattcgcgcctctcggtgcagccggtcacggccgaggaatggaagcgcatctcgaagctgggcgggctcaagtgatcttcctctgccggatagaggagcttgccgacccgggcacgaagaacgtggtgctgggcgaaggcgaggacgagctcgatatcgcgatc

SEQ ID NO: 165127 - DNA, 497 bp, Arabidopsis thaliana landsberg
  unsure (1)..(497): unsure at all n locations
ttaattattagggtaagactataagaccataaaatttcatcagttaagtagaaaagacagacctgcaaattctctatctttgaaacttggcaattggcatcacttaaaccctcatggacctgaagttgattggcatgaagcagtttggttttaagggaaagaatcccaagtacgtatttgttgcctaggtatactagataaagacttcatatgtatgcctccattgtctcatgacggatcagctcagcatttaatctttgatttctcagtcgcatgaggtttgatctttctttacatcttaagcccgtcgttctccaccactattttttgaagatgggattaaatggatcaaagacccgtactgtctcaacaaggtatgtaccacttgtaattcatttggcttttcaagcttccttttgctccatatggaaaggaaaaaaactgttaacttcactctaaaaaccttgtagtcctgctagagcggngctaatctttaa

SEQ ID NO: 165128 - DNA, 1596 bp, Arabidopsis thaliana landsberg
cttatgtgagcattcataacttcaggtttcgtagaagcacttctctaactccaaaatgtaacagagcaaagacgatattagatgatatacacatgagaatacgagtactcatcatcactaatgccccaaatctctaaaagctacaaaaacaaccctaaaaccaaaatctccccaaaatcctcttctagtgtaaattcaaacataaaaaccacaaatttacatgaatctcaaccaaattcatcaaaagaaacatcaaggcaagtataaattacacagattaagagaccagtttaactctagtgcccgattttcaataactctttaatttttcttaaagatgacaaagttgagaaggagagagatgaaaccttgagacaaaggaaaacgatgttgttggttgctgaaaagagacaaagcgcgtctccaagcaagtaacctagcggccattgacaacctgagggagaggaggaactcgacgcttctattttccgtgaaattttggaatcggagcacaataaaagaagcctttttaatcattagagttagttttcgttatggtcaagtcaaaatctaaacccaggttcgaaccactgagtgagccacaagtagaccgacctttttcttcttttttttacgtgaggaaaaagaaatttgtgaattgaaatcttatctagaaaagaaaaaagaaaaaaaaaaatcagaacaagcaggagaataatgtgtgtgatacaggatattgagtaaggccacgtggacggctgtgattagaagatcaatggacggttgtgattcaaatcaagtgtgcgtagagctgaagctaataaatatcaagtgtcatcgtcattttcatgttatcgttgaagttgttgatattcctttctctctgaaaacattccgagattcatcctctgcatagaacgtcgattcttgcgaggtgaatccagaaatcccttgttttatgaacattggatttcatttgttatttacatcgtaataataagtaatcggagttgttgatgattgttttggttgattgattgtgttgtggtgtggttttactgtattaaaggtatcagagcaaagacgtttctcggagatggtgatcgagactcgagctcaggagttagctcaagctcgtcgagagaaggcgttagaagcagaggaatcgatggagtcacagatggagaagatcgagagcaagatcgatgctcaaaatctgaagatcgagcgccatatctcggagatgtttgaggcgatccacatgctgtttccatctaagcagtcaaatctgggtgagactcatcaaacagctcgtgcttcatccgcttcagcaacagacgtggattacatgagaaggcaaggtcacgctaacaatcattcgggagtaacaaggttagggaagttggattttcccagattcagtggtgagaaggttaaggaatggttgtttaaggttgattaattttttgcggtggatcctatacctgaagagatgcgagtgtctgtagtttctattcatttggatagtctggctgctacttggcaccagaatatgattgaggatgaagtgcaggttcctgagtggggtgtgtcaaa

SEQ ID NO: 165129 - DNA, 2299 bp, Arabidopsis thaliana landsberg
tctccaaattgaccttaaatcgggtaccatcagatacgaatgaaggctgcagatgtggagaagacagctttccgtactcatgagggtcattacgagttcttggttatgccgtttggtttgaccaatgcaccggccacctttcaatcagtaatgaatgagttgtttcgaacctacctgcgtcaatttgttctagtgttctttgacgacattctggtttatagctcagacgaagagacccaccttaaacatctagaagcagttctccaaattctacttcagaataagttctatgccaatgaaaagaaatgtcactttggaagcaccagaatctcttacttgggtcacatgataacagggaaaggtgtgtctgcggatccagctaaaattgaagctatggtgaactggcctcaaccaaagaacataactgagctgagggggttcctgggacacactggctactacagaaggtttgtagcaggctatgggaagatagccaaacccttaacagaattgcttaaaaagggtaagtttgaatggtctgaagcagctaataaagcttatgagacacttaaaggagcagttatccagttgccaaccctagcattgccagactttgcaaagccttttgtgattgaaacggatgcttcagggacgggaatcggggttgtgctatcacaagataaacgtcccataggcttttattagccaggggttctctagtaagggcagaattaagtcagtttacgagagagagctgttggccattgtctttgcagtggacaagtggaaacactatctagcaggcaagaaggtgattataaggacagatcagaggagtctcaaacatctgcttaaccagaaagctgtgtcagctatacagcagagatgggcatccaaacttgtcagtttggattatgaaattgagtacaaaccaggcgcagaaaatcgtgtagcagacgctttgtcccgacgtccagtcacagagcaggtgatgaacatgttgttgctggctccagctactctgcacaagattgaattacaagatcaagtacaaggcgaccctagcctcaacctcatcagagaaaagcttttaagtggacaagagtctgaaaaaggatacagtttggtggttggcaccttacataaagatggtaggatagtgattccaacaaattctccttttattccaaagttgttggaaaggttccacactagtcccagtgggggtcatgaaggggtgctcaagacactcaagagattggcgagtgaagtttattggaagggaatgaggagagacgtggtagagttcctcaaaggctgtcaagtgtgtcaacaaaataagtactcaaccttgtcaccagtgggtcttctcacaccgctacccattcctactaaggtatggtcgaacattagccttgattttattgatgggttaccaaagtctgaaggctatgatgtggtgttagtagtggtagataggcttagtaattatggtcactttgtaccgttgaagcatccttacacagccaagtctgtagcagatattatacttcatgaaatagtcagacttcatgggtttcctgagagtatggtctcagatagggataaaatctttatcagcaatttctggtcttctctgttcaaatcacacggaacatccctggataagagtacatcatatcaccctcagacagatggccatacaaaagttctgaatcgttgcttagagacgtatattcgttgctttgttaatgggaaaccaaagacttgggctaagtggctaatgtgggctgaatactggtataacacatcgttccactctgcgattaagatgactccatttcaggctctgtatgggagagaacctcccaaactcttgcgattcggtgatgtacccactgctaacgccggcgttgaagagttgctgcaagaaagagacggactggtcactatgctgagagagaatctacaagcagcccaagctcgaatgcagaagtcagctaacaagcatagaagagaattggaattctcagtgggaacttgggtctatttaaaactcaggccgtatagacagctttctgtagctcaacgacgtaatgagaagctatcgccaaggttctttggtccgtataagattctggaacgcataggagcaatggcatataagctgcagctaccaactgaaagttctattcatcatgtgttccacatatcccaactgaaacaggcgcttccaggttcagcacaagctcaaccccttctagcgattatgacttctaacttggagtgggcaacagaa

SEQ ID NO: 165130 - DNA, 959 bp, Arabidopsis thaliana landsberg
cttcatgcacgttgttgaatccggaggaaaaagataaactttacaaaacgcaagattttggtgttgaatttttatagagtgtttgcagggcaactcatggaagttggctccttatgggagatcgatggtgtgatctctatattgtgaatctctttacccatgattggatcagtctacctcctgcggatttattgtggaaagattatgcgttacgccatgcaagtcagaggacaattagcacctaccgtgttaggtataaaccgtacgttggtaggaatatacgagaccctgtgttttggattgacgagaaaaccaaagattatgtagttctttggggacttatggattggtgtgtattttattgcaagaaacgagatacatgttggaatcaaatccccaaaacttcagatgtttccacatggtttacaaggatcacaagctttacttcctaaacaaaactggtagtttcaaaatctttgatttttgtggagatattccacaacaaacctttgagtggagtgttaaagttgaaagatctcagtttggacctcctccaccaagtaatccatggaaagttcttgccacaaaacttgtagtcaccgtaacaggaaaagtcctcaaggttgaagaaatggggggagcgaggcctagaacctggtccttccgggttttcgaggttttattcatcagaattcctcaagaaaaaagagcggcttattaattctctgggagatgagtcgatgcttttggatcaaggcatcactgtgctagccaatgacactggtggattcattagaaataccatctatttcagtgctagtcatgggaataacacacatgatatctatatcttcaatctcgagacacaaaagacggagccgctgcacacacttgatagttattcttcatcagttcaattctatggagctcaatggttcgtacctagtttcatgcactaa

SEQ ID NO: 165131 - DNA, 968 bp, Arabidopsis thaliana landsberg
ctcgatctctcttaaaccgtaccgagaagtgtctctatctatgcttacgcttccctttcgacaataacacatactggttcactctctaccaaaaccctaatcaaaccgtaagcgacaaggtttttctccaaattccatctccccagtatcctcttacgctatcgtcgaatctcgtcgccgttggttctaatatctacagaatcggtggaaccgttggtgatgattcctgccctctcggcttcgatagggaaccttcttcgaaagtctctatcctggattgtcggtctcacacgtggcgtgatggtccgaggatgcgattgaacaggagatcctccacaacaagcgtagttgatgggaagatatatgtaacaggaggcactgaagacacggataatccctcacactggatcgaagtgtttgatccaaaaatacaaagttggggaactgtgacgaaccctcacatcgtcaaggtttgggaggaggtatgctatagacgtgcagtcaaaagcataggacatgacggaaaattatacctgtctggggataagtatgtggtttacgacccagatgaaggtaaatggaactcagtagaagagcattggcttataggttatgcaataggctcgagtaattgcgtggtcgacaacatcttgttctactgggatcaaggagtgttcaaatggtatgacagtaaggtaagttcatggaagcaattgaaaggccttgaagggttacctgatgattttagccagcgtgagtattgtaagttggtggatcttggtgggaagatggcggtgttgtgggataaatgggagtattctggggtctgcatgattttctgtgctgagatttcacttgaaaagcgcgatggagatgagatttgggggaaggttgagtggtttgatactgtacttgaagttggagcgtcttgtagcttgaaaagtgcggatgctctttcagcttctgtt

SEQ ID NO: 165132 - DNA, 1924 bp, Arabidopsis thaliana landsberg
cgacttaatattgggagattcttttggaaataatatcttctatcaaggggttccaggaattaacatcagcggatctgctggtgtataaatcagaggtacgaactgatggttgtcctcatcgcaatcatttttcacagtctcagtgtcccaagagttttttcaaaggtttctactcagctttattgagtgttttcaggttactcgttctcttgggtttgtatttgttcggatcttgtttgggttaggaagagggatgtcgcaaagcggtttggttaatcaaggcagcaacgtgagtaacaccatgaagcttaagatcaaggttcctcgttttgataacagttccttgatcgagggctattccaagactcttatcggcagatgtatgaatccagcaatgcaagacatgaagtcgttgctgttcatgttgcctaagatttggaaattagaggatagagttgttggtgctaacttgggtcaaggtcgttttcaattcgattttgaacacgaagaggatatctaggagatcatggaagtggaaccatttcattgatcattggatgttgtctttggttaggtgggaacaagtggtggaccggagatacccttttcttattactttatggattcgggtattgggggtgcctctacatttctaggcagatgaaacttttcggtgtatcggttccgatataggtgaggttcaagcggtggacctggactttagaagggtccaagttaaacttgatggttttaaaccattgtgttttgaggcggctgtagagtttcatagtggcgaagagacaatggtctcgctgtggtatgagagactttttggcttctgtcaaagatgttatagtctctgtcatgagcagatgcgttgtccgatctttggagacaaggggaagcagagtattttcaaagaggatccaaagagggataatacgcttcaaagatacaaaggtgctgccattaatggttcagttcctggaacttcctcgggttcgactagggctgtctttgctgaaccttctcaaggactgagttcaattgataagaaggatgcatctattcaggacagctctaaccgatccaagcagatctatggtattaaggctaaaaaggggagaaggaatctatttgtggctctgtccaagcttcatcatctcaaatggctgttttggtaaataagtaatcccagctacaacaagatactgtggggatgggttttccggatcatgagaagaagatgctggagacttttcttgctcctgaagcggggaagacggtgacagatttgggtactctaggtgctaatatggaaggtattcttagtggcacgatgccaagtagggtggaccgtaagaaatttttgtcgggtccagaagaagtgtctattcaaagcaaggcagagaatgctctcgggttggctgagcaacatgatgtattgtctgatgacataagtcagtagcttgttcaaagttctcatcttgaaggagacccttctttgcaatttatggataccacaatggaggataaagaaagtagtggtgaggagctaacccatgaggagggagagtttttcgttgcaaatgaagaggattttgatgggggcaaaaatgaggtggttttgctaccaatcaactcggtctctgagatgaatgtaaatatggtttctgtttcggagaatgtcccaaatgagcaagcacatgaggaggaaatggagggagaatgtcaggcagaagatgagttgcacccggacccacttgcaaaaaggaaaacgggtaaaaataaaagatttttgacagtagttagctctaggaagaggaattatctgacatcacctcgcaaaagaccagttccaaaaactggtggcccaacggtgggtgctggttctcatcaaagagagaaacctcctattaaacat

SEQ ID NO: 165133 - DNA, 1545 bp, Arabidopsis thaliana landsberg
gttggcatacgttggattacaaatgatgttcagcacatgtaccggagttgtcacctggacactctgatggcttacccaaatgtggcctacgaggaataaacgattcagttcctctccacactgcaagttgagctttaccaaggtatgacctctgatgatttggaaagtgatggattaggattcctgagattctatgtgtatggtcaggattgcatgatgtcaatcaagcgtttggaaggattgtttggtttccctaatggaatgggaactaagcccaagtttgacagagaaaagttaaaggaattatggatcaccattggcagctctgtaccgctgaattcttctagatccaaaagcgaccagatacacagtcctatcatcaggtacttcctacgttctatagtcaatgtattctactctcgagagatcacagggactgttgctaactctgatatggagatgatcgcaatggctctcaagggaactctgcgccaaactaagaatggcatgtctctccaaggtgaaatcaatgacacacctctctcgatacttcttctgatccatctgtgtggatataagagctgggctgtccgcaataaccacaagagagcacgaggcgctctgtgcataggtggtgttgtgacaccgattctgatcgcttgtggagtctcaatcacttttgatggactcgagccgcgagcaatggatatcgagcacctacgtcactatgaattcctggagtttgcaatggttgacgacttgcacaggttcaggtttgagcactctacagataagagagctagcatccttctccctagccctgaggttacacggataatagagggagataacattgattttcggcctgaggttggacgcctctactatgagaacgctcctccattggatgaagatgatcttctagaagaggctgctgaggatgggatggatgaagacagagcagtggagttcgacactagcatgtatcactttggtgaacatgtgcctccagcgagggagagcaagagcttgagtgaagctcataggaacaacagtaagctgcaaaagtggtgcaagaagcaagacaagttgctcgccaagtgttttaagactatcaagtttctgacagataagctgagctgttcctcttctactacagctattccgcagggacagcctcctctagagatgccatcgaggagatttgatgagcctgagtacaggcctgagcttagtgagcaaagagtctcatatgtcccggctaggcagtcctcattcgagtcctgggagcacaagagaagaaggaaggttacactcactcgatctagcaggagatcatgcctaattcgctcgaggagatcactcgaccgcggtgttggccgcagtagaagaagagaggtcgagtatcctccgagcggtgctggccgccatagagctgatgaggtcgagtacccacctgctgtacctgccccagaacagggcgtctcgtctatggcctaaaagcaataacaggcagccaatgacgaccaacttcgttcattcgtc

SEQ ID NO: 165134 - DNA, 299 bp, Arabidopsis thaliana landsberg
cgccccccccctttaggtggccagtcttggtacggttgtttgggaactcctgcctgccggaggaaccactagacctagagcgggcgtcaccgtgctggagctccaattctccctctctcgtggcgctgtacaactaactgtccgaccctgtacaacattccgactggtgaaaccccgttgctacccccctaaatagccttgtagcacattcctctttctgcaggtggcttactaccgactaggcccccaccgatcggccttgccaacagatgcgcactcctggtggagcacgggacgcg

SEQ ID NO: 165135 - DNA, 214 bp, Arabidopsis thaliana landsberg
ttggtggctccaatatatggagggattgttaaagtttcgtggggcgagaagaaagtggcatgcaccgtgacagaattgcaaccatgcctaccatcggtgatagacggaagccaaccatcaactcaatgttgcgaaaaattgaaagaacaaaattcatgtttttgtgattacttgcaaaacccacaatttagtcaatatattacagctgctaaac

SEQ ID NO: 165136 - DNA, 1315 bp, Arabidopsis thaliana landsberg
acccgcaacacgaccaccatgctctccttcttaattattcttcctttaaccgtttccgtgctggttcagctaaccggtctaacgttcgatacgttctctgagctttggtctaaccaggcggttcaactcgacacggcgacgagacttacctgcttggttttcctctccttcgttttgaccctctacgtggctaaccggtctaaaccggtttacctagtggatttctcctgctacaaaccggaagacgagcgtaaaatatcagtagattcgttcttgacgatgactgaggaaaatggatcattcaccgatgacacggttcagttccagcaaagaatctcgaaccgggccggtttgggagacgagacgtatctgccacgtggcataacttcaacgcccccgaagctaaatatgtcagaggcacgtgccgaagctgaagccgttatgtttggagccttagattccctcttcgagaaaaccggaattaaaccggccgaagtcggaatcttgatagtaaactgcagcttattcaatccgacgccgtctctatcagcgatgatcgtgaaccattacaagatgagagaagacatcaaaagttacaacctcggaggaatgggttgctccgccggattaatctcaatcgatctcgctaacaatctcctcaaagcaaaccctaattcttacgctgtcgtggtaagcacggaaaacataaccctaaactggtacttaggcaacgaccgatcaatgcttctatctaactgtatcttccgtatgggcggagccgcggtacttctctcgaaccgctcctctgatcgcagccgttcaaaatatcagctcatccataccgtccgtacccacaaaggagctgatgacaacgcattcggctgcgtttaccaacgagaagacaacaacgcagaagaaaccggtaaaatcggagtctcgctctctaaaaaccttatggcaatagccggagaagctctcaagacaaacatcacaactctcggaccactagtcctaccaatgtccgaacaacttctctttttcgcgactctcgtggcccgaaaagtcttcaaagtgaaaaagataaagccatacattcctgatttcaagctagctttcgagcatttctgcatccacgcgggaggtagagccgtgcttgacgagattgagaagaacttggatttatccgaatggcacatggagccatcgaggatgacgttgaaccggtttggtaacacttcgagtagctcactttggtatgagcttgcgtatagtgaagctaaaggaaggattaagagaggagataggacttggcaga

SEQ ID NO: 165137 - DNA, 1776 bp, Arabidopsis thaliana landsberg
cccaccaccagttgttatagacatttccgagacgcatcaccacaagctcactcatatcaagaagtggaccgagttctactgtattgctaaatgtggtaagaagttttatgagtttccttacaaatgtctagaatgtcatttaatgttcgatatggattgcgtatggaacccaccggaggcaaaaaaccaatcagaggtaaacatttcttcccaccccttacaccctcttaagctacacacaagtcaaccaccagactattctgatgaaaaatgtcgtctttgcacaagaaagattgagggattgttttatcattgttcttcttgcaacttcagcttagatatgcgttgtgttataaatccaccaccacaatttgttatggatttgaaagttcatgatcacgaactcacccttctcccaagactcgactcttttacatgtaatgcttgcgggctgaagggagatcgaagcccttacatatgtgttcaatgtggtttcatgatccatcaagattgtattggccttccacgcctcataaacatcaatgggcatgatcaccgtgttgctcgcacttctgttcttggtgtcgtgaactctgtctgtggagtatgtcgtcaaaaggtggactggacttgtgggggtttttcttgtcataggtgccccgactatgtcgctcattcgaaatgtgctactagaaaagatgtatggaacggtcaagaactcgaaggagtacctgaagatatagaagatatagagccatataaggtaatagatgaaaatgcaatacagcatttcagcctcaaaaagcattacctaagactccgcgataatggttttctttgtgacgacaacaagcggtgcagggcatgcacttatcccatctgtctccaatccttttacggctgtatggattgtgactttattctccaccaacattgcgctggatttcttagaaagaaatggcatgttctactcaatgagcgtcttactttagttactaaggagaccacagtttttaggtgtaaagcttgtgatagattgtccaatggtttcaggtgccagcatgcaaccgcgacattcgatgtactgtgcggttcaatttctgaaccgtttgtccatccaagccacccccatcatcctttatattacattccaccagaggaagaaaaacaatgcaatggttgcgacaattggtcatctcttgtgcttacgtgcattgaaagtggttgtggatatttcttatgcttcgattgtgctaggctaccacaagtggtaaagcatagagtagacgctcatcctctctcactatgctatggagaaaaggcaagtggcaaatactggtgtgacatttgtgagaaagaaacgaatccgagtacatggttctacacgtgtaaagatcaccgagctagtttgcatacaaagtgcgtgatgggagactttgcagggctcatgccaaaaagcgcaatatctctttccagcagatcatatgaggtggagctaaataatagtatatctcctccattttgcgtgatgatgatgttgatgcactttgttgtatttgtatgctacacttttcagtggagttgaagaggttggcaaaatcatcaggaacgagggtactctacttgcaaagtttcagcatcgaaatctagttagacttctcgggttttgtctagaaggaagaagagcggatacttgtctagaagtatctcccgagcaatagcctcaatcttttctcgtttggtcagttgcattcagtgtttttctttgatgatagg

SEQ ID NO: 165138 - DNA, 3115 bp, Arabidopsis thaliana landsberg
ttcactctaccatgctctttaggtccattggctttcaacagatgcctatgtgatttaggagcatcagtcagtctcatgtcgctctctgtcatcaaaagattgagattcactcaatacaaaccctgcaatatatctctaatcctagctgacaggtcagtaaggatccctcatggcttgctcgaaaacctacaaatcaggattggtgctgtggacataccaactaactttgtaatcctggagatggatgaagaacccaaggaccctttgattctagggagacctttcttagcaactgcaggagctatgattgatgtcaagaaagggaagattgatctaaactttggcaaagactttaggatgacctttgatgtcaaagacgcgatgaaaaagcctaccatagaagagcaactcttttggatcgaagaaatggatcatttagttgatgagttactagaagagctggcagaagaagatcatcttaacagtgctttaaccaaaagtggtgaagatgggtttctgcatttggaaacattgggataccagaagctgttagactcccataaagcgatgaaagaatcagaaccctttgaggaattaaatggaccagcaacagaggtaatggtaatgagcgaagaagggtcaactcgagttcaacatgcactctcgaggacgtactcaagcaaccactcgaccttgtctgccaaagaatctggggagccgatcattccaacttcagatgactggtctgaacttaaggcaccgaaggttgatctcaaaccacttcctaaagatctaaggtacgcattctttggtccaaactctacttaccctgtgatcattaatgctgagttaaatagtgatgaagtgaacctgctattatctgagcttagaaagtataggagagcaattggttattcattatccgacattaagggaatttcacctagtttatgcaaccataggatccatcttgaaaacgaatcctattccagcattgaaccacagaggaggttaaatcccaatttgaaagaagtagtgaaaaaagaaattttaaaactgcttgatgctggtgtcatctaccctatctctgatagtacttgggtttctccagtgcattgcgtccctaaaaagggtggaatgactgttgtcaaaaatgaaaaagatgaactgatccctactagaactataactggtcatagaatgtgcatagattataggaagttgaatgctgcatctaggaaagatcattttcctttaccattcattgaccaaatgcttgaacgtttggctaatcatccatattattgctttcttgatggatacagtggtttctttcaaataccaattcaccctaatgatcaagaaaaaaccactttcacgtgtccttatggaacttttgcctataaaagaatggcatttggtttatgcaatgctcctgcaacatttcagaggtgtatgacctctatatttttagatttaatcgttgagatggtggaggtcttcatggacgatttttcggtctatggcccctctttctcctcatgtttgttgaatcttggcagggtattgaccaggtgcgaagagacgaaccttgttctcaattgggaaaagtgtcatttcatggtgaaggaaggcatagtgttgtgtcacaagatatcagaaaagggcatagaggttgacaaagaaaaaattgaagtgatgatgcagttgcagccaccaaaaacggtgaaggacatcagaagtttcattggtcatgctgggttctacagaagatttattaaagacttctccaagatagccaggccgttaaccagactattgtgctaggagaccgagtttgaattcgatgaggactgcctcaaatcctttcacaccatcaaggatgctgatatgagtcaaattaccctaatgactactctctcaaataaagaggttgttagagcacttagggatcgaattccacaaagttctcggatcacacaatagattaatagtttcaaataaagctaaactgaaaatattataaaaataaaagacaagaaaatcaattaaaattggttgtagattcagatgattaaaacgttgggtttagggaaattctcaggaaatatcagaatagtagatctagcaataaattagaattactatcgaaccattctagaactctaatcactattatagagtaaccggtggttcgccgcattactcactatgcttagtagtattgattctaactcttttgtaaatccctagaactaagcaagcattataatcatgtttgataagttcacctaagtatctaaatcgacgctagtccgcatctaaatactaggctcatctaagatagttctagtaatagaagtctttttgagtactacctattaacctaaaatcaagttctagtaattctagaactagcactaagaacaatcaaagatgaagaattctaaatatattatcctaacaggattttcggtctactaattcatctaaatccctattgagagtccctaaacccaacaagagaactattcatacatgattatcaaagaccaaaacatgtttaaggtagaaatcaatgtaagaaacaagaagagaatatagtttagaaagatcttctctagagagagtctccacagggttatgctcccaagtccagaatagagaataagagttaggtctaaacaatgcccataaaaatcaatatataagtttctaaaacgtgatgggccttctttagtaataagggaaagttatgggccgaatttggaaatcttcaaaacattaataggttgcgcaattgaattgtcgtcaagtattggtgtcgctcgacacctacatgcatttttgtctccggatttcttcagcaccataaattctctgttttcctctagaatcctccattatctccaaatgaatctcaaacaggtaaagacctgaaaatgactagaaaagactctagaaataacaaatagactctaaaacctatacgtaaatcatagctaaaagcagtaaaaataggatcatatcaactcccccggacttagcttttgcttgccctcaagcaaaacacaaaacccgaacccgtggaaaaggtttgaaaacacaggaactc

SEQ ID NO: 165139 - DNA, 503 bp, Arabidopsis thaliana landsberg
catgcgcattcatcaaattccgattttgttgtttatatataacccattgtagtaattgaaattctctgctttaataaagtttctgacttttcgagaattttgcaattggctttgcagataatataatgtttcctgaagtaccattggcattgagaacgtcaagtcaccttctagttggggtagtgcgaatatattcaaagaaagtggattatctttacaatgactggaatctccttaatacttgggtagctaaggctttcgtttctactcaagttaacttgcctgaggatgccagacaggccccgcctgagtctgttactttgcctcaagcactaaatctggacgagttcgacttggaagatgacactctcgacatgtattcttctttcttgcttttatttgagtttttatctgttctaaagcctgactcatctttaacattcttttcttgtgaattctagggaattcgataatcatactcggagtgaggaagatatcactct

SEQ ID NO: 165140 - DNA, 1769 bp, Arabidopsis thaliana landsberg
atgatggtgttgaaccttccagaggatttgttagtggagatactctgccgcgttccggctacatctttgaaacgattacgatctacttgtaaacggtggaactatttatacaacgataagagattcaaaagcaaacactgccataaagccccaaaggtttttcataatctcatgttgcacgagtgtaggtttttttctatgagtgtcagtttccatggactttcatctgtagagaccgcatgtgagcttagcctaatccattctctttctaattttgaagataaattcgagatttctcaagtctctcactgtgcggcttgattgttatgccccgacgtagacatcactagcatggtggtttggaacccgtgtctaggtaaaactaggtggattgaacccaataatcgttgctactactatgcttttggatcatacttgcccccatccccctgtaatagctacaatatattgagctatagtggttatggaatctagaaccaagacctcgctatcgatgtaattaactctcagttcatgtgaggttttttgatgtcactcgtgactgcatccttgaaagatatactgattacggtgtgtctttgaagggacatacttacttgtttgcgtcagatgagaaagagaaaatttctcagcgtatttctagtgagttttgattatacaactcaaagatttagacgtctacatcttccgtatcaatgcaatcataacactgcgtctctatccgttgttaaagaagagaagctttcgcctttcggtgttatgacaacgcgaaaatacatcaaggacatagatatgggtgacaagtaggattggtgagaccaaagtggtgtcgtggagcatcatggtcttagcagtggatttcccgtccgaactattttgtctggcataagtttcttggtcgatgcggagaaaaaattcgtcgtatgttgtgataattactttggaaaggatgaatacgataccaaaaacttggtccacattgttggagagaacaagagtcgaataagtaagcttcacgcaaacctgtttttttcttttttttctttttctcaccgttatctttggtcatatctttatgttttgactaacaaatgtttcatacatacttgttgcattactttaagacagtttttttattatatagtttcgtgatcaaaaaagatctgcattgccgcctcgagcaacatgggggtttcatgcttattttcttaacaaatacaaagacataaaaagcaattaacctaatgaagagaccaaacaaagataatgaagagctacgtgtacgttccaagtctagttcctcttccaggataagatggttgtttcgtgtttctaagcttaattggtatgtgattgttcatcttctgccatcatatatgatagtgcatatgtattgaaattgactttggtttttgtgatacaacctggacacgttttaggtctttgtccacagttgtatcagtttcggtcatgtttgtggtatcaacaaaactaagatacacacattccaagtatacatgacaaatttcactctatgctacaaataaccaatgtttgtactaaaatccaaatacaaagaatttggatgaaccttgcatttgtaacatacattgtaaatgagtaacaatgaccaacaacattaacagattgtttaccaagagttacagtaaatgtacaatgttcagttcgtatagatagggtccttatatatgctgagtcaaagatgtcaatcctataggaaaggaaga

SEQ ID NO: 165141 - DNA, 1196 bp, Arabidopsis thaliana landsberg
attaccataatagaagccttgattccccggatgtgaaggttgatgtggaaaagtggatggcaaatgcggttgatcatcgtaaggtgcgaaagctatgtttcatgctcacgtgggctggagagccgcccagcttacttaagagtctttacacatgtgaaactctagtctctatatgtctttccggcaagattctcattgatgttccttctttggcttgtcttccatccctcaaaggtcttagactttcctttgtggtatataaagatgaagattctgttgttagacttttatcgagttgtccaattctcaaatctttggtcgtggatcgtcaacatcaagacaacgtgaatttttttaatataaaagttccatctttggaatacttatcatataattatgtgaaattgggagcagaaaacgaaggtattgtggggactttggttatagattcaccgattttaaagaaaatctgcattacagattattcgggagactcttactcgtttgggaataagcctcgccttgataaggcaaagatcagccttttctattaccctgataacaagtttatgagatctctttcctcaatcatgtgtctcgaactaattttgagcgttgcaacggtctgtcgatctcaggtcaatctcctgtgtttatatattggtatgatctcattttataactgtgttgatctactaatgaagtcctgtggtccagccagcgtgagtgggtgaacgatgataacttctctcggcatatagagtgtaagctgattattctgagcgagtttgtctggttggaatcactactgttgttgctccagtattctccatatttaagttcctttcctctgccaggtatgctgttaccttcatttttcattgattcagttttgatggattgatacaagcattagctaaatgtgcgtttatcatatcacttgttggtgctttgctgtcgttcaaacaacttgatagggagttgccgctttcatggaaccaatccagttctgcttccgaatgttagtgcaaccattttaagatattatagtggaatggatataggggaagaaaggaggagaaagaaatagagctatacatccttgccaactctaagtgtttaaggcgaattggagtctccttgaaatcaaccaacatccatatgacgagcaaagagttagaatctatgtgtagggt

SEQ ID NO: 165142 - DNA, 647 bp, Arabidopsis thaliana landsberg
agttgtttcgattcgtcgatgaaataacttcctctgatgattatactccaggttgtgctttaagagtgttgatgactcttacaatcgctattcctcctgaacatattgaagaagacgttctatgtttagaggatgagcaagacgtttacggagaagcatcttcatctcagtttgaagaagttgttccattctacggggtgccatactgtagggatgactacaatgattactttccttacgaagaagcatcttcatctcagcttggagaagatgttctattccaccggttgccacacttaagggatgagcaccatgctagctttggcttcgatcatcaacttgaagaagcgtctcattctcagattgaagaagtttttcaagtttcgttcaatgagaccaacactgtcaggttaaaacctgcgagcaagctcactgtcggggctttgaataggaaaacatacaagaaagctagtggtgttgtatgtgagaatgacgtgtgcactatttgtttggaagagtttgacgatggaagaagtattgtgactttaccgtgtgggcacgagtttgacgaggagtgtgttttagagtggtttgtgagaagtcatgtatgtccattgtgtcgtctcgagttgccatgtgaaagataa

SEQ ID NO: 165143 - DNA, 225 bp, Arabidopsis thaliana landsberg
atgaaggagttagtgagtaaagatcttgacgccactacaaggtttgtacttcggtatgtgtttcaaaacacgatacattctatatggagagaaagaaatgagaggagatatggacagacgccatcgaggacgaagaagataatcaggataatagacaaaaacataaggaattgattaagcacgttaagggtaagatgtaatagaagtacgcaagaggaatcgaag

SEQ ID NO: 165144 - DNA, 2218 bp, Arabidopsis thaliana landsberg
gatgtgttaagcgaactcgccggagaagaaaggaacgagagaggattgccacctggcttccggtttcacccgacggacgaagagctcattaccttctacttagcttccaaaatcttccatggtggtctctccggcattcacatttccgaagttgatctcaaccgttttgaaccttgggagctaccaggtaatatattatacattttgtctcttctttacctcataagttttattttggaatcttgtttttagttgaatattttgataaatcttttaacaagaaaaaagtgtaacgttttgaaattgttgttatatgaagaaatggcgaagatgggagagagagagtggtacttttatagtctaagggacaggaaatatccgacaggtttgaggactaacagagcaactactgctggatactggaaagctaccggcaaagataaggaagtcttctccggcggaggaggacagcttgttgggatgaagaagacgttggtgttctacaaaggtagggctccacgtggcctcaagactaagtgggtcatgcatgagtatcgcctcgaaaacgaccattcacaccgccacacgtgtaaggtaaattaacactcttttactctcactcgtgcgtctcactctcactcgtgcatctctttctttaaaaaaatttgtattttttctcttgtcaatttatgagttgactttttgaaaccaaaaattttatactactagtgtgtgaaactagtaatttaaaccctgttacttttattcccacacgtccatttcttataacattaaattctttttaactttgcgaatgtaatagaaatttgatgtttttgttctccattaatgtgttaactttttaaatccacaagttgaaaagaaaggtttaacgaaatatttaactttttttttcccatttcatgtgttttgtttcaatagtattgtcactatgttgtttggcttagtatggggaggacaggggagagagcagtttagatgtgatagatttgatataaacctgtacgtgtggtgtggatgtcaacaccaaacacaccttgccgttttctgttcaccgatacactgttgtgtcgttttccatcactattgctttcttttgtatcccacctttctaattacatttatcattatcagaaatcaatttgtcaggctcacatttcaaacaagatcttaaggtgtaggcattatatagatgtgtaataacatgtttggggtgttcatttccttttggtggaaattcacaggaggaatgggtgatttgtagagtgttcaataagtcaggggactgaattaatgttggattaatccataaccaaatcagctaccttcatagccattcactctcaacaacacatcatcatcatcatgaagccttacctttgcatatagagccttccaacaaaaccctaaccaacttcccatcactactctacgatgatccacaccaaaactacaataataacaacttccttcatggatcatcaggccacaacatcgacgagctcaaagccttaatcaaccctgtcgtctctcagctcaacggtatcatctttccttcagggaccaacagcaccgacgaagacgacttcgactttaacctcggcgtgaaaacagagcagtcttcgaacggtaacgaaattgacgtacgagattacttggagaaccctctgtttcaggaagcgagttatggtctgttgggtttttcgtcttctcctggacctcttcacatgctactagattctccatgtcctttaggattccagctgtagaatcttggcccttggattttatatttggtcttttcttattttcaccttctgtaaaatacaaattatataaattattattcctaagatccaaaatcttttgtcgaacaaatttcttaaaagttatgtggctgattgctgtagccttgcaggtaaaagctattattgtgttacaacttttgatgaactgtattttgtgggcgtttcactattcgatgtgatctcataaataccaataatatttgcaactattctgacgtcattcttgtttatttattcttttttgcttttgatagactatccctcatattcatttttttttgtttcttgttttgaagattttttttttttgtatgaattgtgttcataattttgggactgcaaaaatgacattttctgttacaatgctaaattggaccggtttagcgggc

SEQ ID NO: 165145 - DNA, 520 bp, Arabidopsis thaliana landsberg
cctcacgcgcgaacctggtggtacggccttgggtgaggcttttcgctaagtgctattgcatcagtccatgcacgccgaaaccgaaacgctgctcatgttcgccgcgcgccgcgagcatattgcgcaggtgatagagccggcattgacccgcggtgcttacgtcgtatccgatcgctttactgatgccacctttgcctatcaatgcggcgggcgcggagtggacgcacagaaaatcgagacactggaatcctgggtacagggcggcttgcaacccgatttcacactgttgttcgacgtgcctgtcgcggtcagcatgcaacgcctgcaatcggcgcgcagcccggataaattcgagcgtgaaagtcatgtgtttttcacgcgtatccgtgaggcctatctggcccgtgctcatcagcatccattacgctttcgcattattaatgccgaccagccattggaaaaagttaataaagaagtcgaagaaatcataataagatcatcattattatgatttaccctt

SEQ ID NO: 165146 - DNA, 3076 bp, Arabidopsis thaliana landsberg
taacatgataacagaaatgataaaggatgaaacgaaaactgaaaaatcaaatacttgaaagtgaatacaaaatcgcaggagagtgttgcggctacaaaagtttgcgaaaagatggtattaagataatggatggataccttagggaaaacccctagaggctatttataaaagaaaaattaaacaataaggaaactagatagatagtaatcttcacgttgggaccctgcgatcgagcatttgatgggctgaaatgggcctccctgtgatcgagtatgtcatgaatcaaactgggctttagggattctatcttgcgatcgagtggtaaggagtgaagatgagatggaatggtctagcgaccttgcgatcgagtggtgcgatcgagttgatgtcttgaggtggtctatataaccctgtttttactgattttatctatgttttagatttaggatttcgagtctttatgttatttcccgagtcttttcaggtattctatgcagtgggacgacaatggagatgtagagacattttggagcaagagctaaggaaaaggaagctaaggacgatttcagttccagattcagagagagtgtcgatcgacacactcctggtgtcgatcgacacagtcatggtgtcaatcgataccagttttggcccagaaaagtccatgacgctttcaagtttacaaaagtggaaatttgccccaaaagacttctctatttgcattattagtccatgacccttttatacggcatatatatagttttagaggtcattgtttatccctattaagttctttcctaccaagttttcagagagacataagctattcatccctattttcagagattcatccagttttccatacagtgaagagatcctttcatactctaatcttatttgctgtgtttatgctttctatctcaattgtgttgcttgtttcaatcaatatgtcagagtagtttgcttcttaagaatagggcttctcattagggattcatatggtttagtacatcgccccctttgctaggttatctttagaattcctcatctttgattattcttaatgctaaatctagagtaattaactagatcttgaatccagacaatagatatacccgcgataggtatctgtagttggatctattatttgatgagcctggtttataggtgtgtaataagaatcggtctatctactaaggtgaacacttgaacttttttagaatgcatgtttaggttaaaaatctctcggcttctccggttattcttagctataggcatagggagtttcgcagaacaccgccggttattccataattagagtttgagtttaagaatggttcgataacaacctatctttcattaggtttagtaaccaataatttctgagaataccatgttcctagctctttatttcatcgtttacaaccaatcaatcttctatttttttactttgtttacttttattttcttataatctcttctagattagtctcgacatgtaactcattgtttgaacaaaagaattttgtgaaaatcgatccttaaatacagcaattgatctcttatttgagagagtagttcttagggtaatttgaaccttatcaaattttgcgcctttgccaaagttcttgggaatcaccattgagttttgtttagagattccgtctagtttttacttttcttttgttactcacgtgtttcttattttttcttcttttttgtgtttcaggtgtatgcctaggcaaataaggagcacacaactgaagcagcttatcaacttgtctgttctggacttgggaaaacttgaacgcaccaactgaaaaactcaaagattagcaatggctgacagagtcatcagagctgatgtagaaggaattttgagagatgaggataggcatgcctacaatgaggctgatcagaaattggatgatcatggactcatcctccctgaggacgtcgatgagaaccaggcgcacctcaatgcgcaattagctgccagagatgcagcagggcttggtgtcaagcgatacctttaggagcagaatgaggacgcgattggtgtcgaacgacacaacaaaggtgtcgatcgacaacaacaccaaattcctgtaattattcctccagctgcgaaaccacgtcgtactcttggaaattttaacaagcctgacctgttctatgctactcgatttcaaggtccagccctccagtcccttatccgaggaagcgtcattctaagcaggagattcatgattctaagtggacagccataatggagaagatcctccatactcttcctaaggatgcttctaggacatcttctgcttcactcaacaggtatgtcaagcgacttgttgataatggaattagctcagatgaagctaagctgcttaccagggacatcagtgcaatcatgctgcctaaggccaagaaagagaaggcgcagagagtagacattgccgagtacatccgtatcatcactcctggtcagaccactaagaagcttttagataaagaaagctttgttcttgattgctctatctccacaagcaggttcaaccgccctttgtgtgatttgggatcaactatctacctcatgcccaagtctgttgctgagagactaggcatgactcactacaggccgactcgcatcactctcctctttgcagatcgttctagacgaatccctcaaagaatccttaaagatgttcctgttaaggttgataactgcataatccctgctggtttcgtggtacgggactatgagaaggaacccaaggatcctcttatccttagaagagcattcctagctacaactggtgctaggtttgatgtgaagagaggtaggatctctctaaaggtttgtgatttggagatggagtttagcatggatggttcagagcttactaagcccatcagcaacattgcctccagcacaaacacccctctttagactactcgggatcccaaaacagagctacacacaacgctcccatccgctcagctcgccaatgagagttgcagagcaacggtgtcgatcaacaccactactcctgtcgatcgacaccctcgggtttca

SEQ ID NO: 165147 - DNA, 368 bp, Arabidopsis thaliana landsberg
atagctgctatgccagaccgggaggatgtgcatataggggatgggatgatgatcgattcggattgtgaggatgattgtgtgatcacgggagtgaggacggtggagcaggagctggctccgaagggacatgagatcgtgatggtccatgactatgtgactattgtgaggatgattgcacttaacccgtattcagcgatatcctatgagtcacatccggatgaggatgaggatccttggtttttccatactttccggaggctatagatcactttcaccaaagcccctttgcactgttattggagggcacgttcccatatttccttttgcggcggacatgagggctgaccctatttctgacatttaccggg

SEQ ID NO: 165148 - DNA, 600 bp, Arabidopsis thaliana landsberg
gcttcaaccaccacaagcgcaacggtagccgtagactgccataaacaagttcgttcatggcggctccttcgcaccatcgcccaacttctcatcccatcttgttactgcacaatcgtcgatccaaatgatagtcaagaagacaaattatctcaccgccaaattaaaccaagaacctcttccgtctactcaaccgccacaaactccacttttaccggaaccatattcggtttccgtcgcggcaaagcaaacttctgcatgcaagcaacaaactccaaaaccctaaacccaatcattgtcctcttagagctcactgtccctaccgaggtattagcccgcgaaatgcaaggaggcgtgctcaggatcgctctcgaatcaaacaataacgacggatatgattcacatgaagattcttcctcttcacttcttacaacacctttatggaacatgtattgcgacggtcggaaagttggattcgccatcaaacgagagccttcgaagtctgagctagctgcggtgaaggtgcttactccggtggctgaaggagccggagttgttaacggagaatagataaaccgagagaaagtgatcatatgatgtact

SEQ ID NO: 165149 - DNA, 591 bp, Arabidopsis thaliana landsberg; identical to SEQ ID NO: 69139

SEQ ID NO: 165150 - DNA, 5705 bp, Arabidopsis thaliana landsberg
  unsure (1)..(5705): unsure at all n locations
tttgctcaagtacgccaagacgagaaggatgacacgttgtgtaagataataatgggaacaattcgtggtgatggtcctcgaagagttgtactgtctgggcaatccggaatcggtaagacgcggctggcaaagttggtgggcgagtatgcaacagaagaaggcctgtgctacctcaccctctgcttgcacctcaaccagaagtttgaagatgaagtgtcgctttatgagcacatagctttccaaattgaagtgtatgacggggatgatgatgagagtgacaggaaagacttgttactcgatttgaagaagtcgatcattcgggaacttgagggaaagaagagattagctgatgaacaaatgaagatatcagatcatgaaagaaggaagatactgttgcttgacaatttccctacaaatcctctgttgtataaacacatttacacttcatcgcatattctattgatacttgatgacgaaggaaataaaaccagtgaagacaaagtgatgaaagatttgggccttgaaagttttcttaaagattacggacctcttaaaattcttattacaagaagagcaggggatgaaaacactacaaagcgtgatggggaaactgagtcccatgccgtagaccagtcacagggtacagagattgatggggagaccaagtcatagggtgcagagagtgatagggaaatcgagtctgatgacatggaagagccacatgatataaggaatgcggagaaaattgtgtctcatactacattcgagacacatgcggatacaaagtggaaggggaaagttgagtttcatgtcaccaatgagtcacaagctttacttaacagcctcaacgagaggaacatgcggtatttacttgcatcccttatcaatgataagtcaagggagcttcttaactcccttgagaacgcttggaagcttgatcatccattgatatctagcatggcgcgaaaaagtaatagtttgcccgctgcaattgtcgtgcttgctaagtccttaaactgcattactcgtcaggccactttcaagattctttctcccaaacaagacaagctgtttaaggaagttttatccccgtatgagccagactactcagtttctagaaataattctgttctgcaacttgcttatcagctcctggaaactgatgatacattgaagaatgccattgttgattgtttttggcatagcttggacttctttgagcattgtggctgtatcaactacaacgaactgatcacactgtggatacttgaaggctattttgatcctgttcgatctgttaagaaagcctataaggatggtcatgctatcttggtggagcttataaaccgaggtattctgaagatacaagatggtgatatagttataccagagatggcaatgaaccaattaactgatctccgatatcatgggctcttcggcagatcccagctcctattttctagggtttcttgtcgtgagaagaacaaaggtctagggaaaatcacccaaatagatgatatgataaaaacagtaaatgcaaataaaggagccaatatttgtacaatgctggtaagtggaaaccgtctgcgtcaggaaacacctcccaagttcttcgagcagatggcagatcttgaagtacttattcttttcgatccaacattgggatgtttaaccaggtatttaaaaaatctatgtgaactccgagttcttgtgatcaggaactgtggtctattgtcagatattgaggagcttcaggatctacgagagctacaggttcttgaagtttcaggagctagctctgtggtaaatatcactgatggcttctttaaagcactgccccaccttcaaagtcttaacctctctggacttcggatcaaatctttgccttccagcatttgtcaactatatgacctccacagtctcatccttagggactgtcttgtcttggaagatttgccagatatacataaattattgaatctcgaggttctcgacgtccgtggtgcacgcaggctaagaacttgctttggcttgaaagaaaaaacaagcagaaatcgaacctttcatcatttaacaaaactacagctccttgatttctcagagagcaacataaaacgacttccagtatttcatgacgctgcgatggctaccaatcttcacttcttgacgcggctctattgcgcaaatgtagcaatttattaaaattgcccaatcttaaacctttatcgggtctccaaattctcgatctttctggtaccaccagtttagtggatattgcggcagtatgcttcgagcagaaagaggaactcaaaattcttaatctttcaggcacaaagattaccaaattgccgtcaaccatctccggtctatccaacctcagacaactcctcctgagagacaactccaacctagaagctctcccaaacatcagcggactcacaagcctggaagtctttgatgtttctgggtgcactgagttacataagattgagggatcctttaaggacatgtcttacttgnnnnnnnnnnnnnnnnnnnnnnnnnnnntagaaaccataccgcagttgccagatacgagcaacatcgtttgttcaaaactacttattctggcagatacaagaagattgatacatgatacttggctcgaagtaaaggaagccatgacaaatgggatttctgagagtctaagctcttttgatatggtcgacagaatccaagcaacctcaagaaaggaagaaggaagtgtaggtgaactttgggcctttgattgtcctgaaaataaaggtcgccccagggaacaattttaccaagatcatatatacatggatgtctatcggaacacaataccttttgttgataccaaaaattgtcaagaagtcctagagatccaaggatctaatggcgtagatcaagataaggaaaccttggctaaagttgagtttgtggctattgtggacaatagcggttcaagtctctcctcgatcttcaatgatttgaagtcagtgaaaagttgttggctggagatgtgcacggatatagaaatccttttctctggagtagatgaggaaagtctaggaaacctggagactttgtcaattacgaatattcgacctttgaagagtatatgcagcagcagcttaaagaatctgaaaaaactaagcctagattgttgcccatatattgaaacgctatttcctgcatccgcgcttccaaccagcctagaagtcctgaagataaagttttgtgagaagctggagaaagtgtttgtacgagaagtcgaagtgcctaatctgcacacactatgccttttcaatttgcctgttctagctgctatcaatgctttgctgcctaatctgaagatatacaaaccagagaaatgcccaaagctggaaactctaatggaagatcttcgtggtccggtgagtccaacattatacatataactactctcgagtgtgttgttaatcttcgtttcctcttgttagtgaaactgttgtgaagtttgaaagcacaataatctttcaattttgccggttgcttctgttgcaggacttggaatgagtatatatgaaaaactacaagggcacttggagcaggggaagctactgcattcttttcatggatccttgccctggtcatttactatgttccatgtacccgacatgaatttgattgttttcttgttggactcctaagggttctatttaaaatatactcttgacatttttggcaccatttttacaagttattccagataatgccaggaccttctggtgatgcttaaagtaacagaaagcccaaacagatacacttaacttttctcgttttaaacttaaaataagaacagaaagaccagcggtttatttgtagaaaaagaccacaaacctcaaatatattaaacaaagaaaaccccagttcgcatctcccaagaaaagttgaggtgaaaaaagtcaatggcagaagcaaaagaagcattccacaaagcaaacaagattatccagagatcgatctgatcagagccgattcttgacaaaaaaaaacataggaaaatggtggaagtaattcccaaacatatcaaagatgtttgggacacatggaatattaggggagtgataatcctcagtctctcgcttcagaccattctcattttctttgcccccttgaggaaacgaacgcccaacaagttcctgatcctgctcttgtggtcatcgtatctcctggcagatttgtctgcgaattttgcagttgcattgattgccaagaaccaaggtaaagatcttaaacctgatgatcctcctcaaaacaagaagctcgtcgccttgtgggcacctttcttgctcttacaccttggtggaccagacaccatcactgccttttccctcgaagacaatgctctctggaacagacattttcttgggcttgtctttcaggcgcttgcaggtgtatatgtagttgtccagtctctacccaatgtactctcggtgataatcttgttgcttttcattgctgggacttctaagtatttggaacggacaattgcgttgtacctcgcgagttcagacaagaacaggaactcgatgttgcaggcgtccaattcaaggtttgactacaccgatcaaacaagggacttagacatggacacgaaacttgcttctgagatgaacatgaaggagcatcgcggacaaccaaaacctctgaagttattgcaaccacataaagagttaacccaccttgagattcttcaatatgcattcttgttcttcaaaaattttaagagtcttatggtcaataacatatttagcttggagctgcgcgatgaaagcaaggccttcttcagtgcattgcaactaaaagatgaagctttctgcattatagaagccgagctcgattttatctatgaaggactgtatacaaaaggttcggttcttcatagttgggttggacttgtgtcacgattcatatcactgggatcccttctgtcagccttcaccatctaccattacagacacaataagatccaagaatttcacaaagccgacatcgtgatcacctatacgttgttcttagttggcatagctctggatgttatatccatccacatgttcatggtttctgactggacaacagccatccttgctaagctaaaggatgaccccgacgaaaggtattcagggaaagaccacatactcaactggatactttttctgaagaggccaaagtggaagtggcaaacatgtcgtgagggagatcagcaggaggtgcttaacacaccgtttctactcagaagatggactggaagcatcacaatgttaaactttctcacatactccatgaaggcagatacagaaaggatccacgacccaggagtagagcatgccagcttttatggaagatagcagtttgccctttcagtttcattttctccatcatccagacttggtctagtaacatagccaaatggttttgtgctcttcactggtatatcatccaccatgtgattattctaccgccagggcaaaatcaagttgctcgttctattatcggcatcttcaaggcttttgttgagttttggttcaatgtacctaactttttcgagtatcttgtcacctccgtcatcaacttcctaggcatcaatggtctgttctatgagataagactggtaagatctgtacaccgtgaacccttgacaaaaaacctatggtctt

SEQ ID NO: 165151 - DNA, 519 bp, Arabidopsis thaliana landsberg
ggggcgctcagcggcgggcagaaccccctatgccgccatactcagctgtgcggactcgcgcgtcgcgcccgaatatgctttcgacagcgggcggggcgacctgttcgtcgcgcgcgtggcgggcaatttcgtcaatgacgatgtgctgggcagcctggaatatggcatagcggtgcttggtgtgccggtgattctggtccttgggcacgagaaatgcggcgcggtcgacgcggctgtcaaagtggcgacgcaggccgccacgtacccgggcatgatccagtcgatggtggcggccatagtaccttcggtcgacaaggtcaggggcaagcccgggaatctgctggaagcggccaccgcgcagaacgtacgcgacagcatggccgccttgccggaacgttcggccatcgtccatgacgcggtggcagcggggaagttgcgggtcgtcggcggcgtataccgcctggcgaccgggaaggtgaaacttcctgggctgatgtccgactggccggccaggggccg

SEQ ID NO: 165152 - DNA, 783 bp, Arabidopsis thaliana landsberg
ccataagatgcatatgcctaccgttgcagacttcaatctcctgaaacgaatcatcaggtacataaaaggaactgtaaccatgggaatttttttaacaaggagacagactgtaccttgagagcttatagcgacaatgactatggaggttgtgaaacaacaagcagatcgactggtgggttctgtaccttccttggaaacaacattatctcctggcagtcacagaaacaaccaattgttgctaaaagttctacagaagcaaaatatagagctctatcagaagcagcttcggaaattacctggctatgcaagattctgaaagaactcggtattcctcttcatcaaacaccagaactatatggggataatctctcctctgtttacctcactgcgaatccggctttccacaagaagagtaagcactttgccaatcattaccactacgttcgggaacaggttactctgggaactcttcgggtcactcacatatcgaaccaatttcagatcgtagacatcttcaccaaatctctgcctcacggtcctttcgaatctctccgattcaaacttggtgtcgatttcccacctcctccaagtttgagggggagtatcaacacaacagctccaaacgacacagtttgggaattgggctcaaaaccactaaagcccaatccgaaacaaatgctcaatccaaaagccaagcccaacatagctcaacggaaacctgcaacaacaaaggacaaaagcataaaagttgcagagcggtcattatctccaagcagtacggaa

SEQ ID NO: 165153 - DNA, 3483 bp, Arabidopsis thaliana landsberg
  unsure (1)..(3483): unsure at all n locations
tataaatgccagatgtagtcgtaaaaaccgtttttttttgttgggaactttctcaacaaagatgtagctgaaggttgggaacttgttgaaaacctagctcaatctgatgggaattacaatgaagactatgatcgctcgaatagaggaagcagcgattctgaggaaaagcacaagagagagatcaaagctcttaatgataagattgacaagttggtgcttgctcagcagagaaatgttcacttcattacagaggaagagcataaccaaattctagaaagggagannnnnnnnnnnnnnnnnnnnnnnnnnnnnnngaattaaggtggctacaacaaaggattcaataactacaagcctcctcatcctcatctcttctatagaagcaacaatgtggccaacccacaagatcaagtttaccctcaacagaaccaacaaactcaagctaagccctttacaatcaaggcttcaaccctaagcagcaatttgcacctccaggcttcactcagcaacaacaagctctttctacaccagattcagagataaagactttgcttcagcaactcgtgcaaggacatgcatcaagcaccatggctttggaaaagagtcttgctgaggtcactacaagaattgactgctcttactatgatttaaacatcaagattgatacaatcaactcaagagttaagaccattgagaaccagatggcttctaagcatcctgtccaacttcttggcaaagctgttcaaaacccaaaggaatatgctcatgctatctctacagttcatacttctatcattaaggacaatgagattcaagaaagagaagttttaagagtaaaatcaggacaagaaattgaactcgacttctttgctcgacttgttgaacgagcacatgacccgagtaacccaattcctattccacctccttatgtacctgaactaccatttccaggaagaattgcacagattgaagaaaggatcttcaaaaaacacaagatgatgttcatcaagtgcatcaaagagtttaaagagaagatacccttggttgatactcacaaggaaaatatgatagaaagaccccaacaggttcaggaaatagttgagttgcactatgagtgcagtgctatcatacaaagaaaggtgataccaaagaagctaggtggtccaggttccttcactctaccttgttctctaggacctttagtgttcaacaagagtctctctgatttgggagcttcagttagtttgatgtctttgtttgttgcaaggagattggggttcactaatttcgaacctagttgcattcaccttattatggctgatagatcagtgagagtgcctcatgggatgctagaagacttaccagtaaagattggatcagttgagattccaaccgactttgtggttctagagatggatgaggaaccaaaagaccctcccatttttggaagaccatttctagcaactgcatgtactctaaacaatgtgcaaatggggaagatagatttgaaccttggtaagaatctccatatgagctttgacatttccaagaacatgaagaagcctaccatagaagggcagcttttcttcattgaagaaggagttttagatgctgagttgttgactgggttggaaaactccattccaactcactgcctaagagagcctaagcagcccaaaaagccttctatgatgaaaggagaatcaagctcaagggtagagactaagggagacctattgaatattgattctattgctagagagcttatggagcttgggaaggagtatgaagctcaagaggacatcattgacaagttggacctcaagatggaagaactaaactatactatcttggagcttaaggaaatgattaaggggtatccaagtcccgaagtagaggaatactttgaggaacctgattcaggagaaggagactagactacagatgagaaacaggcttactttgagaaaagatctaatgaatactctactctccagctatctagagaaaatgaagagtatgattcagactttgaggattcagcaagtgaagatgaggacttcttagttcctctcttcaatctcttctctacctaaacattgtgagactcaagctaagtgactttaaacaagctcacttgggaggaagtcccatgtctatccttgtatatattgctttcttgttatttttaatgtttttgtttaagtgtttcagaaaaaaagacttttgggaaattttcaggccatgctcgaccaaaccactcggccacaggccgagtgtggactttaattgatcaaagcctaggagtagaccatactcggccaagaccactcggcccaaaatcgagtatgggcctcactgttcaaagcccaaaaagatgatccacttgaccataagccgagtaagatgaagcccaccaagcccaacattgtactcgacacgcatgtcgaggtatgtcggccgagtatcacacgtgcaaagtcaacacaattcaaattcaaatttgaattgggatctactcggccccacacatctatcctgctccccaaaggccatcaaagattcttttgcaaacagtgagagcttgtctccttgaccaaatgaagggtggagatctagagtgtttgaagagctaggatcaaatctatttgcctataaacccacctcaacaagctaagacactcactctctctctttactcaattagtttcgcaatttgctacttctctcaagaaatttcaagtttttgctctcacttctctttagaattcccagaaactgaaccataatcttatactttctttccatacaaaccatttcaaaacctcttaaaacttcaaattctcttctactttgacctactttgggttattttgggtgactatctgcagtacctcaccacaagactatggattccgaagaaacaagacgaagagcctctgcttgtgctgtagctagagggtttgccatgatcaacgagagagctccggtttggaatcaggaagctgtgagtcctggttttactcggttgacaggccgagtgcagtggccgagtatgactccagaatcttctatgggtcgttctgctgctgttagagaggaagttacaaggggaagttgtgccaactagagaagaagaagagcctatgttagagggggaagcatctgaaaaagatgtagagattgttgaggaggttttgccagttactgtaagaaggagaaggaactatccaaggaaaaagagggagcccaccatagaagagcattaccagtacctaatggatcttaagtttgaagggacaagatatccccatacgccaaccatgctagagacattccttacctacaagttcgagggatgcaaggaggggagctgccagttccttgctacttgataagtaggtttttaggcctacttatgtgctgaatgtgaggttcagttcaatttcccttaaacactaacatgtcgatgcagctataggg

SEQ ID NO: 165154 - DNA, 463 bp, Arabidopsis thaliana landsberg
ggaatcaaagcataaattattaatattacatgaatctgatttttttttacatgtaattgatttggggggttggataatcaaccagttctggaaatccacaaccaaatgaagaatctcaaagaataacaattttctacaatggaaaaatgtgtttttcttcagatgttacccatcttcaggtatgtaacacattcatatctgtgattttttttttttttgggtggatttatgaattaataatgtttaacgaatgaatatgtaggcaagatcgataatatcgatcgcaagcggagaaatgaaaaccaagtcatcctcaaacgggtcggatcctccaaacaagtcgacctcatttcatcataatcagcttccaaatccaaaagcatcaatgaaaaaatctctccaaagttttcttcagaaacggaaaattcgaattcaagctacttcaccgtaccattcacgacga

SEQ ID NO: 165155 - DNA, 957 bp, Arabidopsis thaliana landsberg; identical to SEQ ID NO: 56083
  unsure (1)..(957): unsure at all n locations

SEQ ID NO: 165156 - DNA, 583 bp, Arabidopsis thaliana landsberg; identical to SEQ ID NO: 79338

SEQ ID NO: 165157 - DNA, 928 bp, Arabidopsis thaliana landsberg
acataaggaaactaaatggagtcttagcaagttggtgaaattgcttgaggtttcttaccatcctgatatatctctagcctgctttagcgttgatttcgatatcaacttagtgaataagatacttatccaccattgttaccgagaagggttgttcgacgttggtgattgtctggttaaggaggctggaagagaggaagaaactgaggttagatctcagttcttagagttccaccagatagtggactcattgaagctcagaaacattgagcctgcaatgagatggatctttgcgaaccgcggaaagctgaagcaaaagagttcaaagctggagtttaagctcttaagtttgaagtactgtgatatattaagagaaggaaagagtgatgatgctttggagtatgcaagaacccattttacgcaatatccactccattttaaggagatacaaaagcttatcacttgtttattatggattggaaactttgagaaaagtccttatgcagagatagtttctccatcatgttgggacaaggtaaccaaagagctaatcatggaatatcaccatcttctcgatcagccaattaactccccgttgaaagtcgctttatccgcgggttatgagagcttaccgtcactgttaaagctggttcatctaatggcattgacgaaacaagaatggcaagcaatgaaacagcttccggttcctctggagttagggaatgagtataagttccactcagcttttgtttgtcccgtgagtagagatcaaagcagcgaagaaaacccgccgatgcagttgccttgtggtcatgttattagcaagcagtcaatgatgagactcagcaagaactgcgctttccgcacattcaaatgcccttattgtcctgcagagactttagcttcagcatgcaggcaattatacttttga

SEQ ID NO: 165158 - DNA, 945 bp, Arabidopsis thaliana landsberg
gaaaccagatggcaagaggggagagtttagctatgaggaagagcagattatcatcatgcttcatgcatctcgtggcaataagtacgtatggcatttctctaggcttgtttgtgctcatatcagtttagtgaagacatgatcatcaatgttttgatatatatgtaccctgtgtttttattttattttactaggtggtctgtcatagctagacatttgccaaaaagaacggataacgaggtcaaaaactattggaacacacatctcaagaaacgtttaatcgatgatggcattgatcccgtgacacacaagccactagcttcttctaaccctaatccagttgagcccatgaagttcgatttccaaaagaaatccaatcaggatgagcactcttcacagtctagttctacaactccagcatctcttcccctttcctcgaatttgaacagtgttaaatccaaaattagcagtggtgagacgcagatagaaagtggtcacgtgagctgcaagaaacgttttggacgatcgagctctacatcaaggttgttaaacaaagttgcagctagagcttcttccatcggcaacatcttatcaacatccatagaaggaaccttgagatctcctgcatcatcttcaggactcccagactcgttctctcaatcatatgagtacatgatcgataacaaagaagatctcggtacgagcattgatctcaacatccccgagtatgatttcccacagtttcttgagcaactcattaacgatgacgacgaaaatgagaacattgttgggcccgaacaagatctccttatgtccgatttcccatcaacattcgttgatgaagacgatatacttggagacataaccagttggtcaacttatcttcttgaccatcccaattttatgtatgaatcggatcaagattccgacgagaagaacttcttatga

SEQ ID NO: 165159 - DNA, 1224 bp, Arabidopsis thaliana landsberg
  unsure (1)..(1224): unsure at all n locations
atgactcttttcaccgtttcgtgcctcctcgtggtactattcttatgtcattccttggtccatgccgaaaataatggttattacgggtatacccccacggttgccaactacctccccgagaaaccgcagaacatcatgaatccggtggactcctgttggcggctcaagtctgactgggctgccaatcgtaaagacctagcggattgcgtggttggattcggttcatctaccttgggcggaaagaaaggtaatttatacgttgtcacaaacccttacgacaatgcacagaatcctcaaccaggttctttgcggtacggcgtgatccaagccaaaccattgtggatcactttcgctaaggatatggtcataaccctagaaaatgagctcatggtcaatagctataaaaccattgatgggagaggggcaaaagtagaaatcgcatacggaccatgcatcacgatacaagacgtgacgaacgtcattgtgcacgggatcagcatccacgactgcaaaccggggaagtacggtatggtgaggagcagcccgacgcatgtcggtcaccgtaagggatcggacggtgatgccatcactatttttggttcgtcgaatgtttggatcgatcattgttacctagcgagttgtacggacggactcatcgatgtaatccatgcttccacggcaatcactatttccaacaactacttcactcagcatgacaaagtcagtttcagtttttcaaaatcattaacatagctatttaatgtcttgggaagttaatatcacattttgatattggttgttatatatgtataggtgatgttgctcggacacaacgataattttgtgaaagatgtgaacatgaaagtgaccgtggcattcaatcattttggaccaggacttgtggagagaatgccaaggtaattactatttaattttcctttcttttttcatctaaaaaactaaaattatttgcccaaaaatattagaataactattaagaatttttagagcagaattagaaatgtaatgatgagcctaccaaaaagacatgtaatgatgtaaaaacgtgtggtggctgcagggtaagacgaggctacgctcatgtggcaaacaatagatacgataaatggataatgtatgcaattggtggtagcgccgatcccacnnnnnnnnnnnnnnnnnnnnnnnnnnnnnnnnnnnataaaccttacagcaaagaggtaa

SEQ ID NO: 165160 - DNA, 947 bp, Arabidopsis thaliana landsberg
acgtcaatctccatggagctagtccatctctagattttaattatgaggtcagcttactcgatcctgactggaggaattcagcacctcagttcaatatagatcgagtctttcactgtgatggcttgttgttatgcacctcccaaaaagattcaagattcgtcgtttggaaccctttaactggtgtaaccaagtggattgaactcggcgatcgttacaacgaaggtatgacttttattcttggatatgataacaagtcctgtgataagagctacaaagccatgagctttaattatttagacaaggattctgaaatctacgagtttagctctgactcatggagggttattgatgatattatcaagccaccccactacatggagtactttagaaaatgtttgtctttgaagggaaacacttactggttgggtatagatagaagacgaaggccaccggaccttcgcataaccttgatcaaatttgattttggaacagagaaatttggttatgttcctctgcctcccccctgtcaagtgcatggttttgaggcttctaggctttccgctgtgggagacgagaagctttcactgttactagtgggagattctacatcaaatactgagttatgggtgacaagtaagattggtgaggccaatgtggtgtcgtggagcaaggtgttatcattgtatccgaagcctgacgttggtttttggcatggcctaagtttcttgctagacgaggagaagaaagtcgtcttgtgttgtaagagtaagggatggatggaggaagaagacgaggagaatgtttacagtgttggggaggatactaaattcatactactgaattttggagttcagacaattggaggatattcgccaattattgttaattatgttccaagtttgggtcagatcgagctagctggaagcaaaaggaaaagagattactaa

SEQ ID NO: 165161 - DNA, 635 bp, Arabidopsis thaliana landsberg
caactctcttcttacttctctagttaactcagccacatactcttcctacaacaacttcaccatcatgggctcttcatcctccgacacagcacgtggcctcttccaatgccgcggtgacctctccatgccgaactgcgccacgtgtgtggcacgtgccgtctctcaagtaggtcctctttgccctttcacttgtggtggagccctccagctagctggctgctacatcaaatacgataacatcagcttccttggccaagaagacaagaccgttgtcctaaagaagtgtggatcctctgagggttataataccgacggtatcagccggagagacgcagttctcacggagctagtcaatggcggagggtattttcgagccggagggtccggtgatgttcaaggtatgggacaatgtgtaggagatctaacggtgtcagagtgccaagattgtttaggaacggccattggacggcttaagaatgattgtggcacggccgtcttcggagacatgttcttggctaagtgttacgctagatattcaactgatggtgcacaacattacgccaagtctcataattgtgagttctctctacttactattattagtaggaaaactttcaaaaataaaatgttttgtt

SEQ ID NO: 165162 - DNA, 2735 bp, Arabidopsis thaliana landsberg
atggttagagttaagttggtaagatttgggtatttattacatatgatctcttttgtgtttttgtctaataatactttgggacaacaacaagacgatgatgatgattctgctgtgtacattgtcacacttaaacaacctcctactgttcatcgttttgaagaacaagagcttaaacacaaaaattcaaagtttacaccaaaattgaaaccaaggtactgataaatttgattatttttgttgtcactagatgatagctttagttaaacctttttgtatcggtttttctttttataggaacaatgcaaggaaacgtcatgggaagtcaaagataccatctgttgttcaatctcatgactctttcttgagaaagactttaaaaggagagaagtatataaagctttatagttaccattatcttatcaatggatttgctctgtttattaactcacaacaggtaaaaatcttgagttattgataattgtagaaataatcttgagttcttgatcttgatttttttgtgttatggtttttattttctaaggctgagaagctttcaatgacaagtgaagtagcaaacatagtgttggataactctgttaggacagcaacaacttatactccacagtttatgggtttaccacaaggagcatgggtcaaagaaggtggatttgagattgctggagaaggagttataatcggttttatcgatactgggatcgatccgaatcatcctagtttcaatgacaatgactctaagcgttcatatccaatccctaagcatttctcaggtgtttgtgaagttacaccggactttccatcaggatcttgcaataagaagcttattggagcacggcatttcgcgcaatccgctgtaaccagaggaatctttaactcatctgaagattacgcttctcctttcgatggagatggacatggaacgtaagtgtaactgttgaatgtatcatataaaaacagagtttgaagcttatagattgttgctttggatatatatgcagacacacagcttcggttgcagcgggtaaccacggagttccagtgatagtttctaaccataactttggatacgctagtggaatcgctcctcgtgcattgtaagtaaaataataagacttagatcaatgtcgaaatctatacaaaactaacttaaacttttatgtttttgaactttgttttcagtatttctgtttacaaggcattgtataagagttttggaggttttgctgcagatgttgtagcagctatagatcaggtttacaaatcaagaaactaaatgtgaataaacattttagcttttctttcaaatatgaagactttaatataatggttgtgattttttttcaggcagctcaagatggagtagatatattaagcctatcaattacaccgaatcggaaacctcccggtgttgccactttctttaatcctatcgacatggcattactttccgctgtaaaagccggaatcttcgtagtccaagctgcgggaaatacctgtccagcgcctaaaaccatgtcttcttttagtccttggatattcaccgttggtgcttcttctcatgatagagtttactctaattctttaaccttaggaaacaatgtaactattccaggcatgggattcgcaagtaagtcattaccatctcaaactataactttcaacgattcaagtcgaagattatggatttataacttgtgtactttgtttctttatagttcctacggatagtggaaaaatgtacaagatgatatctgcttttcatgccttgaacaatagtacttctgtagataaagatatgtatgtaggtgaatgtcaagattatgaaaacttcgatcaagatcgtgtctcagggaaacttttgatatgtagctactctgctcgttttgttctcggtctttcgactataaaacaagctttagatgttgccaagaatctatccgcgactggtgtgatattctatatagacccgtatgttcttggttttgagatcaatccaacaccgatggatatgcccgggatcataattccatctgtagaagattccaaggtgagaaaactaaagcatttgtttaaaggtttatacaaagtttctaatgatctaaagatatggttttcttgcagactttactcaagtactataactcttctattcaaagagatgtaaccactaaagaaattgttagttttggagcggttgcaaccattgaaggcggtttaaatgctaactttagtaacagagctcctaaggtaatgtattactcagcaagaggacctgatccagaagacaactcttttaacgacgcagacatattaaaaccgaacctcgtagctcctggaaactctatttggggtgcctggagttctgtttcaacggattcaactgagtttgaaggtaaactatatacaagtgatcaaaacagaggatttttctactgactttttgttctgttttgctctgtttaggtgagaaatttgcgatgatgtccggtacaagtatggctgctcctcatgtagctggtgtggctgcattaatcaaacaaagttacccacagtttgctccttcaacaatcgcatctgcgctttcaacaacggctctcctaaatgataataaaggcggtccgataatggctcagcgaacttattccaatcccgatcaaagcctctataccgcaacaccgtttgatatgggaagcggttttgttaacgcaacggcagct

SEQ ID NO: 165163 - DNA, 5050 bp, Arabidopsis thaliana landsberg
actgtcgacatgacttataacctggagttcttctgcaaatacccatggggaagggtgtcctttacccgtactttggggaggatagcaaatttccaaactccttacgatgctcaacaactaataaggggtttacttgtagggtcttatgcactccatggcttcccattagctctccagcttttagttttcgaaacaatcccatcaattgctaagctaggacctgatgatgtacctaacaggacatttgctgagaggtctatccatcgtcttgcctctctgcgagcaatccggacatctcgcattttggagtgtgaggctgctgatgaggtgtgttaaattgtgtatgtacgtacataataagtaaatgtacattatctatggttaatatacttatttgtgtaggttgaggtcaactatattgtgaaaccagctgataatgtttgtcctccatctctttcatgggatgatgaagttgatgatccaagggttgattacattgaggcactgttgatagatgggcaccagtggcaggaggatgaatgggttggaggctatgctagagtaccaaagcaggtgcgcccaccacaactagaagagacaggtaagtataagtataaaggttgtttacaaatttttttggtattgcacccagaagaaacccaattaatagcagcaactggtctattgtagatgttaagagaaaacgaaatgcaccgggcccgagccctaaagaacctgctatgaaaaaacagaaatctgaaatggactgtgataaagaagagaacgctgaggattgttttggagagcctgtgcctgagaggtttattgttgaaatgaggaggtctttcaaggagttggaagaccaaatgtatcaaatgcatgaagatatgaaagactttgtccgtgaccagatacgtgctgcccttgatccaaaaagcaaaaggccagaacaaaccataccttcccatgattcgcgggaaccacctacttctatggataaggcaccggttactgcgaagaagctatcgagaaggatatctacaaaaggaagcactggaacgagaaagtcttcaaggctgactcgtgtttctcatgatgtggacactcctgcactttctgttggctgtaattccaaagaggaagatttggatgtccctggagtacataccactgttgtcggcggaagaagaaaaccttcaaagccgaagaaaaatttttctttttgctgttgacactactgagctacctgattccaataaggaagatatgcaaggattcattgatgaacaggtaagtcatgtacgtacattgctaaatattttataatccatatgtataactgtactgtctgcttcgatacagtatggcgctaataatgaaagtgattttactgcaaatgatggattggattcttcggccgctgaagaagagatattagacactggatttttaatagttccttatgctggatccacacaatcccatctggtatgtcgtctactaatactcttaacaatctgtttaaatggtgtacgtacatattcgcttaaaaagttagttaaactatgtttcaggatagaggaaatattgttgttggtaagactgtcttcttaggttcaatgtctgggactgtctatgttacacaggaagagaggcctgtggaagaagctactgttgacactgagatggaagaagttccatctaatgtgtctgcaagagtttcagaggtagatcttctggtaatcgttatatacagatttccatgactatatgcataactattacattaatttcttcacttatctaacgcttaactctatggtagcctatgtttcaggataatggaccaaaggatgttgctgaacctggcttagttggtacccatacaggggccgatgaaatagctgatgctgacatagagatggtagacaatccatcaggtttaccttcaacatctgcacaggtatgtgttagtcacttgttctttttccatatgtgtacgcccataaaactttgcaaattatttttgtttcaggatgaagcaagagatgccagtgcatcgactgaagctaatggcagcgagtcagaagaaacttatgagccttctgatggagacacagctcacgtacctgccacaagtgtacgtacatttttgtcactatgttctgtgtacatatatattgtttcatacattactaaaaagcatacattactaaaaagtttctttccgatgctaaattctacaggttgaggcggcaggagaatccaaattagtgacagtgatggaagttgaaatacctgagaagacccacagtgatcccccgtcaccatttcaagtagttcacaatgtaagctaactcttgcaacaaataaaatgaactattaactgttcaaatgtataaaatttatattatgcaggtcatacgggagttggataccaaaggctccgttaatttggatgcaactaatgttatcgaggtaacaatttgtgtgtttcaattcctacgcacttattagcatacataggattatatgtgtacattatagagacttgtgtacgttaacttctacagggagtgttggaagagccggatattgtcgacgggtctagaggaaatgaggatccaatgttgggaatgtcctgaaatcagttgtactttactctagttaaagttgtaatgtcgaggtttgatatttgtataatattaggtggttataatgttttgctagaaaccccttataatctatgagttataactcattactaatattatacaaacctacagggtcacacacctaagcaaactggatcaataaaaagagttattgggctttggcccattattaaccctaattggttagggttaaacatttggctatatatatgatatattagcaacttttgtgagatacacttttgatctcaaaaacctaaaaatagagagacaaatagtttgtatgagttttgagattagatctcaaaggaactagcattccagatctgatgcagtttgtgtgcgtgtgaaaaccggtaaaggcacaacacttggggtgctaaaacaaccgtgaaacaatatgattcatctttccgctgcagaatatccaggtatattcaaaccctttgatctagatttaattctttgtttacacagttcctggcaattgaatttgtgattagttttataaatcgttataaacatggtacaaattccttcatccaaacccaaggtcagatgaagcagataaaaccgtccctattcctaaaaataatgtatgtatctatttttaccatgaacgtattatagaaaaacgaataaaacagttgttgacaatcatatttgtttatagaatgaatcagacaatgatgctgcagttgaagtaaatcagacaatcatatctttttacttacttaagcttgttatcaaatattttacttgatttacaggattcacacacttttcggtttcgcaaagtggacaacgagttttttgccaagcttataacacatagtgtatgggtcggaagttcagtacgttgcattaatatacgtacactacttgccaccatgtatataaaatctacaaacatggtaaaatatgatgaataatgatttgatcatttcaacatttaaaaatgatggcaatgttgatgtggcacaagaacggtgaacaaatgatagcaaacagatgtattgtattggacttcttcctgctccatgaacttaccaagcgggttgtcgacttcaggaagtgtattaataagaacggattcaaatggggcaaatttctgtccgacaatgctaatggagtacacataaaccgtgaaccccctattaagtggctaaaggatgtcgattcgtatatgctccgatgaactggaatcatgaacattggattgctttgggaatcaacctcaaagaacggcgaataactgtgtatgacgctttaatatcgcacatgcgtgagtcggttgtgaagtcgagaatgactcatatttgcaaaatgatgttgttcttagttagagcggtgtgctaggatgtattgacttctgcgtactcaattgaactttttgagcatgaacgttgtttcaccgttgctcaaaccccaactactggagattgcggtccatacacgatgaagttcttggagttgctcgcgtttggaaaccctttttcagacctgttcattcggaaaacagacatggtcttctaccggtagaaatactcggtggatatctacgagcacggaaagcgcgaggagggtactgtgcatttattataatcgtctgtctataataatatgtaccttacacttattattttgcacaaacctatcttagattgcaactacatttaagtttggagcttgtaagaacttaatttagtttctgttatcaatctcttcttgtacacatcgtacacttctcaaacaatatgtattgtgtacgtacacgtgaaaacatatgtctcccacatatatctatatttctcatacacgttaaatttactttctaacataactaaggtgataaattgatttgacatccaacgctgaccaacacatatatgacatttaattcaaccgtaattgccccaactaaatccacagtagtggttattaaagtgaaaaacttaatgacgatctcggagtatctcatttcaaacatggttaacccgactcttttcaatgatttactctcgcatatagctaagaacatggctgacaaatgctggtcagaccttggttcactaatacgatcagacactcgcggaagagacattgtctaccgtccggatgtcctcaaagatgccaatattctcaccttgtgtagcgatcccaatgacttccaagctggagggggccataattcctccggaatcgctgttgaaggccgacatcgaccatttttcttaaggtgttttgacagctaacactctcacggccgtgtattacgaaggtattcgtgttctaacgcatgaacgaaacatctatggagccatcaagctcttacagcgtcctgctccacaaccagtcaatgccacacttgcatg

SEQ ID NO: 165164 - DNA, 5793 bp, Arabidopsis thaliana landsberg
atgaacttggacaaggcggctgatgcggaagattcggtgtcggcggaggttcgtcgtgtggttcgtcggtggaggttcgttgtgttgttcgtcagccgaggtcgtcgtcagagaagagagaaggagagaagaaaacttttcgagagaagaaaggagagagagagagagagaaataaagagagagagagagagaagtttgtacttaatgagatgagaaaaagttttttgaattgaaattgaaatacatagtgtgaacacatagtgtgaacgcatagtgtgaacacacaatagtttttatggtaattaaagtggaatgcgggcccagacaaaatactgcgcattagccatagttgtgccataagttattcagttgtcccgtactcaatttatttgtactttgtggaagttttagtatttagagttggatttcattaagggaattaacttttagttggacagatgatataatatgtttaataataagatatcatgatttagttatataagtttccaaatatatgcgttttgccatgtttatgtcaagatggtccaacatgatacaatgcataccatataatgtaagaagtgttttcagaattggtaagtataatatgttcaattgttttttagattgtatgataattagtataagtgattaataaatgttccagaataatgtatagaaagattttccaagtatgaaactttttctttataattatgagaaaaattaaaaaattgcctcatttttaataatatcatattttagtagataaaataaataaactgtatttgtctcataaatagtaaaaatatattaaaaatacagcttcttaaaaatttccatttaatatattagaaataattatagttttaactaaaagtagagagaggtgtatttttcatacaaaaactataaactggatagttttcatacaaaaacccatatttttgatataataaaaatatttaaattaaattaaattgaagcaaatttaagtaaaaaaacaatactaaaattatatttatttcttatatatataggaggggttttattgtaagagataaacatgaaagaactagtacatacggtacaagtacaaggtacatacataataacacttaacaaaattccaaaatacttaaaaatgaagcaatagttcagacgacacaagtacacggtacagacataacaacacaatacttaaaaaaattctaaagtacttaaaaatgaagacataatacatgaagcaatagtacatacagcacaagtacacggtacaaacattcaactcctcataattaacaccaactgaacttcttccctctacccttgaaatttgtttcaccctctcagattctttatttactacctccacgttcaaagctggtctaattcccttagcattcactaccattagataacctaaaaaatcatcatcatctacaatagatgtctctctctgagatgtacatagaatataactcaatttcaccttccttgaggtttcatctatttcaatcttcttgcatatcttttctactaacatagagtatgttacctttgacgtcctcaacaatacaccgcttaaagaattgtttgaaatccactcatgctcttctaaataatacccattttcaaattgtatgaatgtgtgcttgttcttcatcatctcctgtaattacaaataaattataaaaacacaattacgtaatcatttagatttagacataattatacctatattataactcactataccatttgtaccacctgtcctattgtatttcaataaaacatttgtaccgcttatactatgatatctcagttttaccatttgtcccagttcgtcaattctgggtttcacaaatcgtaaatttcgattgaatactcactaaactctctgatttaaaacgataaaacagcccagaatgaacaatacaacaattttatgttatgaacaactaactccaacaaaaaattcacattaatctacaaatcaaaacgagatcggatttacttttgccgttgaagaggaagctcactttgggagcagattatcggcttggaagctacggcgatatcggaagctaactccccggtgaaattagagctcaaatcgccggcgaaatcggagctcaagtcgccggcggcgaagtcggaaaaaatcacgtctgaagttgtcggagagaatcgcgggagcaacgaccgtttttctttttttttttactaaatgatttactctttattttgaattctccctcagttattcattaaggagagatatgtaattacacatggtcgagtggtactcagaataaatggatggtactcagaatagatttttcaaaatgatggtagaatagaacgtggctcggaaaaaaagggaagaatttctattctgccatgattcggaaaaaaaaattctattctgccatccaaataaatcaatttctttttgatttatttttaagtagagaaatagagggattttacgaaataaccttgttactttaggaaaactacatgacccaaccacatgtagacggatagctccactgtaactgggttttcccccaaatcgtcagtttttaatctaagtaatttttttcaaaaatcaaaattatcgctttcttctccgattaacctaaacggcgatttgttccggcgattctcgaaaattttcgtcgctttctttctccgaccagttcaccgtcaccggtttcatctctgcttcttcaccaaacgattttttgaatttttttaacctaagtaacattttacaaaatcaaaattgtcgacatccactttgcaattccgtttagccgccgttgcaattccgccgtgaccggtgctgttccaaaccgtcgtcgttccaaaccaccggcgttccaaattgtaagtgtagattggaacggtttttgatttttgagtggttttcgttgtgttgatttgaacggtttccttgattgttgagtggttttgcaaggtaatcatgggtcgtgtaaggttagtcactcctagttcgagtgaaagtgaagacgagagggtcacgatcatccgtgaagcggatatgaaccgtgaagaagttgcagccgaagaaaacaaatttgaagacgaaaactgtgaacaagagcctccgaaaaaccttaacgaaccggaagaagaaaagatttctgaggtatatacaaatttatgaaacttttgtgtgaatattgatgtagtgtttaggtacaactagaaaacaatgagtacaagttaatagtataggtctgtgtaattggtgcatggatatacgtgattaatcatacattgggttgcattagaaaattgaattctgaaaaaagttgataatgttgttctgagataactagtacaagtagtacagcgaaatattaattgtatggttgtgtatgaattttcagaaagttgatgatgaggaaccaatgcagtctcaggggatggaagaaaaccctgaagaagaggaaaaagaaggggaagaagaagaagaatctgaggtaaatggttatttatgtaaattgtgtttgaatattgaaagtagtgtatagggacaactagaaaacaatgagtacaacttaatagtattggtttgtttgattggtggatgtatggatttatacgtgatcaatcatacattgatttgcattagaaaattggattctgagaaaattttataatgttggtctgagataacgagaaatattaattttatggttgtgtatgaattttcaggaaattgatgatgatgaaccaatgccatctcacgggatggaagaaaaccctcaggaagaggaaaaagaaagggaagaagaaaaccctgaggtaacattaatttctgaatattttgtttgaatatccattgaaagtagtgtatatggacaactagaaaacacttaggacaacttaatagtatagtttcaacttatgtgattggtgcatggatttatacgttaacgtgatcatacattggtttgtttgattggtgcattaatttaattgtatgattggtgcatcaatttaatacgtatagtttcaattctgagaaaagttgataatgttgttatgagataactagtacaagtagtacaacaaaatattaattgtatgtttgtgtatgaaatttcaagaacttgatgatgaagaacaacctatgcagccagagaggatgttctttagtccaagcgaatacgtgaagacgtgtaagatagggacgagatgcactgtgcaacagacagtgaagtatttggaggagtttaaagaagatttgccatggttcaaggcgcatccacagtttaggcatgtattccacatgcctgaggagaaaaaccacatgacccaaggcttgtggatgcttttgcttcgtacagcacagacagagatggatagggagtgctggtttgtggttaatggagtgcctattaggtactccattaaaaagcatgtgttgttatgtggtttcgattgtcatgattacccggaggagttgcagccgagtatgaagatcgtggatgcagatttgaagtttgccaaaaagatctttaagaaggtatctgagattaagatcgttgatgttgagaaaaagttggatgaaatgaagaaatgtggagaaaagaagaagacggataggaagaagttggttatcttgctttttttgtgcaaggtgatcgaggccaagtcaaaggttgatggaaacattgacaaattctttcttttattgttgatgatgtgcgtgcatgtgagacaggcccatggggtcgtttcacatttgatggatgtatggaaggtattaagtcggtaatgaaatccatgaaagggaaagcaaaactgcagacttgtttctccggatttattcttccattagaggtaacaatttagagtattatatatagtgagatgcattagtagacttaaaaataatactaatgtgacttttactttgaatgtgtagattttgccttttgaggctattccacatttgggacaaaagtttagagaccctgtaaggttcgagaatgagtgtccgagaatgtgtaaggccaaattctctagtagtgtcatgaaagggttctcgttggaagagataaacgaggagcttgaaagtgtaaaggtaagagttgtcccagttatctctagcgttgtcctagttatttctagagttagcccagttatctatgagctagaatatgattattttttatgtttgaatttgtataggttatctctagcgttttggaatcggattacgaagagaaagatttgttgaggcgcattgtagatggtgatgatgttgatgatgggatagggtttgttgatccgggtgtcgatagcctgttgaaaccgtttgatcaaagagaggaagagaattttctggaaggatatgtttgaagcggatgtccatgctcgaagcggcgagcaaatggaggaagagaatgctccgagacatgttccagatgttccgggcagcagtagctcttgctctttgaaggaaactattgatgaaggctttaagagagtgatggcgatgttggcggaacacaatgaaaggcttgtaaccattgaaaggagacaagccggtgagagtgtgcctccatttgagaagagggtccattccgatgtcaataaggagaaggaagatggtggtaagaatgagaagaacgtggatgtggctgttgagaccgaggctagtgttgagcccgaggctaatgagacccatgatgttgagaccgacgctgttgaggtcgcggctgttgagcccgaggatgttgagaccc

SEQ ID NO: 165165 - DNA, 2617 bp, Arabidopsis thaliana landsberg
atggataacatcaactttgaattctcaaacgcttcacaaggaagccggctacagttgcagcaacaaccgccccagccgtttaatttacaagacttgaatatgattcaatacaatcaaccatcatctccttggactacggagaccttctctggtctaactccgtacgattgcacagccaatcaatcttttcccgtacaatgttcatcttcaaaaccctacccttcctcgtttcatccgtaccatcatcaatcttctgattctccatcattagaccaatctgtatcgatgattcctatgcagcctcttccggatcaatatatgaagccattatatcaaagatcttgctcgaacgattttgccgcaacaaatgcttcatcagcctcttactcgctttcttttgaagcaagtcatgatccacaagtatgccaaaaaaaaatccatctaattttttttcttacattttttttaagacaaatatgatcctatttgatgtttttaatgttctcgtcaggaactatgcagaaggacccatagtaattctaatgtaacacatcttaatttcacatcatcacaacatcaacctaaacagagtcatccaagattttcttctcctccttcattctcaatccatggagggtctatggctcctaactgtgtgaacaagacacggataagatggactcaagatcttcatgagaagtttgtggagtgcgttaatcgtcttggtggcgctgatagtaagtcaataaccattacaagattttctcaacgatttgattgagctagtcactttgtatatataaagtcatattacctagtacatgctacaaaggggaccaatttaacttgctttggtcttcggtctgaagaactcactaaaacttagaacttcttggttacccaaaaaaagttgttagatatgcatatgaatcatgattggtcatgaataataggtgaatagaatataattgcatgagatcaaaagtcatcttacgcacatgtggattaataatttcctcttttgagaaaattatgttgcattatttaatttggatagatgtatacatctttcagtaaaagtaattacgtaattgttgtaaggatatagtaacttgtttctttggtgggtcactgataaatgtaagtggtcgaaaactatgcagaggcaacgcccaaggcgatattgaagcggatggattctgatggactcacaatatttcacgttaaaagccacttacaggttacggttacttcttctctcttttcatttttttttccaaagaagattttattaaataaaatttggcttttaaatctcatcagaagtatagaattgcgaaatacatgcctgagtctcaagaaggtacactaataaatctctgcactaactttttttggacaaaaataaaaattgataatttgggaataacacaattctaaagagttttgtgttgcaggcaagtttgagaaaagagcttgtgcaaaagagctgtctcagcttgacacaagaacgtatgtttctcttcatttttttggtgtgtcaggaataattttttctttattatactaactaagcctctatttttccttcatataaatccaaagttattgaccaaatggcttagcgtagcaatagcaacacgatacgattaagaattattcgaaaataataaataatggcttgttaataatgattttctttttgtaatgttgtggaggcagtggagtgcaaattaaagaggcacttcagcttcaactagatgttcagaggcatcttcatgaacaactagaggtaagttacaaaatgtaactatataaatatattagcttgctttattatataattaagtttctttataccaagtaaatataacccaatgttacattatggcatttagtgcttccaaccaaaacaaaatgaaggctttctagcttagagattgtatatttgcatgtgtgaacattctgtggctctcctcactttttatgaactattcactgataattatttacatagatatgttttttaatacaactctcatgattgatgtgcctttctttttttagattcaacgaaacctacaactaagaatcgaagaacaagggtaccaactgaaaatgatgatggaacatcaacagaaaatcaaagagagtcttctgaagaagctaccagacgctgaagcatcattgtctcttctcgatccccatattcactctcctccttcgcctttcttggtacacgacgctgaagccctgatgctaacaagttatgaagacactcaactccagtccaccaaaagttgaaaaatgagatactctggctaaattagaaaaggcctaaagcatgcttctactctattcaaagtggtatatagttataagagtcgcgacaagaatgtccaaagtgctacacacactaacacttggaaacagaatcaggtactaaatgtgagcaagtggtgtgtgatggggtcgatctctgtcatagactaatagatgtgtgagattattcttaatgaactattttgaagttagagagcaaaactcatacaaagagatagcttctttaattagtcacgctgctttttaacattgtgaatgaggaacggacccccgc

SEQ ID NO: 165166 - DNA, 692 bp, Arabidopsis thaliana landsberg
gcttgagatcaacattgattacttggtgaacacttcgttcctcaattacattgccgacaggttctttctaaaccctaaaactcacaaacacgcaaattttgtatgaattgtgatatgtttaatgtttacatagtattcaataatgtttatcggtatatattctgcgagtaactcgagaacaagtcttattgatcatgttataattctctatattgtagatcaagtaatctgagacggcttggagttgttgacaatgctccagtattgagcagtggagttgtcgaagcagcgatgaagctcacattgcttgaagaacttgatattacatacaagtcatcaatcagagaacaagagttaaaagttgtaggccagtcttgtccaaatctgaggacattaaagctaaactgtacgggtgatattaagtgttgtgataaggttgctctagcaatcgctgaaacaatgcccggtcttcgccacctccagcttttcaggaacggattatccgagacgggcttgaacgccattcttgaaggttgtcctcacctgaaaaaactcgggttacaccagtgtttaaacattaacattgtaggtgatatagtgaagtgatgttttgagtggattaaagttttgagacgcccccatttagttcatgagaggtactgctagattcagttcgtttgtttgtaattctc

SEQ ID NO: 165167 - DNA, 400 bp, Arabidopsis thaliana landsberg
gacgaccggcccggacggtccgcacgcgacgcccttgtggttctactgggttggccagcacttctggctgtactcgatcacgttcgcgcagcggtgggccgacctgatgcgcgatccgcgcatcggcatcaccgtcgacgcggggggcgactacttcgacctgcacggcgtcgagatcaccggcaccgtcgaggtgatcggcgaggtcccgcgcaccggcgagccgaacgagcagctggccgcgatcgagccggcgttcgtgaagaagaacttcgggctggacgagatgttccacgaccagaagcacgcctggctgcgggtcaccccgtccaagatcgccagctgggacttccgaaagatcgctgcgggcgcctcctcctgaacttgttgtcgcggtgtg

SEQ ID NO: 165168 - DNA, 1902 bp, Arabidopsis thaliana landsberg
gtgtggttaaagatgttggtgatggaagttatgctgttacttatgttgtgcctaagagaggaaactatatggttaatattgaatgcaatgggaatgctatcatgggaagtccctttcctgtcttctttagccaaggtaatgaatcttatcgtttccattgatgtttcgtttatgtatataggctttgtttgatggtaaaggtgttgtctttatggaattttgtaacagggtcttcttctactggactgatgggttctgctccagcttcatactcgaatcttataaatcaaacaatgccaaacatgcctaattacactggttctgtttcgggtgctttcccggggttgttggggatggttccagggattgcatctggtccttcaggtggtgctattttgcctggagttggagcttcacttggggaagtttgtcgggaatatcttaatggtagatgtgtgaactctatgtgcaagttaaaccaccctcctcagaatttgctgatgactgctatagctgcaacgacaagtatgggtaaccttagtcaggtgcctatggctccttctgctgctgcaatggctgctgcgcaggctattgttgctgcacaggctcttcaagctcatgcttctcagatgcaagcacaggctcaatcaaacaagggatctttaggtactgtaccttttgttgctagtctctcgatattcatctctattttttctttgggtctcaagttgaatatcattagatatttatttagttttctcgatactcatgagttctactagcttttggtttaggttccccagaaaaaggagaaaacggggatttgaagaaatttctccaagttagcaacctaagtccatcgcttacaactgaacaacttaggcagctatttagcttctgtggcacagtagttgactgtagtataactgattcaaagcatatcgcctacatagaatactcgaattccgaagaagcaacagctgctttggcattaaacaatacggaagtctttggtagagcattgaatgttgagattgcaaaatcgctacctcacaaaccatcttcaaataattcttcgtcctcactaccactgatgatgcaacaggccgtcgcgatgcagcagatgcaattccagcaggctatactaatgcaacaagccgtggctactcagcaggcagcaaatagagctgccacaatgaagtctgccactgagcttgcagcagctagagctgcagagataagtaggaaactgagacctgatggagttggaaatgatgaaaaagaagctgatcagaagtctaggtgggcatccaataaaaatctatagacgtttctctctattacctatggcttgctcctttctctttttgataacgttttcatctgaactgatagtcacctctcttgtgcaggtcaccatctaagtctcctgcaaggtcgagatcaaagtcaaaatcaccaataagttacaggcgaagacggagatctccaacctattcaccaccgtttcgtcgcccaagaagtcacagatcgagatcaccattaagatatcaacggcgatcaacttatgaagggagaaggcggtcatatagagattctagggatatttctgaaagtaggagatacggtagatcagatgaacaccattcttctagttcaaggagaagtaggagtgtaagccctaaaaagagaaaatctggacaagaagattcagagctgtcaagacttcgacgagatagctcatcacgtggagagaagaaatcatctcgtgctggttcacgatcaccaaggcgacgtaaggaagttaagtcaacccccagagatgatgaggaaaacaaagtgaaacgtagaacacgttcaagatctagataagtgaaagattctgcagatataaaggataaa

SEQ ID NO: 165169 - DNA, 490 bp, Arabidopsis thaliana landsberg
  unsure (1)..(490): unsure at all n locations
tattttaccatgttgaagatcccggtctcgggnnnnnnnnnnnnnnnnnnnnnnntcaccttcaataaagctttttgcaataaggtagtcgccgccttgcacgtagtcaaggtgtcccggtccatccatctgtttcaagaccagcctttttcagaaagcaccctgacccgcgaactgaaatttccagtcttcgtcaaacccgccgaagggggatccagtcttggcgtatcaaaagtcgaggcaccctccgaggccttgggagaagcgatccgccgagccttccgggaggacggccaagtattggtcgaagaatacatcaggggccgcgagctgacctgcggtttgtttcgtgcggggggaaaactgacgaccctaccggtcacggagatcattagcggaaaagagttttttgattttgaggcgaagtacaccccgggcaattcccgggaaattactccggctcccatcgaagaaaaggtcagggcattgg

SEQ ID NO: 165170 - DNA, 2120 bp, Arabidopsis thaliana landsberg
agaaatatcacgaagctagggataactccgaagttcaaaactcaaaaaggccaaggttgaccaacgaagaagaaccaaggagttcgaaggggaaaatcaatgtaatccttggaggctccaaactttgccgagattctattagtgcaatcacaaagcataggcgaaatgttctacttaaatcaagtttgagtgaagaagttaaataccaaggcgcttcaatatcatttgacgaggaagaaacgcggcaccttgaaagacctcatgatgacgctctagtcattacgctggacatggctaactttgaagtgtcaagaattctcgtcgatacgggtagttcggttgatttaatctttataggtactttggaaagaatgggaattagtcgggtagacatagtgggaccttcatcacccttagtggcttttacaagtgaatcggcaatgtctctcggaactatcaagctaccagttttggctggaaagacctcgaagattgtggattttgtcgtgttcgataaaccagcagcctataacatcattcttggaactccgtggatctatcaaatgaaagcggtcccttctacttatcaccagtgcctcaaattcccaactccgagtggagtggaaacaattcggggagatcaagaagcttcgagaacttgttatttagctaaccaccgattaacaaaacccgcaaagaaaggagtgatcccgagatttcctagcgggcagaaagtagatgatgtcgtgatcgaagtaattctagagcagataaaccagatcaaaaagtccgaatcggagctactttatcgggcgaagtaaaggaagccttgattgagctgttaaaaaggaacaagaaatcatttgcctggtcggcagcagatatgcttggcatagatccaaatataatttgtcacgagttaaatgaagacccgagtttcaaaccggtgaaacaaaaaagaagaaaactcggagtggagagagcaaaagcagtaaacgacgaagtggataaacttctaaagatcggatctataagggaggtgcaatatccggattggttagcaaacaccgttgtagtcaaaaagaagaatggaaaggatagagtgtgcattgactttatagatctcaacaaagcttgtccaaaagatagtttcccacttccacacatagatcgtcttgtggagtcaactgccggaaatgaattgttatcctttatggacgccttttcgggatataaccaaatcatgatgaatccggaagattaagagaaaacttcatttatcacagataggggcatcttttgttacaaagttatgccattcgggttgaagaacgcaagagcaacttatcaacgggtggttaatgagatattcaacgaacatctcggaaaaacaatggaagtctacatcgatgatatgctagtcaaatcattgaaaaaggaagatcatgtcaagcatttagaagaatgtttcgctatccttgaccaatatcaaatgaagttaaacctggggaagtgtacgttcggagtcccatctggtgaattcctcggttatattgttacaaagctaggaattgaggcaaatccaaaccaaattaacgcctttctcaatatgccatctccaagaaatttgaaggaagtacagcggttaagcggtcggattgcggtattgacctgtttcatttcaagattaaccgataaatcattgcctctctatcaaattttaaaagggaacaaagagtttctttgggatgagaaatgcgaagaagcattcggacagctcaaagcatatctgaccactccacctatattgtccaaaccagaagcggatgagaagctttatctatacgtctcggactcgggccatgtagttagcgtagtcttgatccgagaagaccgaggagaacaaaaaccaatttattacataagcaaatccatggcagatcccgagaccaggtatacgatgatggaaaagcttgcgcatgcagtagtatcctcagctcggaagcttcgcccgtattttcagtctcacccaatcgaagtcttatcaaatcaaccgcttcgaacaattcttcatagtccgaaccaatctgggaggttggtgaagttggcggtggaattaa

SEQ ID NO: 165171 - DNA, 967 bp, Arabidopsis thaliana landsberg
agcataataaatgtttctctctgtttcttcgtgttcctgatcctgatgatttgccttctggttggaaaagacacatcatatatcgtcgtactggggttaatcaaatgtcggagaaactctccaaacaggaaggtgagtttttcaacttttttctacctttggtagattatgtttctaattaaggaggataaaggaaagtcaatattttatggttctacttgtcatggactcataggacttgtgttgtagtgagaacctatgtatgtgttgtgcaatgcttgttttaactaaatttctaagtttcgtgactttacagtagcacaaggctggttttatagaaactctcatagcttaggttcccaaacaatgcttccccttaacgaatttcttgacgtaaatggcgggtttctggggaatggagaagtcaagattgttgccgaggttggtcttcttgaagttgttggcaagtcagatgtgttagtggaaactttattagttcatgaaagcatcaatgtcaatgtttttcaaattcttccttcacaggtaagaaaagtactcgtagctatataattcactttcttgtacaagctgcatgaatgtatgtagggttttactttattagtccatgtatcccttgcaggtagaatctgtgaacaatctctttgaaaagcacccagacattgcatcaaacttccgtctggagaacccacatctaagaacaacatacttgaatagcctactatgcttgactgagattctaagccagtccactgagaaaatctccattgttgatctcgccaatgcacattctacactatcttatctgacaaaagccggttttaagttggattggttggagaagaaactgaaagagcttggtaagactcggatgcaacaacttgagcaaaatttgaaggacttgaaggaattgaagcaagagttctgacgatgacttgagtcaattttt

SEQ ID NO: 165172 - DNA, 1872 bp, Arabidopsis thaliana landsberg
  unsure (1)..(1872): unsure at all n locations
caaagatgagatcacgatgaatgagtatcaaattcggttgaatgcagtcattgatgcttctagacgcttattgcgacaaggattacctttttgtggacacgatgagacagaagaatcttttagcataaggtaactttccggaactcttgaaatatactgatgaccaggacgaggttgtgagtaaggtttgtgttaaaaaatgctcttggtaacaatcagatgacatctccaaagattcagaaatatattgtgcattttttttgcagaagaattagccaaatctattattgaagaaactgatcacgatctatttggtttgttggtagatgaatctgcagatttttctgataaagaacaaatggcggtagtatttcggtttgttgataagaatgggatagtcaaagagagatttatgggtgttactcatgtgagcgagacatactcagcatctttgaaatctgctattgattctatgtttgctaaatatggattaagcattcaaaaggtgagaggacaaggttatgacggagcgagcaacatgaaaggagagtttaatgggctaagatcattaatctcgaaggagaacacatcaacattttatgttcattgcttttcccatcaacttcagttagttgtagttgtagttgccaaaaaacattttgatgatggggattttttttatatgatttctccgttgatgaatgtggtgggaggttcatgcaaaagaaaagataagttgcgagataatcatcgagcagagattgagagagcaattaatgatggtgaactcagtactagaaaagggttaaatcaagaggtttctcttcaaagactagtgaatactcgtttgaactctcattacagaaatctaacgcgtttggttgagatgttttcttctatcatcaaggtgcttgagtatgttcaggatgaaggggttgaagactccaaaagacgacaagcacatggtctccttagatacttccacagctttgaatttgtgttccatttgcaaatgatgatacacttattaggactcacagatagcttgtccatggctctacaaagaagagatcaagatattttgaatgtcatgtcattggtgaaatcaactaagagaaagctgcaggagtttagggttgatgggtggaattctcggatgattaagatctcttctttttgtgagaaacatgatattgaaacgcttaacatggatgaagattttgttgactccaggaaaccaagaaagaaaacagggataacaaatgtgcatcagtacaaggtgaattgctaacatgcataacaaatgtgcatcactacaaggtgtattgcttatatgcaattttggatttacagcttcaagagtttaattatcgttttaatgaggtaaacaccgaattgcttatttgtgctgcttctttatctcccattgatgcattttatgagtttgatcactcaaagttagtgnnnnnnnnnnnnnnnnnnnnnnnnnnnnttagtttaggagagttcatatctattgagcaagaattatctatctacattgatactgttcgaaatgatgagagattttctaatttaaagaatcttggagacattgctcaaaagttggtggaaacacgaaaacctttgtcatatccctttggttataggcttttgaaattggttttgattttgcatgttgctactgctactgttgagagatgtttttcagccatgaagatcgtaaagacacatcgacgaaattgtattggagatcaatttttgaatgattgtttagtttgttttattgagaaagatgtattcaatactattacaaatgagattgtgataaagagattccaagacataaaggatcgtaggatgcttttgtag

SEQ ID NO: 165173 - DNA, 1997 bp, Arabidopsis thaliana landsberg
tctttgtgccgccacgaccaaagagatgcacttttggagctacaaaaagagttcccgatcccttccgttattttacaaatatccatggaacaagagcattgactgttgttcttgggagggtgtcacatgtgatgctacatttggagaggtgatatcacttaatctcgtttcctatattgccaacacctctttgaaatctaacagtagtctttttaaactccgacatcttcgtcacctagagctttcaaattgcaatctccataggagagattccttcttcaattggaaatctttctcatctcacatatcttgatctttcttataataaattagttggtgaatttccggcttcgataggtaacctaaacaacctagaatacatggatctttgcgaaaatgatctcataggtaacatccctacttcattttccaacttaacgaagctttttgaattgtacctcaatggaaatcagttcatgggtggggatatagtattagccaacttaaccagcttgtccattataaacctctccttcaattacttcaaatccacgatttctgctgaccttagtcaactccacaacttagagcgattttcggtttataacaactcatttttcggaccttttccctcatccttgctcacgattccttcgttagtcgatattgttttaagtgaaaaccaattcgaaggacctattgattttgggaataccacttcatcatctaagttaacaaatttagatgttagctacaacaatcttgatgggctaatcccaaaatctatatctacattagttagtctcgaacatttagatcttagccacaacaattttagaggacaagtccctagttctatatcgaaattagtcaatctcgatggtttatatcttagccataataactttggaggacaagtccctagctctatatttaaattagtcaatctcgaacgtttagatcttagccacaacaatttcggaggacgagtccctagctctataataaaattagtcaacctcagttcccttgatctttcctacaacaagtttgaaggtcatgtacctcaatgtatatggagatcttctaagttagattcagtggatctttcttataattctttcaacagtttcggcagaattctagaacttggggatgaatcattagaaagagattgggatcttagctcaaattccctccaaggaccaattccccaatggatttgcaacttcagatatttttccttcttagatttttccaacaaccatcttaatggctcaattccacaatgtttgaagaattccactgatttctacatgttaaatctgcgaaacaacagtctaagtggattgatgccagacttatgcatggatggctcacagttgcgatcacttgatgtcagcctcaacaatttggtgggaaaacttccaaaatcttttatcaattgtgagtggatggaatatctaaatttgagaggaaacaagatcaaagacacgtttccattttggttgggatctttacaatacctaacggttcttgtgctccgatcaaatacattctatggcccagtctacaaagcgtctgcctacttaggctttccaagcatgcggatcatggacatatcgaataacaactttgctggatcattgccacaagactattttgccaactggactgaaatgtcatcggtatggcaacgaacctatgcgcacacttgattacaaaagaaatatagctataccagggtcaagctacatgggagatagtgaaaataatcatcaagattcgattgatttggtgtataaaggagtagacacagatttcgtacgaatctttcgagccttcaaagccattgatttttctggaaaccaactctccggatatattcctggagctattggtttgttgagccaattgcgtcttctcaacttatctggcaatgcattcacaggaaacatcccaccatctttggctaatatacaaagctgagacgtaga

SEQ ID NO: 165174 - DNA, 745 bp, Arabidopsis thaliana landsberg
atgaagcgcatcaagccacccactgttcctgctggagttgtgaatatggtaatattctctgaagaacttatactattattgtctcagcatgcttgagtttaaacctaatttgtcattacaggtacaatatttggtagttacgaacaagggagatcacaaacctttgaatgtaggtactatgctattgatcactgaaacaaaagtcccattaggtcgtgtggatgggtacttctttggatctgtaacgaatcctgactatattgtgaaagtggaggattcagagatgcaaatccctgaaggtatgggtctctcgttcatagaggaatttacacaacatattacggaagaggatctgtacaaaagatttcattatccaactggatatgagtgtatgacttggttgaagaagaagaaggtgagtgcggcccaatggaagttttgggaaggacttcatatcactatgaaccaaaccgtggggcacaagacaattccagccgaattttttgtttgcaggaatatcaaccaatgatgtaccagcaagagcagctaatcatgagacctgagaccaaccaccaagagcagccaatgatgtacgagcaagagcagccaatgatgtacgagcaagagcacccaatgatgtacgagcaagagcagccattcatgagacctcagaccacccagcagaaacaaatgggcattagtcttttcccaagtcaagctccaatgatgtggcgccagcaattca

SEQ ID NO: 165175 - DNA, 174 bp, Arabidopsis thaliana landsberg
gctttgaacctagaaccgccattgatggagtagatagagaaagggagaaagagacagagggagagatgtatggatttgaggatggaagcagcaactgagaagatgtatatgaagtgtgtgaataggagggactttgaagcagatttggaaatgacggatctgagatttggtttt

SEQ ID NO: 165176 - DNA, 913 bp, Arabidopsis thaliana landsberg
atggactaacagttattctaacatcaagagacgagaatgtaggcgtcgaagccgccaagatccttcaagaaggtggattcaatgttgatttccaccgcctcgatatcttggactcttcctcaatccaagagttttgcgaatggattaaagaaaaatatggatttattgatgttttagtaagtttggttccttttgttcattaattcacataaccaaatgagcttttcatttgaaagactttgatactaaaggcttttctcttgatgagttatgatgtgaaatatttttgtcatgcagattaataatgcaggagtaaactacaatgttggatcagataactctgttgaattctcgcatatggttatatctaccaactactatggcaccaagaacataatcaacgccatgattccactaatgagacatgcttgtcaaggagctcgtattgtcaatgtcacttcaacgctcggtagattaaaaggccgacacagtgtacatatatctatatatctctctaactcgattcatcttccttaaaaattatggcagcaacgaattttgacctagttctcttcaacagaaacttgagaatgaagacgtgagagccaagcttatggatgtggactctctaactgaagaaatcgttgacaaaacagtatcagagtttttgaaacaagtggaagaaggaacatgggaatctggaggttggccacattccttcacagactactctgtctccaaaatggcggtgaacgcatacacaagagtactagctaaagaactatccgagagaccagagggagagaagatatatgcaaactgtttttgtcccggttgggtgaaaaccgcaatgacaggctatgcagggaacgtttcagcagaagatggagctgacactggagtctggcgtgca

SEQ ID NO: 165177 - DNA, 1571 bp, Arabidopsis thaliana landsberg
gtcctatgataatgcaattcatatcccttattaattgctttcttcaagagtcattgcagttgggatctccaatgatcagtgttgatgctcctttgctctcagctgatgacttagcagaccagatagtcgaggttcttaattatttcgggtaagcgaattcatctatcacataagttttacttgtgattgttatttccttgagctgcctagattctggttatatcgttatcttcgtttcgttgccaaagtctttttccggagactaggcagaagaaagaaaaccaaaacttttttgcctatatagaaatagaattttctccttatttatttcttgtcgtctcttgtccagacttggtgcagtaatgtgtatgggtgtcacagcaggagcatacattctgaccttatttgctgtaagtaatggtacctcgcttacgcttttcattcaacttgatgtcaaatttttaattttgcttgaaacttaattcttccagatgaagtacaggcagagagttctgggcttaattctcgtctctccactgtgccaagcgccttcttggtcagaatggttgtgcaataaggtttttttccacaaagatatcttcttctttttttgacttggggttatgcctttgattatcttattctcatatcagatattccttaacttattatgcaggtcatgtctaatttgctttactattatggtacatgtggagtggttaaggaaatgttactaaaacggtacttcagcaaggtatggtcaagcaattttcatttttcgttccagaagaagacactacttttacaagacatataataaagttttgacatacgttctcataggaagttcgtggtaatggtcatgttccagaatcagatattgttcaagaatgcagaagagttagtaaaatctttcttctctattcttgcaatcttgtgatgctttgttagtttgaattaaaattgacatgttatgttgtttaatctttgactatccagttacttagtgagcggcagagtacaaatgtatggagattccttgaggcaatcaacgggtaattctctagtttctctctgttgatttattttccagaatatagtcttaaagctgataaaatagtatgttttgtggttttggtgaaacaggagagtggatcttagtgaagggttaaggaaattgcaatgcagaacgttaatattcattggtgaaaattctgcctaccactccgaggctgttcacatgaccaccaaactagacagacgatacggtgcattagtcgaggtaccatatcactaatacagatgtcttcagttatggtttttatggccattctaagtcatattacataaaacaggtgcagggaagcggatcgttggtgagcgaagaacagccacaggcgatgataataccaatggaatactttttgatgggatatggcttgtatcgtcctacacagagcgtaagtccaagaagtcctttgagcccaacccgaatctctccggagcttctctcccctgaaaacatggggttgaaactcaagccgataaagacacgactcgctctatagccc

SEQ ID NO: 165178 - DNA, 552 bp, Arabidopsis thaliana landsberg
  unsure (1)..(552): unsure at all n locations
cacactagctgtagcagcagcgaagagcaaacccttgccatccgatgtatcttatcacatagtcagcacaccagccgtaagaaatcccgagggtctgaaaatgacacaagacgccaacgtgcatcggatagtaaatctgataatggtcgaagactggcggcaccaatcaccctttgtcttcaaggccactaccacccctctgaccaaagcgaacgccaacagattatcacacagaagcagagacttcactatagtcaacggacatctctaaaacaaggggataagtcaacccatgttgaaatgaataactaaacccaaaggcatagaacttcttcgcgaagtccacaggggtatatgcggatcacattcgggaccaagggcccttgctactaaagtcatacgtcaaggtttctattggtcggcgattgtgtgcatggccnnnnnnnnnnnnnnnnnnnnnnnnnnnnnnnnnnnattctcgcctcgaacatgcaccctttgcaacttacaaagcttattgcacatacctggccgctacaacgttggggacta

SEQ ID NO: 165179 - DNA, 1611 bp, Arabidopsis thaliana landsberg; identical to SEQ ID NO: 18859

SEQ ID NO: 165180 - DNA, 1702 bp, Arabidopsis thaliana landsberg
atggttctaaaagaagtagaagaagagaaaatggctactttgactgagccatcatcatctttgagtttcacatcttctcatttctcttatggttctattgggtccaatcacttctcatcaagctcagcttctaatcctgaagttgtaagtctaaccaaactcagctccaatcttgagcagcttcttagtaattcagattgtgattacagtgatgcagagatcattgttgatggtgttccagttggtgttcatagatgcattttagctgcaagaagtaagtttttccaagatttgtttaagaaagaaaagaaaatttcgaaaactgagaaaccaaagtatcagttgagagagatgttaccttatggagctgttgctcatgaagctttcttgtatttcttgagttatatatatactgggagattaaagccttttccattggaggtttcgacttgtgttgatccagtttgttctcatgattgttgtcgacctgccattgattttgttgttcaattgatgtatgcttcctctgttctccaagtgcctgagctagtttcatcttttcaggtgtgtgaaaagtcttcttttttcttctgtctctttgtttcttaattcatagacctcaatgagaactaaaaggtttgtgtgcttgcagcggcggctttgtaactttgtggagaagaccctcgttgagaatgttcttcccattcttatggttgctttcaattgtaagttgactcagcttcttgatcagtgtattgagagagtggcgaggtcagatctttacaggttctgtattgaaaaggaagttcctcccgaagtagcagagaagattaaacagcttcgacttatatccccgcaagacgaagaaaccagtcccaagatttcggagaaattgcttgaaagaatcggtaaaattctcaaggccttggattcagatgatgttgagcttgtgaagcttcttttgactgagtcagatatcactctagatcaagccaatggtctgcattattctgttgtgtatagtgatccgaaagttgttgccgagattcttgctctggatatgggtgatgtgaactacaggaattcccggggttacacggttcttcattttgctgcgatgcgtagagagccatcgatcattatatcgcttatcgataaaggcgccaatgcatctgagtttacatctgacggacgcagcgcagttaatatattgagaagactgacaaatccaaaggattatcataccaaaacagcaaaagggcgtgaatctagtaaggccaggctatgcatcgatatattggaaagagaaatcaggaagaaccccatggttctagatacaccaatgtgttccatttctatgcctgaagatctccagatgagactgttgtacctagaaaagagaggtaattgactgaaaattgctaaattcttctgtatctatacgacatttttgttaaagcttctaccttttttgcagtgggtcttgctcagttgttctttccaacggaagctaaagtggctatggacattggtaacgtagaaggtacaagtgagttcacagggttgtcacctccttcaagtgggttaaccggaaacttgagtcaggttgatttaaacgaacctcctcatatgcaaacccaaagacaaaattaaaagtatggtggctctaatgaaaacaggtaacaaaaagcgggctctgtgt

SEQ ID NO: 165181 - DNA, 1969 bp, Arabidopsis thaliana landsberg
aaccaacgagtttagtggaaactttccccttatactactaaattgtcaaattaatcactctcccgcaaccagttcacaggcaagcttcctcctaacatgagctcgctctccgacttggtgttattttacgcagacgccaacgctttcactagaactatcccttcatatctcctcaacattccttctttgagttgttttgacttgagtgataaccaactcaatggaaatcttgagtttgggaatatatcttcatcactatcagacttactccttggcaataacaacttcagagggtcaatccacaaatccatttccaaactagtcaacctttacacacttgacctttctcatttcaacacccaaggctcagtaaactttagcatcttctcggatctcaagttgctcgtggatcttcgcttatcccatctgaacacaacaactacagttgactttaatacattcttatcaagtttcaagtcacttgctacattggacctctcaggcaaccatgtttcagtcacaaacaagagttcagtttcaaatcctccattgttatcgcggtttaacttgtccggatggggtgtcactgagttccctgagttcctaagaacccaacaaacaacggagattttagacatttccaacaacaaaattaatggtcaagtaccttgctggttatggactctaccaaatttggactacgtgaatctttccaacaacactttcaccggattccaaagattaatggtaccttcatcctggcaaccatctatgaattatttttctggcgccaacaacaatttcacgggaaatattccagctttcatatgtgcattgcgctctctagcaatgcttgatttatctgacaacaaattcaatggttcaatcccacgttgcatgggaaatttcagtagtgctcttcaagctctacatctaagaaagaatcattttagtggaggttttccacgagaatatatctgaaagtttaaagtcgcttgacgtcggtcataaccatttggtaggaaagcttccaagatctctggttcgtatctcttctcttgaagttcttaatgtggaaagcaacaaaatcaatgatacatttcctttctggttgagttctctacaagagctacaagttcttgtccttcgttcaaatgcattccatggaccgatgcaacaaaccaggttttctaagttgcgaatcatcgacgtatcccataaccacttcaacggaactttgccatcagatttctttgtaaattggacgacaatggttttacttggagaaaatgaagatcattctaatggagagtacatgggtacaagctattacagtgattcaatagttgtgatgaataaagtcctagaaatggagatggtacgtatcctaaaaatctttacagcactcgacttttccggaaacaaatttgaaggagagattccaaagtccattggtctattgaaagagcttctcgtgctcaacttgtcaaacaatgctttcaccggccacatcccttcatcaatggggaacctgacagctctcgagtcgttggatgtttcccagaacaagctttatggggaaatcccacaagagatagggaacctctcgttgctttcgtatatgaacttctctcataaccagcttgcaggcctagtaccaggaggccagcagtttctaacgcagcgttgctcttcctttgaagataacatgggacttttcggctcttctcttgaagaagtttgcagagatattcacacgccagcatcacatcaacagtttgaaacgccggaaacagaggaagaagacgaagatctgattagttggatagcagctgcaataggattcggacctggtattgcctttggtttgatgtttggatacatactcgtttcctataaaccagagtggttcatgaacccttttggccgaaacaatcgtagacggaaaagacacacaacaactcactag

SEQ ID NO: 165182 - DNA, 2139 bp, Arabidopsis thaliana landsberg
  unsure (1)..(2139): unsure at all n locations
tcatttaaaccgtcagaagattcaaatcgcgaagccaattttgtcggaaagttcaaaacttttttgactctggaactttgccgttctatacacgaagctacattgagtgtggctttgtgattgttttacgctgatgtgaccgttgtaggaaatgtggagtcgtgccatttttcaacgattcaggtttcgagctttctctatatctcacgttatccatgggaaatgttacagaagtttctcagttactgtggagtttcagaatcgcgaggttttgatatgtaatcacttgttgagtcgacgaatcgatgaggctcgagaggttttcaatcaggttccatctcctcatgtgagtctttacacaaagatgattacgggatacacgaggagtaatagattggttgatgcgttgaatctgttcgacgaaatgcctgcgagagatgttgtatcatggaattcgatgatcagtggttgtgtggagtgtggtgatatgaatactgcagtgaagctgttcgatgaaatgcctgagagaagcgtggtttcatggacagcgatggtaaatgggtgttttaggtctggtaaggttgatcaagcggagagattgttttatcaaatgcctgtgaaagatactgcagcgtggaattcgatggttcatgggtatttacagtttggtaaagtagacgatgccttgaagttgttataagcaaatgcctgggaagaatgtgatttcgtggacgacaaatgatctgtgggttagaccagaatgagaggagtggagaggctctcgatttgttcaagaacatgttgcgttgttgcataaaatcgacttcaagaccattcacttgcgtaatcaccgcttgcgcgaatgctccagcgtttcatatgggatcgggggncatggcttgatcatcaagttggggtttttatatgaagaatatgtatctgcttcgctcataactttttatgcaaactgcaaaagaataggggattctcggaaggtgtttgacgagaaggttcatgaacaagttgctgtgtggactgctctattgtcaggttatagtctgaacaaaaagcacgaagatgcgttgagtatattctccgggatgttaagaaacagtatcttaccaaatcaatcaacatttgctagcggattaaactcttgctctgctttgggaacattggattggggtaaggagatgcatggagttgctgtgaagcttggtttagaaactgatgcctttgtgggtaattctcttgttgtgatgtacagcgattctggaaacgttaatgatgccgtttcagtgttcataaaaatcttcaagaagagcattgtgtcatggaattccattattgttggctgcgcgcagcatgggcgtggaaagtgggcgtttgtcatatttggtcaaatgatacgcctaaacaaagagccagatgagatcactttcactggcttactctctgcttgtagccattgcgggttcctagagaaaggaagaaagctgttctattacatgtcaagtggaataaatcatatcgatagaaagattcaacactacacttgtatggttgatatcttgggaagatgcggaaaattgaaagaagcagaagaacttatcgagagaatggttgtgaaacctaatgaaatggtttggttggctttacttagtgcttgtaggatgcattctgatgtagacagaggcgagaaagctgctgcagccatttttaatctggactcaaaatcaagcgctgcttatgtcttattgtcaaatatatatgcttctgctggtagatggtcgaatgtatcacaaattgagagttaagatgaagaagaatgggattatgaataaacccgggagcagctgggttggtattagagggaaaaagcacgaatttttctccggtgatcaaccacattgctcgaggatatatgagaagctggagcttctgacacagaagatgaaggacctgggctctgctcctgattatagatccgctctacatgacgttgaagatgaacatgaagaaaatatgttgtggagcctcagtgagaggcttgctcttgctgttgggatgattaatacagatgaaggaagatcaaacacagtaaagcagaatgtacagatttattactactgtatacaa

SEQ ID NO: 165183 - DNA, 3130 bp, Arabidopsis thaliana landsberg
tcctgcagtttttacggcgacggaaacgatgaatccaccggataattatgttccgtctgtttctcactctcaattctctactcctcctcctccacagtcgagctcaaacaccaataccgaaacaagtttgaatccatttccgaattcgatctctacctcaatctctaaccctagttttgagcagatggtctcattctccgcaccaaagaaacgaaggagaggacgttctcagcgctcaatgtcttcgcttaattcccttcccgtccctaacgtaggtcttcttcctggtaacagtaatttcgtgtcatcttcagcttcttcttccggtagatttaacgtagaggtcgtcaatggatcaaaccagactgtgaaaagttatcctgggattggtgatgagatcattacgattaacaaggaagctaccactgaagctttgcttgctctcactgctgggtttcctgctgattcgcttaccgaggaagagattgaattcggtgtggtgcctattgttggaggcattgaacaagtcaattacattttgattaggaaccacattatatccaaatggcgagaaaatatatctagttgggtcacaaaggagatgtttcttaattcgattcctaaacattgtagtagtctcttagattcggcttataattacttggttacacatggatatatcaattttggaatagcacaggcgattaaagataagtttcctgctcagtcaagcaagtctagtgtgattatagttggtgctggtttatctgggttggctgcagctaggcaactgatgaggtttggcttcaaagtcacggttttggagggtaggaaacgacccggtggacgggtttataccaaaaagatggaagctaatagggtaggtgctgcagcggatttaggtgggagtgttttgactggaacattaggaaatcctttagggattatagcgagacagcttggttcttctctctataaggtacgagacaagtgtcctctttatagggtggatggtaagccggttgatccagatgtggatataaaggttgaggtagcgtttaaccagcttctagacaaggcaagcaaacttaggcagttgatgggtgatgtttccatggatgtctcccttggggcagcactcgagacattcaggcaggtttctgggaatgatgtggccaccgaggagatgggtttgtttaactggcatcttgctaacttggagtatgcaaatgcgggcctagtatcaaagctttctcttgcattctgggatcaagatgacccatatgatatgggtggagatcactgctttctgcctggaggaaatggaaggctggttcaggctttggctgaaaatgtaccaatattatatgagaagaccgtccaaacaatcagatatggttcaaatggtgtcaaggtaactgctggaaatcaagtgtatgagggtgatatggtgctgtgtacagttccccttggtgtccttaagaacggatccatcaaatttgttcccgaattacctcagagaaagcttgattgtataaagagattaggttttgggttactgaataaagttgcaatgctctttccgtatgtattttggagcacagatctcgatacctttgggcatcttactgaggatccgaactatcgaggtgaattctttctgttctatagctacgcaccggttgctggtggtgctctcttgatcgcgttggttgcgggagaagctgctcataagtttgagacaatgccacccactgacgcagtgactcgtgttcttcatattcttaggggtaatagatttcactatctattgattgtcatttaattgaatttcaatttttacctgtcaatatcaatcttcaagaattattagttgaggatttgtattccagatttgttaaagttgatgctagcgtctgacgcaagttccattttaatgaatatcaggtatttatgaacctcaaggaataaatgtccctgatccacttcaaacggtctgcaccagatggggtggggatccattcagtttaggatcttactctaatgttgcagtgggagcttcacgcgatgattacgatatattagcagaaagtgtctgatatggaaggcttttctttgccggagaagccacaacaaggcgataccctgcaaccatgcatggagcttttgttactggtctgcgagaagctgcaaacatggctcaatctgcaaaggcccgaggcataaggaaaagaatcgataggaacccatcaaggaatgctcattcctgtgccattcttcttgcagatttatttagggaccctgatctggaatttgggagtttttgcataatctttagtaggaggaatccagacccaaaatctcctgctattttgagggtaactctaagcgagcctcgtaagagaaacgaggaccaaaagcagatcagcactcaaacaagatactgtttcagcagcttcagtctcatttcaaccagcagcaacagattcaggtgtatacattattaactagacaacaggctcttgacctgagagaagtcagaggtggtgatgaaaagagactatactatctctgtgagacacttggagtgaaactggtggggagaaaaggtcttggtgttggagctgattcagtcattgcttctattaaagccgagcgaactggtcgcaagctaccatcatcatctacctcaggcacaaaatctggttaggctccgtaatttcctgatttgattactccttacttaccggatagaaccagtagcaacatctctaacttcttctatattgagtaggtatattaaaagcaaaatccggtgcattgaagcggaagatgatcaggtttgctacgaaatcatatgtgcaataatttctctcacttatcaaaaacaacattacagagaacctttctgttgcacagaaggattaaaggaccgttgctgctgaagcaaagtaataacaatggcgtctcagagagtataaaatcagagtctttaggtaatggcaaatccttagagcaacaacaacaacctagaatagtagagtcgataggaggaggtagcagcatgcaaggggaaagcaagtctttgagcacaggagttgcatctagttctggtattcatttttcgtaa

SEQ ID NO: 165184 - DNA, 2436 bp, Arabidopsis thaliana landsberg
atggtggacaaggattgggtgcatctttgcaggtaagattttcagtaggaaaatctggagatcttacctctctttttattctccttttaactcttcactgaagagttgatcatataatgatttttttttattaccctttaactcttctctgaagagttgatcctgcttatgagagaggggctacaaagtttgtgcgagatgtggctgcagctctgggagacgtagatatgattatatgtccctgcattgattgtcgctgtttagatcgtcattcagcctctgttcttgttgatcatcttgtaacaaggggaatggatgaggcatataagaagcggtgtgactggtatcatcatggggaatcaaactctagggctgagaatgataccaaagtgagtcagtggaatgatgaggtacttgggttatatcaagctgctgaatttatggatgaagagtttgcttataaggttggctcttaagtgagattgtagagtgtgaagaccaacgagaagatgagttccttgcaaagatattggacgctgaaaccccactatacccaaactgttcaaaccacagcaagttatcggctattgtgactttgtttaggattaagacacataatggctggtcggacaagagcttcaacgagctgcttcatacattgccaagcatgttgccagatgataatgtccttcacacatcattgtatgatgtcaagaaatttttaaagagctttcatatgggatatgaaaagatccacgcatgtgttaatgattgctgcctctttagaaagaagtttaagaagcttgaaaaatgtcccaaatgtaatgcttcacggtggaagactaatcagcacattggtgaggtaaaaaaaggtgtcccacagaaagtattgagatattttccaattataccaaggctgaagagattgtttagatcagaggaaatggccaaggacttacggtggcatttcactaacaagagcacggatggaaaatttcgtcatccggttgattcagttacatgggataagatgaatgataagtatccttcatttgcagctgaagaaaggaacattaggctggggctgtctacagatggatttaacccatttaacatgaagaatagtaattatagttgctggcctgtgctattggtaaactacaatttgcctcctcacctttgtatgaagaaggagaatataatgttgacattattgattcctggtccacaacaaccaggtaataatatcgatgtctacttagaacctcttattgaggatttgaataatctgtggaagaatggagagttaacatatgatgcttttagtaaaagtacttttactctaaaggcaatgcttctatggactattagtgattttcctgcgtatggaaaccttgctggatgtaaagttaaggggaaaatgggctgtcctttgtgtgggaaaaatacagatagtatgtggttgaagtttagcaggaagcatgtctatatgtgtcatagaaaaggtttggctccaacacacagatatagggaaaagaagacttggtttgatggaaaagttgaacataggagaaagacaagaattttaactggtcatgaagtttatcaaaatctgaaaaacttcaagaatgattttggaaatgtgaaaaaatctgggatgaagagaaagagaactgtctataaagaaccagtctatgatagtgatgatgtatccagtgaatccgaggaagatgaggaagtagaagtagatgaggatgagttatctagatggaagaaaagatcaatcttctttactttgccttattgggaggtatgattacttgttttcagatttaaatagcttttatatgtttaagtatgatacatcgattacttctaaaatatatgtatgtctatattggaggatctcctggtaaggcataacttggatgtaatgcatgtagagaaaaatatggcttcaagcattgtctctacattgttacattgtagaaaatcaaaagacggtctaatgcccgtaaagacctccaaaatcttgggataaggaaggatttgcatcctacaacacaagaaaagagaacttaccttcccgcaacaccttggtctttgtcaaagaaggagaagaaaacattttgcaagcgcctacatgactttaaaggtccagacggttattgttctaatatagcaagaggcgtttccttagaggactgcaagataacaggactcgaatcacatgattatcatgtgttgatgcaacagcttcttccggtttcacttcaaggtttgttaccaaaagggccaaggacagcaatcttaagattatgtgcattgtttaaccatttgagcgagagagttattgacagagaagttataacagtgatgagaactgaaatagtggaaactctttgtatgtttgaaagatttttccctcctaccttc

SEQ ID NO: 165185 - DNA, 865 bp, Arabidopsis thaliana landsberg
tctcatgactcatgattctatttcgccttccattcaattttctaacttcgtctagtttgttgcagcattcatgttctatgcgagtctggtaattggggctgctgtatttctcattatccgttttgtgccccaatatgggcaaacaaatgtaatggtttacattggtatttgttcgctcgtgggatcattatcggtatgtagtttttggtatttccagtttgtaatcctttatttctttagaagaatgttgattccactttgcctaaattgatattgtcaaacttgtgaacaggtaatgagtgtaaaagcacttggaatagcattaaagctgaccttttcaggaacaaatcagttattttatcctcaaacatggatattcaccttggtcgtacttacttgtgtggtaacccaactgaactacttaaacaaggtaactattaattaagtgattttcaggataatcgattggaagactttgacgtgggtaattagatgtctatctttgttacttaaagaattgcattttgtattgttttcacttgcaggctcttgatacattcaatacagctatagtatctcctatatactacgtgatgttcacatctctaactattttggctagtgtcatcatgtttaaggtatcctctgctcccacaaaatgtatctatggttgtatgagggtgttgtttcagactttcagtacatgattcaaatcgttgtggttttgaacaggactgggatcggcaaaacggtactcaaattgttacagaaatatgtggatttgttacaatactttcaggcacttttcttctccacagaacaaaggacatggtcgagggtgcgttccttaatttcatttatggca

SEQ ID NO: 165186 - DNA, 2515 bp, Arabidopsis thaliana landsberg
gttgaggtaatgtctacatagaaaactaagcttctcttgctattcttagtgcaatagatttcatgtatgcctaagaaattaaaaacatgtttcatatctttcagccatgaacgagaaactccggattctgttctccttcctctgtttcttctatgttcttctagtttctccatcccaatctaatggccaagacatctccttgagctgcggagcatcagaaccagctgttgatcaagacaagaaaaaatgggaacccgataccaaattcttgaaaacaccaaacacggttcatgcaccagctacttatcaagatccttcacttctttcaacggttccttacatgacatcaagaatctttacagctccagcaaagtatgagatcccggttaaaggcgacaaaagacatatgctccgcttacatttctatccatcaacatacacaggactcaacattctcgactcttatttcactgtggaagctaatgatcttacccttctcagcaattttagtgcagctatcacatgtcaagctttgactcaagcttatctggttaaagaatactctcttgcacccactgacaaagatgttttgagcatcaagtttaccccttcagataaataccgagacgcatttgcctttataaacggtatcgaggtgattcagatgccggaattgtttgacacggcggctcctgttggtttcacagaccaagcaatggatgccaagactgcgaatcttcagtcaatgtttagacttaatgttggtggtcaggacatccctggaagccaagactccggtgggttgacaagaacttggtataatgatgcaccttacatctttagtgcgggtcttggtgttacacttcaagcaagcaacaattttaggatcaactaccagaacatgccggtgtctatagctccagccgatatatacaaaaccgcaagatctcaaggcccaaacggagatatcaacctcaaatccaatcttacatggatgttccaaatcgataagaacttcacctacattttgagactccatttctgcgaattccagctttccaagatcaaccagaaggttttcaacatttacatcaataacagaacagcgcaggcagatactactcctgcagatataatagggtggacaggagagaaaggaatcccgatgtattatgtctacgcgatatatgttgatgccaacaacggaggcgaagagattacacttcaggtgactccatcaacttttggtcaaccggaatattatgattcatctcttaacgggttagagattttcaagatggacaccatgaaaaatcttgcgggtccaaaccccgagccatcgcctatgcaagctgaggaagaggttaaaaaagaattcaagaacgaaaagagacacgctttcatcattggttcggccggaggagttttagcggttttaatcggtgccttgtgtttcacggcctacaagaagaaacaaggatatcaaggaggcgactctcacacatcaagttggcttcctatatatggaaactctaccacatcaggaaccaaatcaaccatctcagggaagagcaacaatggaagtcacctatccaatctcgcagcaggtttatgccgtagattctctttaccagaaatcaaacacggaacacaaaacttcgatgattccaacgtcattggagttggagggtttggtaaagtctacaaaggagttatagacggcacaactaaagtagcggtaaaaaaatcaaacccaaattcagaacaaggactcaacgaattcgagacagaaatcgaactcctctcaagactaagacacaaacacttagtctccttgataggatactgcgacgagggaggagaaatgtgtctcgtatacgattacatggcatttggaacactccgtgagcatctatacaacacaaagaaaccacaattaacttggaaacgaaggctagagatagctattggagcagcaagaggattacattaccttcacacaggagcaaagtacacgattatacacagagacgttaaaacaactaacatcctcgtagatgagaactgggtagccaaagtttcagactttgggttatccaaaactggacctaacatgaatggaggccatgtaacaaccgtcgtcaaaggaagcttcggttatttagatcctgaatacttcagaagacaacaactgactgagaaatcagacgtttactcattcggagttgttctgttcgaaatcttatgcgcaagaccagcgttaaacccgagtttgcctaaggaacaagtgagtctcggagactgggcaatgaattgcaaacgaaaagggaatttagaggatataatcgatccgaatctgaaagggaagatcaatgcagagtgtttgaagaaatttgcagacacggcggagaagtgtcttaacgatagtggattagaacggccgacaatgggagatgttttgtggaatctcgaattcgcacttcagcttcaagagactgctgacgggactcgtcat

SEQ ID NO: 165187 - DNA, 1918 bp, Arabidopsis thaliana landsberg
  unsure (1)..(1918): unsure at all n locations
ttattcagtttgaaaaaaagaaatggagggttcatcttgattggcctggcttcaaatggatccgacttgataataaggtatgatgagttttttttgaaatcgtttcgcctttgcatgaaaaagttgttaactttatccgttgttgtatgtttgttttttgtctttgaaggaattggtcaagtctgtttttagttgcgggacaatggtggaattgagatttgattgtgcttggattccggtaattgtcattaaggagttggagaaggacaagaggtttcttgtcaagtactggaataagtcctatagctgccgggaatcgaaaaatttaattgttgattccctaagactaaggcctatgcagcctcctttatctgttggaaagtatgaattgctggatcatgtagaggcgtttagtggttttgaatggcgtcaaggtgtggtcaggggaattgtctttgagggaaggtacatggtaagtttcggggcaacaaaggaggcatcgcaatttaatcactctgatattaggcctccaatggagtgggaagatggagtttggcataaaagaacaaaggtaaattgtatcactagttgcaggcaacattgtgttggtttggtttaattagtgtgacatctttgaggattaattgaagtgttgttatgttatttccattttcagccaaaacgccagaaagaaacttctttagacggcaacagaaatgtgcagacaaaggaaccaccgggaaatgagatggctgatgatgtggtatatggtcataaccctgctagtggattcttttataaccttgtttgttttctacgccctgaaattgttctatggtctttgttttccagaaaaaagaatctggtttacctataaccctgggggtaactgcaacaaagaacaaaacccaaggaaaggtatcccctgtgccaatgaagaatggctttggaaatgagtcaactcgagagaaggtattgtttatgattgttatttatctttgagatggctctccttttggtttaacacttctatgcacagatgcctgaggagcctaagatcaaatattatactcgaaagaggaaaagaggaggtctaaagctcaattcatacatcaataagactggtatgtcttaactctcattgcacattctggaatgtaggacccgcttgcaatggtctcattgtactattactggtagataagcctttattttctcattgtgttgtgtatgctttcatctgtccagtgttatcctcggatcggacccccaatgtggtgaagaattctgcttctaatgctgaggaaaaccatgcaaaacacacaataatggnnnnnnnnnnnnnnnnnnnnnnnnnggtctggaagacttatgaatcactggaggtcttcaaaagtgtatcacacagtcttcatttcagcccattgtttgagactaagcaagatttccgtgaagggtatgcaataggtatgatggtgacttattttgggttactggagaaatttaaagatcttgaagccgacgttcctgtaagccaactaaatagcctaaaagattcattttcggagctcgagaaacatggcttcaatgttacaactccattatcacggatcgacaagctgttagcactcaaagatagacaactatatataatggaggaactaaaaggttttgacaaggagatgacaaatgaatttagcaaggctaaacaagagtttgatgatatggaacaaaagattcttgaggtgaaacacaagattatcgagctgcagaggcaagaagctgctctaaaagaacaaaaggaagcagaaaaagaacagaaagatgcagcctggaaaaagatatgtcagatggagtcatgtgcaaaagatctcaatgtagagcttgaagatgtggagtttgagtttaagacaatctc

SEQ ID NO: 165188 - DNA, 2756 bp, Arabidopsis thaliana landsberg; identical to SEQ ID NO: 654
  unsure (1)..(2756): unsure at all n locations

SEQ ID NO: 165189 - DNA, 1184 bp, Arabidopsis thaliana landsberg
  unsure (1)..(1184): unsure at all n locations
caacaagtgttcaaaaaaaaaaagaaaaanaaaaaaaatcaagatccaattagtcaacttaatttgacagctgaattcttggggtaccatatatttccccttactttggacataataatcaaagctttgagaatggaatcaacttcgcggtggctggagcaaccgcggtggagcctgaattgcttcaagagaaaggaattactgctaattacatgactaatgtaagcttgattgttcagctaagcatcttcaagaaaattttaccaaacctctgtggctttccttcaggtgattcctcacaaatctcaactcatcttggaacacaagggacaagcataagccaatctttacttgttttcaagattgcagagagattctcgaaaactcgctgtttattgttggtgagattggaggtaatgactataactacggattcttgattggaaaaagcatcccggagattaaaaaaaatagtcccccttgttatcaatgctatttgctcaacaattgtggtaataaaaatctttcttaaatcctgttcaatgatccttccctttttcttgttttgtttgggagactaagaattgaaccttgcaagcatgaacaacatggtacaggaattgttcaatttgggagccagaacgtttctagtgccaggaaagtttccaactggatgttctgctgcatatttaacgagatttaggacaacagatatgaaggactacgatgctttaaccggatgtttgaagtggcctaatgagttttctcagtaccacaatgagcagcttcagacagaactcaatagactccaaaaactctatcctattgctactatcagatacactgactactacgacattgtgttacatttttaccttgaaccgacgaaatatgttgccctttcttattccgtccccttaactaacatatatacagtattgtcacaattatttatattaccaaatttactcttttgaaggatttatggagagaccttcactgttgataagccatgtgggtctagaggagtgaaacattgtcgagttccttctgagtatgtgacgtgggacggttttcatttgaccgaagccgcctaccgatggattgctaagagcttgcttaatggaccacttgcgtctattgctttggccgctcctgcattttcctttttaagctgatctacg

SEQ ID NO: 165190 - DNA, 660 bp, Arabidopsis thaliana landsberg
acagaagaaataagacagtctctactgtacacaacactagagctggaccaaacaaagatgtttgcttatgaagaaataaggaaaagagacgagcaattgatccatctcaaagacatcttaaccaaaaccatcaaagaaagagacgaagctctcgagaaatgtcagcgtctcatgttcgatagccactcgcttcagcagcaaaagcatatgactcctcctttatctggagcttcaagcattgaagacgaacaagtgcagcctcaacaactaagatccaacaagagcttctcatcttctgattgcgaggagagcattatgtcaccaactgatcatatcatgaatccaccaccatgtcagcttgaagaagtctcaggaactgagattatcatggatccattgttgcaagacaagccactgcctgagaagggtaagcttttacaagctgttattaaggcagggcctttacttcagacactactcttagctggtccattacctcaatggcgccatccgccaccgcctctcaagagcttcgagatccctccggtcacagtccaatgcccaattgtcaacaatggatgtgggaagttcaacaggaaaagagtattctcagatggatcctattcagaagctaagtatcagaaagttcttctccaatga

SEQ ID NO: 165191 - DNA, 475 bp, Arabidopsis thaliana landsberg
gggttgggtgtaacgaaattcacctcgaaatcacaagacaatcatggccgaccgttcttccgttgtataagcaaaagagatcctagctcgtggaaaaacaagaaagatgtaaggaggtatttggttgtttatgttgtttttctgtgaaatgggaagctagatttgttgtttatgataggatcacttgtttaagtgggtggaggatgctgtgtatgaggaggttgaagatgtattgccaaacctaggaatcatggcaaatgagattgttaaagctagatccgaggttaatgagattgttaatgagttgagtgcttctattcaagaattgaaagaaaatgcaatgtgtagcaaaatggaaatccggaagttgaaagtgttggtgaaagtctctttggtgtgtgtttgtttaatgacaattgtcattgcttaccaaatgtttggtaaagcaacagaaacaagctttgttctaggtcat

SEQ ID NO: 165192 - DNA, 4698 bp, Arabidopsis thaliana landsberg
  unsure (1)..(4698): unsure at all n locations
gctatcaacgctcttcctcaagcaatattcggtgctaatcgatcctggcacgtccgacgccaacctttggtcactgtctccgtagccaaacgagccacttcgggacttcctcgcaaagttccgatctaccctagccaaagtcaagggaatcaatgatgtcacaactctctctgctctgaagaaagcgctgtggtacaagtctgaattccgaaaggagttaaatttgtccaaaccgcaaacaatcctggatgccttgcacggagcctcggattatgtttcccatgaggaggaaatgaaactgctatcaaaaaggcacgagccgccgaagcaaatgcctcgtggcgaaaaatcccaacctagcgctccgaaccacaaaaaaggcgctcaaggcggaacgttcgtacaccatgaaggacgaaacttctgcggagcccacaattatcaagctgatacacctcgaggacgaggacgaggccgcggtcgagggtgcggacgagaatcctacaccagaacgaaggatcaaaccgcaggaaacgagcaggaatactgtgagttgcataagagttacggccatcatacttccagatgtcgtagcctcggggcaaagttggcaactaaattcctagccggagagatcgnnnnnnnnnnnnnnnnnnnnnactttaaagcggaaaagggtaaaaccgagcaggtcaacgctgtggccaatcccgagcagatcgcccccgcggcgaaccccgaaggacctaaaagaggccggggtaatcgcgaaacagacgacgatgaaccagaagctgttcggggaaggatcttcacaattttaggggattcagctttctgtcaagatacggcagcatcaatgaaggcatatcaaaggaaagccgaggcgaatcgtaattggacgcggccatttaatggaccaaatgacgaagtaacctttcacgaaagcgataccaacggtttagaccgtccacacaacgatcccttagtcattacattaaccatcggtgatttcaacgtcgaacgagtcctagtcgacacgggaagcacactggacatcattttccttacaactctgcgagaaatgaaaatcgatatgacgcaaatcgtgccaactccacgacctgtgctcgggttctcaggtgaaaccactatgactctcggaaccatcaaactaccagtccgagccaaaggagtaacaaaaatcgtcgatttttctattaccgaccaaccaaccgtgtacaacgcgattatcggcaccccatggctaaatcagttccgagctgtcgcctcgacgtatcacctagccctaatatttcccccaaacgacggcgtgaaacccatctagggaaaccagaaaaaatgctcgctcctgcttcatggcagcgcacaagcttaggaaccccgtcactgaatagacggccgacgcgaatcataagaaggccaaacttggccgagccaaagaaaagtcgatctctgagcagttatagcaattaaagaacgaagaagctcgggaatctaagataccaactcccgatccggtcatctcaatttgccttgacgatgcaaagcccgagcgatgcgtagaaatcggcggagatctaggagaagaactaacagctgaactcaccgctttcctcaaagagaacgtcaatactttcgcgtggtccccagaggatttgcccggagtaagtgttaacatcgtatcacacgagctcaacatcgatccaacttttaaacccatcaagcagaagaggagaaaattgggtcgggaacgagcagaagccgtaaaggccgaggtagaaaaattattgaagatcggatccatcaccgaggcgaagtaccccgactggatcgcaaacccagtcgtggtaaaaaagaaaaacggcaaatggagagtctgcgtagatttcacggacttaaacaaagcttgtccaaaggacagtttcccattaccacacatcgatcgcctcgtagaatcaacttctggaaacaagctactgtcgttcatggatgcttttgctggttacaaccagattatgatgaaccccgaagatcaagaaaaaaccgctttttacacagagcaaggaattttttgctatcgagtgatgcccttcggactcaagaacgccggggcgacctatcaacgcttcgttaacaaaattttcgccttacagatcgggaagaccacatagcccacctgcgcgaatgtttcaaacaactaaacttatacaacgtcaaacttaaccccacaaagtgtcgctttgatgtaagatccggcgagttcctcgagtacctggtcacccaccgcggcatcgaggcgaatccaaagcaaatcgaggcattgttgggaatggcatcgcctcaaaacaagcgagaggtgcaacgtttaaccggaagagttgcggccctcaaccgtttcatctcttgatcaacagacaaatgcttagccttttacgatgtgctacggggaaacaaaaagttcgagtggacgatccgatgtgaagaaccttttcaagaactcaagaaatacttagcaacaccacccatcctcgccaactccgtaatcggagagccattatatttgtatattgccgtatcagagactgcagtcagcggagtgttagtccgagaagacaaaggcgaacataagccgattttctacgtctcacagactttcaccggcgcggaatctcgctatccgcaaatggagaaacttgctttagcagtcgtaatgtcggctcggaacctgcgaccctattttcaatcccattccatcgtagtaatgggatccatgccactccgcgccatcttacacagtcaaagccaatcaggacgtctggctaagtgggcaatcgagctcagcgagtacgacatcgagaatcggaacaaaacatgcgcaaaatcgcaggtcctagccgattttattgtcgaactacccacaaaggaggctcgggaaaatccactcgacacaacttggcttctacacgtagacggctcatcgtcaaagcaaggctcgggtgtaggcatccgcctcacctcgccaatgggagaaatcctcgagcagtcattcaggttaaacttcgaagctaccaataatgtggccgagtacgaagcgcacgttgccggacttaatctagctcggggactgaagataggaaaaatccgcgctttttgcgattcccagctcgtcgcgaatcaattcaacggagaatatacagctcgggacgaaaaaatggaagcctacctgattcatgttcaaaagctagcaaagaatttcgacgaattcgagttaacaaggattccacgaggagaaaatacatcggccgacgccctagctgagaagagtcatcccagtggaattcattgaaaagccaagtattgagttcggcgaagaagagcacgtcctcgccatacaaatcagcgcggatcaagatgacccagacgaatgcagctcagaatggatggaacccatcataagctatatatccgaagggaagtcgccctcggacaaaatggaaggctcgtaaactcaaagctcaagctgcgcgtttcgtcttagtagatgaaaaactttacaagtggcgattatccggacccttgatgacctgcgtggaaggagaagcgacttgtaagatcatgaaggaaattcacggcggctcatgcggaaaccattctgggggaagggctttagccattaaaataaaacgccacggattcttctggccgacgatggtcaaggattgcgaaaaattttcaaaacgatgtgaaaagtgtcaaaggcacgcgccaacaatccatcaaccggccgagctcttgtcatcaatcacctcgccatatcccttgatgcgatggtcaatggatataattatacctatggatccctcgaagcaaaaaaagttagtcctcgtcctgaccgactatttctctaaatggatagaagccgaatcttacgccagcataaaggacgctcaagtcgagagcttcgtgtggaaacatatcttatgtcgccacgggataccttatgagatcgtcacggataacggctcgcagtttatatcaacccgcttccaaggcttttgtgataaatggagaattcgacttagcaagtcaacaccacgatatccccaagggaacagccaagccgaggcctcaaacaaaacgatcctcgatggattgaagaaacggctcgatgctaaaaagggctcgtggtccgacgaactcgaaggtgtactttggtcgcatcggacaactcctcgccgagccacaggagaaaccccttttgctttagtctacgggacggaatgcataattccggccgagatgatagtgccaagcctacgacggagtctatcccccgagaacacccctgataacactcaaaggttcctcgacgaactcgatctgattgatgaacgaaaagattcggccctggttcgtatacaaaattattagaatgaaacggcttgtcattacaattcaaatgttcggcaacgaagattccatgaaggagatcgggtcctccgaaaagtttttcagaacaccgccgaaccaaacgctggaaagctcgagacgaactgggaaggaccatacttgatctctaaagttatccgacccggagtatatgagcccgcagacttaagcggcaaagccgttccaagatcctggaacgcaatgcacctaaggaaatactacaaa

SEQ ID NO: 165193 - DNA, 1637 bp, Arabidopsis thaliana landsberg
atggcggatattgtgaaacagatcttagtaagaccgattcaattagcggatcagataactaaagcgtcagacgaagcttactcattccgtcaagaatgtctagaggtcaaagccaaaacggaaaagctcgccggtctcctccgtcaagcggcgcgtgcaagcaacgatctctacgaacgtcccactcgccgtatcatcgacgatacagagcaagtcctcttcaaagccctagccctcgtagagaaatgccgcgccacgggactgatgaaacgtgttttcaccattattcccgcggctgcgtttaggaaaatcacgatgcagttagagaattcaatcggagacgtttcttggctcctacgtgtctctgcttcaggcgatgaccgtgacgatgagtatttaggtctccctccgatcgctgcaaacgaaccaatcctctgtttgatttgggaacaagttgcgatactgttcacaggctctctcgatgatcgatctgatgcagcggcttccctggtgtcgcttgcacgtgacaatgatcgatacgggaggttgattattgaagaaggtggtgtacctccgttattgaaacttgctaaagaaggtaaaatggaaggtcaagaaaacgcggctcgagccattgggttattaggacgagatccagagagtgttgaacagattgtgaacgcaggtgtgtgtcaagtgtttgcgaagattcttaaagaaggtcatatgaaagttcaaactgttgttgcttgggctgtctctgaattagcctctaatcatcctaaatgtcaagaccattttgctcagaacaacatcatccgtttcctcgtgagccatttagcttttgagacggttcaagaacatagcaaatacgctatcgtgagtaacaagcaaacattgtcgtcgatccatacggttgttatggcgagtaatacgaatccggcggataagaaggagaacaatgagcaagatgagacaaaaagcaatatttcacatcctttgagtaatcaaacaccgagccagatgcatagcttgattgctaacacattggcaatgaagggttcaggtcccagttcaggttcaggctcaggttcaggttcgggaactaacaagaatcagataaaacagagcaatcaacagcaccagaatcataccaagggtggttcaaaccctagagggaacaatcctacgcatgtttcattaatgggcacaagcattaaaggaagagagtatgaggatccagctactaaagctcagatgaaagcaatggctgcaagagcattgtggcaactctcaagagggaatctccaaatatgtagaagcataacagagtcaagagcattgctctgtttcgcggttctgttagagaaaggagacgatgaagtcaagtcatattcagctttggcaatgatggaaatcacagatgtagcagagcaatatccagaactgagacgttcagcctttaaaccaaccttttctgctgcaaaagctgtagaagaacagttacttaaggtgatcgaaaacgaaaccctggacctactaatcccgtgtataaaatcaatcggtagtatttcaagaacgtgccgagcatcggaaactaggatcattgcaccactcgtgaagcttcttgatgaaag

SEQ ID NO: 165194 - DNA, 1677 bp, Arabidopsis thaliana landsberg; identical to SEQ ID NO: 15235

SEQ ID NO: 165195 - DNA, 559 bp, Arabidopsis thaliana landsberg
gttgggcttctcgcatccggtcgagtttgaggtaccggagggcgtctccatcgaaacgccgagcgcgaccgaggtcgtggtcaagggcgccaacaagcaggttgtgggccaggtggccgcgaagatccgcggtttccgtccgcccgagccctacaagggcaagggtgtgcgttacgccggcgaatacatcaacaggaaggaagccaagaaggcgtaaggaatcccgtcggggttcctgcagcgtcgatccgcttccggagattgaacatgaaagacaagaaacaagcccgtcagcgccgcgccaagtcgacgcgcgcccgcattcagcgtcagaccgtgccgcgtttgaccgtgtatcgcaccggtcagcacgtgtatgcccaggtgttcaatgccgccggcgaccaggtcgtggcctcggcttcgactttgcagaagtcggtcagcgaaggcctggacggcaccaagaacatcgctgccgccacggcggtgggcaaggccgtcgccgagcgcgccttggctgccggtgtcgaaagcgttgcctttgatcgttccggtt

SEQ ID NO: 165196 - DNA, 1139 bp, Arabidopsis thaliana landsberg; identical to SEQ ID NO: 19518

SEQ ID NO: 165197 - DNA, 2445 bp, Arabidopsis thaliana landsberg
ttgaaattcttaagatcgctttcttgaacaacttctactataatgccaagtctaaggagctgagaaccaagctgtctaccttcaccaaaggtccagctgaagctttcaaggcatcatgggttagattcaacgagtatcaatgggattgcccgcatcacggctttagtgaggtacaacttcttggtacgtttttaagaggagtttattggagataccagatagctctcgatgcagcgagaaatggtaacttcaacacacgctatccagttgatgttacccctttgatagagaaccttgccagcaacaatagtaccaagaatgctgacctcgaaagaaaaaaaaatgctggagctattttaagaaaacaaatggccaaaagtaaatgctaagttggattcagttcataacttgcttacagggaggaagcatgtccactttgcagctgaagcagagactattgagcctgagtttgagttagaagaaggagtcttctacatagatggacaaggttacaggaagtttgggcagccacatggcaacttcaatggcaacatgtttacaaagaatcagagttcttcaggctacactacaaaacctgctttccaaaagacctttcctcagaacaacttttagaggacttatggtaattcagcttaccaaacccccccttgtaacgaccgcgtccccgggacggggtctcacacccctccaccctcagttgagacaagaatggaatcgatgcttgagcaaattctggagagccaaaaaaaccttgttgtggagtttaatggcaagttggaggctgtctacacagatcttaatgggaagatcggcaatatgagctctcacttgaagaagctagatgtacaggtagctcaaactgcataatctatcaagagacaagagggtttgcttcctggtaatcctgatgctaaccctaggaagagctgcaatgccatcttgatcagagaaggagatgatgtttgggaggaattggacactgaagacgagttggagctcgtagttgtaatgatggtgtcgaccgacactctcctgtgtcgatcggcaccatacgagactctttctctaagacgactcaatacgacggtgttgatcgatacccctctagtgtcgatcgacactggatccggactgccccttgtgaggtgcaagtacctatgtaacccgagtctgtctacactcctcttgtcccctatccgaggaggcgtcgttgtaaacaggagattcatgctgccaagtgcacatctataatggagaagatccttcatactcttcctaaggatgattctcagacatcttctgcctcactcaacaggtatgtcaagcgacttgttgacaatggaatgagctcagatgaagctaagctgcttaccaaggacatcagtgcaatcatgctgcctaaagccaagaaggagaagccaaagagagtggacatagctgagtacatccgcaccatcactctagattagaccacttagaagctcccagatccaggtagctttattcttgattgctctagctccacaagcaggttcagaaattccttgtgtgatatgggatcaagtataaactgcatgcctaagtctgttgatgagagattaggcatgactaactacaagccgactaaaatcactctcctttttgtggatcgctccaaacgcatccctgaaggattccttgaagatgttcatgttaaggttggtaactccataatccctgctgatttcgtggtcctggactatgagaaggaacccaaggatccccatatccttggaagagcattcctagctacagctggtgctaggtttgatgtgaatagaggtaaaatctctctaaaggtttctgatttagagatgaagtttggcatggatggttcagagcttactaaaactatcagtagcattgcgtccagcatagacacaactcctcagactgctcagaatcccacaacagagccacacacaacgctcccatcagctcaactcgccaatgagagttgtagagatacggtgtcgatcatcaccaccacttgacagatgattctacacattctcttcagcccacacatcttgaggacctatgtgataagttctgttctatctcttctcctgccttaccttcgattaattccttagattcttcgaagtctgcttcactagataacaagcctagagttcttcgaaagcttgtttcttctgttgttcttgcaggtgacgagaagagtgtcgatcgacacccgcagctgccccatctagatcagtttaaacacctccttggaaggcaaggaggtagcagcaatcctccaccactccacccacatcctgaactccgtcaagtcaagttattgactcaaaacaagcgtttagtgggaggcaacccactggtttgatttgtctttccctctcttttattttcttttatttt

SEQ ID NO: 165198 - DNA, 543 bp, Arabidopsis thaliana landsberg
aattaccaacaaacacaaaatcagtggagttctcaacttttcgattgcatgaacgacagtgaaaatggttagataactttctaacacaacaaaaaaaactaaacattctatattctacgattggtttctccattttttgttgttcttgttgttgttgtgcattggattagccgtgatcacattgatagctccatgcgtcacgttcggacagattgcggagatcgttgacgaatgcgcgacgcgtaagtcattcattcatacacaaacctttattaagaaaaacactcatagattgtaatgtctcatgtgtgtaaacatatttctatcacgcagcttgtgcgacagctgggttgttgtacggagcactattttttaccggggcaagttttgtgtattcatacatgttcagggccaggatacgaaagaagttcgggttaccggatgctccggctcccgattggatcactcacttagtctgtatgccgtttgctctttgtcaagagtatcgtgagctcaagcaccatggttttgaccccattcttg

SEQ ID NO: 165199 - DNA, 570 bp, Arabidopsis thaliana landsberg
tccttgattgatgtgccgggggattgcggtgacgagtatcgcaggcctccatttttaactgctgccggtgacacaagcgaccacctggaggagattgataaaggcagccctgtaaggcaggctattaccatgggcaaacgagtggaatactcatctggaagcccatgggagcctattgccgtaaatacaccatccaatatcgattactacatatgtgcgttttctaaccctctgcagggctattgcagggccgttcggacagggaacaagatctacgtctctggcaccactacacaaaacccaattgccagtctcccggttattggtggcaagtcgcctcgcagtcagaccgtatatgtcttggacacaatagagcattcgctgaaggcgcttgattcgtcgctctccgatgttgtacgtacacggatcatggttcgggatgccagtgtttgtgaagaggttagccaagctcatggctgggtatttgggactgctggtgtccatccagccaatacctttgtaacagctggtctgataggtgacgacatgcttgtagaaattgaggctgag

SEQ ID NO: 165200 - DNA, 809 bp, Arabidopsis thaliana landsberg
tcctcatctggcgcagaggcgtggagctggagttggagttacaggtcgggttggggatctgacgggtcaagtagctctagctcaggtcctggttcagactctgacggcccaagttggagttggggctcgttccctggttggggatccgatgataactccggcttgggtttggcttcaaactctaataatggctctggttggggttggggcacgggatccaaccgcgattctggctcgggttcaggtaccaaccgtgatggttcaagaaggagttggaactggagtcttaagtcaggctggagttggagttggggctcaaacgataacgacgttccggttcggattcgggttcgggtttggactatgaaacaccaaaaaagatcatagtgggaggatcagacggatggaaaaaagggttagattacaaagattgggcttctaagaatgctcctttctacgtcaatgatgttcttggtaagttagtttatgtgtactaccttattttctaatgttaattaacctaattggtgaataacttgttttaacatgggtgcagttttcaagtacgacaaatctgctaagagaaggaataatgtatatttgttcaaagaccgatggagttacatgaactgcgacattaaaaatgcgaggaagattggttcatcgagaaaaggatcagaagaaagtttctgcctaacacttaagaaaatacagccttacttctttgcctcgggggagcatgatggtgattattgtcgtaaccataacatgaagttcactatcttcccagtcctcaccgttctgattaa

SEQ ID NO: 165201 - DNA, 320 bp, Arabidopsis thaliana landsberg
tttcttatcagtatatgaagattagactctgtttccttttgcattgtgttggcggattagacaaagcaaagcttttcttagcactgaataacaaacattttgttcatttaaacagtctgtttgatactttgatttggcataatgatgcacatttgttgcttttgattcgtatagaatatggtttatacgacaactttggttttgtttcattgtactgcctttgagttgtctttggttatcatgaaaagaatgttaggttccgtgaaatcgataacgagagaataagtcgtaaaatgatacacaatgatggcgaagaagaa

SEQ ID NO: 165202 - DNA, 2625 bp, Arabidopsis thaliana landsberg
ttgcaggtttatgcatccgggggttcaagctggattatcgacagcggatcacaaaccatatgatgggggagaagaatatgttcactcctacgtcaaaaacaaggattccaaaattcaataatattcggtgatgggaatcaaggcaaggtaaaaggattaggtaaaattgctatttcaaatgagcactctatctctaatgtgtttttagttgagtctcctggatataatttgttatccgtaagtcaattatgtaatatgggatataattgtctattcacaaatgtagatgtgtctgtcttcagaagaagtgatggttcattagcttttaagggtgtattaaacggtaaactctatttagttgattttgcaaaagaggaggccggtctagatgcatgcttaattgctaagactagcatgggctggctatggcatcgccgcttagcacatgtggggatgaagaaccttcacaagcttctaaagggagaacacgtgataggtctaactaatgttactttcaaaaaagatagaccttgtgcagcttgtcaagcagggaaacaggtgggaagctctcatcatgccaaaaatgtgatgacaacatcaagacccctggagttacttcatatggacctcttcggacccgtcgcctatctgagcataggaggaagtaagtatggtcttgttatagttgatgatttttcccgcttcacttgggtattctttttgcaggataaatctgaaacccaagggaccctcaagcgcttcctaaggagagctcaaaacgagtttgagctcaaggtgaagaagataaggagcgacaatgggtccgagttcaagaaccttcaagtggaggagtaccttgaggaggaaggaatcaagcacgagttctccgctccctacacaccacaacaaaatggtgtggtagagaggaagaacaggacgctcattgacatggcaaggacgatgcttggagagttcaagacccccgagcggttttggtcggaagccatgaacacggcttgccacgccataaaccgggtgtaccttcatcgcctcctcaagaagacttcatatgagcttctaaccggtaacaaacccaatgtgtcttactttcgtgtatttgggagcaaatgttatattatagtgaagaaaggtagaaattctaagtttgctcccaaagctgtagaagggtttttgttgggttatgactcaaatacaaaggcgtatagggtcttcaacaaatcatcgggtttggttgaagtctctagcgacgttgtatttgatgagactaatggctctccaagagagcaagttgttgatcttgatgatatagatgaagaagatgttccaacggccgccatatgcaccatggcaattggagatgtgcgaccacaggaacaaacggaacaagatcaaccttctttctcaacaatggtacatcccccaactcaagacgatgaacaggttcatcaagaagaggcgtgtgatcaaggggagcacaagatgatcatttaatgggggaagaagcacacccgacacctccaacccaagttcgagcgacgattcaaaggaatcatcccgtcgaccaaatattgggtgacataagcaagggagtaactactcgttctagattagttaatttttgtgagcattactcctttgtctcttctattgagcctttcagggtagaagaggccttactagatccggactgtgtgttggccatgcaagaggagctcaacaacttcaagagaaatgaagtttggacactggtgcctcgtcccaagcaaaacgttgtgggaaccaagtgggtgttccgcaacaaacaagacgagcacggggtggtgacaaggaacaacgcacgacttgtggcaaaaggttatgcccaaggggcagggttggactttgaggagacttttgctcctgtggctaggctagagtcaattcacatattgttagcctatgccgctcaccattctttcatgttgttccaaatggatgtgaagagcgacttcctcaacgggccaatcaaggaggaggtgtacgtagagcatcccctggcgttgaggatgaacggtacaccgaccacgtgtgtaagctctctaaggcgctctatggacttaagcaagccccaagagcatggtatgaatgccttagagactttttaattgctaatgctttcaaggttgggaaagccaatccaactttattcactaagacttgtgattgtgacttatttgtatgccaaatttatgtcgatgacataatatttggtttcaactaaccaaaagtcttgtgaagagtttagcagggtgatgacacagaaattcgagatgtcgatgatgggcgaattaaactatttccttaggttccaagtgaagcaactcaaggatggaaccttcatctcccaaatgaagtacacacaagacttgatcaagcggtttgggatgaaggacgccaagccggcaaagacacccatgggaaccgacggacatgtcgacctcaacaaaggaggtaagtccgttgatcaaaaagcataccggtctatgatagaatccttgctttatttatgtgctagtagaccagatatcatgcttagcgtatgcacctgtgctcgcatttcaatcc

SEQ ID NO: 165203 - DNA, 450 bp, Arabidopsis thaliana landsberg
  unsure (1)..(450): unsure at all n locations
attctcagattcagttataaaaaaaatctgaatatgataaacaaccgagnnnnnnnnnnnnnnnnnnnnnnnnntctctatgtgcggaggatctacgacggctgagtgttgcggtgtacgacggcgagttgtgcagccttatgtctatgcgctccttgtagcgtcgtgaatctcgtcgtactcgctgtatacaagctccctcgtggactctgccgccgcgcaatccgccgtatacgacggaaacgattagcgaaaaaggagtttgtagagagtggaagagagtttggtagaggaggnnnnnnnnnnnnnnnnnnnnnnnnnnnnnngagcagagatgaggaagaagaagaagaagaagaagatgaggctgtgattgcgttggagaaggagatgtggagcagattttacagtggtggtttctggcgaagcctttctcaagctgaaacggcg

SEQ ID NO: 165204 - DNA, 2463 bp, Arabidopsis thaliana landsberg
atatatcatttctcaaatgatatctttaataaaagctgaggatatgtgtccagagctggcaacagatgggacaggatacgttactcaacttatccctctcatcaaatctctagatctggattcgaatccggagtcggagcaagagccgaagatcatatcactcattaggcaaataatctctctcagaaacacgtatgtttctggaccagagtcgcaggtggtatcactcgtgactcggattatatctatcaccagctctacagacttggatcccacggaatcacaatggaggctcacgtcagtcacttataaaacatgccgtatcctcaacgaaatgaaggattcgaattcggagatgggatcactcattaatcaaatacgcgatctcgttgatgcagatgagagacgaaagccagagtcgaggctcatatcacgcatcactcaactaatgtctctacaaactcttggagttatactccagatagggattcgaagatcatatcactcattactcaaataatcttgctggtcaactcaatggatttggattcgcagccaaatcaggagtcggagctcatatcactcattactcaaacaacctctctcttcaactctatggatttggattccctcccaaagccgctgtcggagctcatgtcattcactactcacaaaatctctcgcttcaactatatggattctgctacggatcagaagctcaagttgctcttttttaaaataagggaactcgagccggagccggagctcatatcactcctccaccaaatttactacctcgtcaaatctaaggatccagagtgggagaagcttatttccttatgcccacacgtacaagtaagctttcacgacggaaaatttcacgtgactggaaatgtccagcggggcagcaataaaaagcgggactgccaatttgaacgctacaagttttcaggagaatgacttcactcattttcgatgtcgaggttgcaatggtgagaaccataaaggttatgagaaggctccggttgatgtcaaacactctcttcatccaaaacattctcttcagcttgtttcgtcgcaaccttctagtgttagaacgagggaatgttattgttgtgatgaagatctggcccatatattctattgttgcttggcttgcaattatgctatgaatgtagcttgtgtgaagaaacctagtgtcttatatagagactatacgaggtggcatgagcataaacttgctctgtttccaagactgcaggcttccagcttaacttgcaacctctgtgccttggctgattctagctcgcctatctatatgtgtcccccttgcgactttgtcgtccatcaaaggtgtaccggcttaccacgtgttataaggatatcccgccatctccaccgtatatcatttacctactcctttgaacaaggagatttgtgttgtagtgtttgtcgcagaaagatagacaatgattacgggggctattcttgcatcaaggacggttgttcatatgcggctcattcaagatgtgcaacacaaagaaatgtgtgggatggcatcgaacttgagggagagccagaagaagttgaagaagaagtcgttgaaccgtttgtgacaataagccatggaatcatacaacatttcagtcacccaaaacatcatttgaaacttgacgagaacacgagcagagattacgacgaggataagttgtgtcaagcatgcatcatgccaatctactttggtaacttttactcttgtgtgcaatgtgattatatactccacgacgcatgtgcgaatttccctcgcaaaatgcatcatccgatacatccacatctgctcactttagtgaactctgatggtgttatcaacgttagaaaaaaatgttcagcttgtccttggatgtgcacaactggtttcttctatgagtgcagtaaagaagatttccagctacatgtgcagtgtgccaacgtttctgagccactagtccatgaaagtcatatgcatcctttattcctaacaaccaaaccagaagagtggagagtatgttccgcttgcaaagagtcagattgtactgtgacaaatgaaacattcaactgcatagagtgtgattttgctttgtgctttagatgtgctactttacctcaaaagttgaggtataagcatgacaagcatacgctcactctttcgtatggcgaggagacaagtaccatgccatcttggtgtgaaatttgcgagagaaatataaatccacaggagcgattttatatgtgtgatgagtactgctgtgtcaccctacacattgaatgtatgcttggggtggctttatacatcaagcctggtttatcgtggatcagcttcaacaataaaaagatgtatgctctggccaacaatcatcatatgtctcgacctctttgcttcatttgcaaggagcgttgtccccacaaaatagttttcaagtacga

SEQ ID NO: 165205 - DNA, 445 bp, Arabidopsis thaliana landsberg
atgtggcagaaaaagatgtttttctgcttgataacactgaagctgagccagtacaggcgtaaagagaaaccgatccttccagcgaacaacacgaaccctcatgcacttgcgagcgttcatacgtgggaacatggcgatttcctgtgtaaaggatatatccaaagccgcctctttgatctgttgtacaacatttactctaatgtggagatttttaagagcatccacattggttaatcccattatgggtggtgtctcaactttatttaattataaaattagtactattttaatttgaagacatttattattgttgttttaattgatcatctcccattggtgatccttgaatgggtgtcttttaaaaaaacaaaatattagtaaaaagtttattgtaacaaattttggttaattgttatgcaaaataagaaaaattaaaatataaatt

SEQ ID NO: 165206 - DNA, 324 bp, Arabidopsis thaliana landsberg
ttggaaaagatccatctttcctggaatttgcggcataattgcgggttccttgtatcgtttgaacatccttggcatccgcaaggcaaaggttatccacatcattatttatctctctgtcaacttgttggctccttagttttcaatgtcactagagtaacactaaatttgtctgaccacatcacagttccctgagtttgtggcttcgttcttctcgcggctttcttttccctctttcggtaactctcctcctccagcaccaagcagtaacatcgttgggactatatcacctaacacagggcgtcgagcagaggtgagtcatccttt

SEQ ID NO: 165207 - DNA, 1342 bp, Arabidopsis thaliana landsberg
ttaggaaatggaagtttaacacctataagcattttttccttttccaatttagtggaaaaggaaaaagttgagacatataagcataaatcgtggaaaggaagtaccgacttagggttttctccaagatggagcaaagagaagagaagaccgaaaatatccagagaaaaagaagcagaggaaaatcttcatcatcatccttacctctcgatctaacctcggagatattctcaaggctgcctgcgaagtctgtcgtgaggtttcgttgtgtttcaaagctttggtcatcaatcaccaccgctccatatttcaccaactcctttgaaactcggccgaatctcatgttctttttcaaagaaggtgacaagttctttgttttcacgattcctcaacacaatcagaatccgaacgagtcttattcttattcttcttctgagattattgatagttaccatacaacctatccaaaacgttgttgcgtcaccactttaaccgagtcggtccacggcttgatcttctttcgaaaagcagcaacccctataatttggaaccctactatgagaaagttcaaacctttacgcaagctggatgagaggtggaagaatataaaagtctctttagggtacgatccagttgatggtaaacacaaagtagtgtgcatgccgtatggtaatgctttttatgagtgtcgggtgttaacattgggatcagatcaagaatggagaactgttaaaaccaaccacaaaaatagcccttttacattccatggtggagtttgttatagacaatccagatgcatcaacggtgttatatattatcgagctgatactaattctggtcgggtgatattgagtttcgatgtaagatctgaacggttcgatgtgatagaattaccatgggatgagaattttgggcttgtgatgatgatgtcttataaaggaaggttagcttgtcttggtttcaatcatgagaagaatagtcgttcactgtgggttttggaggatgtagagaagcgcgaatggtcgtgtcatacctatttacctatttctcattatgagccgggtttggagaactatttcaatctaacaggtatcactaatgatggtgaactgatttacgtaccaaacactgtgctcgaacgttttcatgttatatattttgatgcaataagagagacgtttagaagagtcatatacaaaggagttgcagataaaggttttcgactacgcaatggacttgaagacaaacctatacgtagactccactttttccccaatcacattgaaactctcatgtctttgtaatggactttgaaatccctttcttggtttcttcttatttttta

SEQ ID NO: 165208 - DNA, 1475 bp, Arabidopsis thaliana landsberg
atggatcctaaggggaaaggaattgtgatcaacgacaaagaaaaggaatccttcatcaacgagccgaagatgacaagtctaccgactccggctcggggcatagacggaaggaagggaagaagaagaagacaaggcgcatcaaggagatcatctactacgacgatagtgatgagtctacttcttcccaaaaggacgacgacaacgactacaaaaagacggtcaattcgaacttttcatttgattattctcgtattcaacatagttcgaattcacatttgctttccattcctcttggcaaacctccacacttcgatggggaggactacggattttggagtcacaaaatgcgtagtcacttattctctctccatccaagcatatgggagattgtggagaatggaatgaaatttgatagctcggatagccctatgcttataaatgaacaaattcatagaaatgcacaagctactactgttctcttagcgtctttgtgcagggaagagtacaataaggtgagtggcttggacaatgccaagcagatatgggacaccctcaagatctctcacgaggggaacgacatcaccatgatcaccaaaatggagttggtggagggcgagcttggaagattcgccatgataaggggagaggagccaacacaaacctacaacaggctcaagtccctggtcaacaagattcaaagctatgtaagcacaagatggacggatcatgacgttgttcgcctcatgctaaggtcctttactgtacttgatccacatctggtgaacaatattcgtgaaaatcctaggtacaccaagatgtcgcccgaagaagttcttgggaagttcgtgagcgggcgaatgatgatcaaggaggcgagatacgtggacgacgcattgaatggtccaatcaatgagcctcaaccctttgctcttaaagcaacaagaagcaaggaggcgctacctagcaaggtggcacaagttgaggcggcagggctaaatgatgaagagattgatctcatcatcaagcgcttcaagatggcgctaaagggtcacaagggacagccaagtaagaccaagacaaaggggaagcactcatgcttcaagagtggtaagattggtcattttatcgctaactgccccgagaatgatagtgaccaggaacaagagaacaagagggaaaagaagaaagcttacaagaaggctaagggtgaggcacaccttggaaaggagtgcgactcggattgttcgtcgtccgactccgacaacgaaggactcaccaccaccgccttcaacaaatcggccctcttccccaacgagcgtcatacatgcctcatggcgagggagaagaaggtatgtactcgaaatactacttatgcttcttcaagtgaggacgagtctagtgatgatgatgaaatagattattcatgtttattcaagggcctagatagaaccaaggttgataaaattaatgaatta

SEQ ID NO: 165209 - DNA, 1426 bp, Arabidopsis thaliana landsberg
tgaagctctttccaggcgtcttctcatgcttcctcacggccttttactctgcccattgcccctacttctcctggcgagcttattaaggacatgccaccccggcctctccaagcgccaatcacctctgcgaatgctccgaaagttgcagacccaacacccacagccaaaccatccgctaccacggatgcgccatggcttcatttgtttaaaggcaattcaaggcccttaaccaaaaaaggaacagcctttaccctcccttcgggtgaagcttgtgtgaagattcccatctctatcattgaaaagcatcaaaaagcatgggattgtttcatccttgggcaattctactcggatccaccagctcagggcaccattcacgcgattgttaatggtatatggagtaagtttcatagagatatctctgttaccaaaatggaaggcaacgcgtttcctgtttcgtgttccaaatgctttaacaagaaatcggatcctcacccaaggtctctggcagattgaaggccaaactatgtttgttgcaaattggaaaccaggatccattccacaaaaactagagttgtcttcagcgccagtgtggcttgaattgaggaatgtccctcttcaattctttaacgaggatggttttgaattcattgcaggccttgttggtgagcctaagggtctgcatccttctacagctaatttgtccaaccttgaagtggccaaagtcttcacccttattgatccaaggaaaccccttcctgaggctgtaaatgtgcaattcccttcaagtgaaataagtagagtgcttgtgtctagcccttggatgcccccagtttgcccgttctgtaaagaagtggggcacaaccttaagcgatgcaaggtcgctccggtctcgtgtcacgtctgcaattcaacttgccactcggtttcgaattgcccgagagctaaagctaagccaaccaagaaagcttccaagttaaaacctaccgcagcccctggagagatctcatccgactctccccttgtggcttctgctagctctattgataaaggaaaagcaattgaagttggtccgggaatcaatgcttctcttgttaagcagacggggactgtttccttatccaagagccctactacgagtaaatcagagtggatccaagtgaagccgaattctgctgcaaagaaagacatgcccgcagctgcgtgtagttcctctcctgccacagatagctcctcacccaccgtttttgctatcgataatttgattaaagagcaggattcgttggactcaaagagtcttgcgtctgattcatctgaccttctttcttcagaagatggagttgacccggagattaacgaatctcagttcttaaaaatgttctcacaaagacaacaaagagttgctaggggcaagggccctaaacatact

SEQ ID NO: 165210 - DNA, 1544 bp, Arabidopsis thaliana landsberg
aggatgtctacttggaaagcaattcaaaatgagctttccaaaggagtcaagttcaagagcacaaaaaccgttggagctaatacacaccgatgtgtgtggtccgatcaagccgaaatcacttggtaaaagtaattacttccttttctttattgatgatttttcaagaaaaacatgggtatattttttgaaagaaaaatccgaggtgttcgaaattttcaaaaagtttaaagcccatgttgagaaggagagtggtcttgtgatcaaaaccatgagatccgaccgtggaggagaatttacatccaaggagtttcttaagtattgtgaagacaacggcattcgaagacaattaacggtgccaagatcccctcaacaaaatggtgtagcggaaagaaagaatagaacaattcttgagatggcaaggagcatgctcaaaagtaagagactaccaaaagagttgtgggcggaagcggtcgcgtgtgcggtttatctattaaatcgatctccaacaaaaagtgtctccggaaaaacaccacaagaagcttggagcggaagaaagcccggtgtttctcatttaagagtctttggaagtattgctcatgctcatgtaccggatgagaagcggagcaaactagatgacaaaagtgagaagtatatcttcattggttatgataacaactccaaaggctacaagctctataatcccgatacgaagaagacaattattagtcgaaatatagtgttcgatgaagaaggagaatgggattggaactcaaatgaagaagattataacttctttccacattttgaagaagatgagccggagccaacaagagaggagccaccaagtgaagagcctactacaccaccaacttcaccaacaagttctcaaatagaagaaagttcgagtgaaaggactccgcgttttagaagtatacaagagctctatgaggtaaccgaaaatcaagaaaaccttaccttattttgtttatttgcggagtgcgaacccatggatttccaagaagccatttaaaagaagatttggagaaatgccatggatgaagagatcaaatcaatacaaaagaatgacacatgggagttaacttcacttccaaatggacacaaggcaattggcgtgaagtgggtgtataaagcaaagaaaaactctaaaggagaagtggaaagatacacagcaagataggtagctcaaggtaatagtctagaccccggaattgaatacgacgaggtacttgcacccgccgctcgtctagccacggttagactaatcatctctcgaacggctcgaatcaagtggagtagacgtccaatgcatgtcgactcggccttcttggaggaagatcttggaaaagtagtggaccttgagcacccacaaggctgcatagtcaaagctgaaggagccatagtcttggggctagaataggcgctttatggatcagaacaagccccaaccccttggaatacaaaaattgactagtattcgaaggaggtagatctcaccaagatgacgatatgagcatgcaccctat

SEQ ID NO: 165211 - DNA, 383 bp, Arabidopsis thaliana landsberg
  unsure (1)..(383): unsure at all n locations
atgtcgacgaaaaagatcatgttgaagagctcagatggtaaaatgtttgagattgaagaagagaccgcacgccaatgccagaccatagctcatatgattgaagccgaatgtacggataacgtaatcccggtttcaaacgtgacaagcgagattcttgagatggtgatcgagtactgcaacaagcaccacgtcgatgccgctaatccttgctccgatgaggatctcaagaagtgggacaaggagttcatggaaaaagatcaatacacgatctttcatctcatgaatgctgcgtatgcctacacatcaaaagccttcttgctctagcttacanacagtcgcggatatggtcacgacaataaatgggcttttgaatgagcggatta

SEQ ID NO: 165212 - DNA, 374 bp, Arabidopsis thaliana landsberg
gctatgcgctaaacataaggatgcttattttatggcctatctaccaacttgacattaagaatgcttatttacgacgtatgagaccgtttgcctgttttcatccccatatttgtggtaaatggtggttgagattttgaagacaaagttatgggactctcatctgctatcatttctagtacgtttgcgctatagttttttatcgaaaaactagattgaccgtgtttcacatatagagaggctaatcattttacggacatgttaacaaactatgcttgtctttaagcttttatgctcttgtttatgttctccggtgtgcggatgaaatcttacgggatgatgtttctagacctgtttgttcaagacgagtgattgtg

SEQ ID NO: 165213 - DNA, 942 bp, Arabidopsis thaliana landsberg
caatgaagctcgacctaaatggcggcgatgactttgttgacacatcagtgaatcaaataagtgcattcgatgacttcgagatatctcaactctttcactgcgacggcttattgctttgcgtctccaataaacactactacagcaacacggtcatggtatgtaacatgtacttgggggaaactaggttgattgaacactgttgcttgttggagggattcgacaacttcggctcgtatgctttcggatatgatagcagcaaaaaccgtaaccacaaaatctttagaaagaaacttgtttctggtggttatgaaatctacagtttcaaatccgattcatggaaagatcttaatgttgatctcggggaatctacagaactttgtgaactaggaagcgtgtctttgaagggaaatgcttacttttcggttataacgaaacatgaagaagaagaactttgggaaaataatttactctgttttgacttcacgacggagagttttggaaagtttctgtctctgccgtttgacaatgtgactgctgaagaagaattcggcattatggttttatcttgtgttagagatgagcatcttgctgtgttatatcaacttgacactttaggtatttggatttcgactgagatcgagcccaataaggtgtcgtggagagagtttttgcaagtagacttgtatacgctggatggttttccggatgcatttacagctgggagattcattgttgacgaggagaagcaagtcgttgtagttttcaatgaagctacagagatcgatctcaaccacggaaacgctttcatctttggaagagatggatacttcacctcttttaacgttggagatactccgccccaagacttcacttcttatgttccaagcttagcctcattgcaaatcgagaagacgggtggctaaaaggaaagcaagagatgac

SEQ ID NO: 165214 - DNA, 565 bp, Arabidopsis thaliana landsberg
tgccctgccggccgtgcgtgagctgcggcccgacgtcgtgctgctggacctgatgctgcccgggatgaacgggatcgacgtgtgccgcgcgatccgcgccgagtccggcgtcccgatcgtcatgctcaccgcaaagagtgacaccgtcgacgtggtgctgggcctcgagtccggcgccgacgactacgtcatcaagccgttcaagccgaaggagctggtggcccgcatccgggcgcggctgcgcaggacggacgccgagcctgccgagacactgtcgatcggcgacgtgtccatcgacgtccccgcgcaccaggtcgtccgcgacggtcagcccatctcgttgaccccgctggaattcgatctgctcgtggcactggcccgcaagccgcgtcaggtgttcactcgagaggtgttgctcgaacaggtctggggttaccggcacgccgccgacacccggctggtcaacgtccacgtgcagcggctgaggtccaaggtcgagcaggacccggaacggccggaggtcgtcctcaccgtgcgcggcgtcggatacaaggccggccctccg

SEQ ID NO: 165215 - DNA, 1063 bp, Arabidopsis thaliana landsberg
ataaccacaagaatcactgccaaaactgccatgggagaactcgacgaagcttttatccaagctccagaacacagacccaacactcacctcacaaactccggtgatttcattttctccgacgagatcccgaccatcgacctctcttctctcgaagatactcatcatgacaagactgcgatcgccaaggagattgcagaggcatgcaagagatggggattttttcaagtgatcaaccatggcttgccttcagctttaaggcatcgtgtagagaagacagctgctgagtttttcaatctaacgacggaggagaagaggaaagtgaaaagagacgaagtgaatcctatgggttatcacgacgaagaacacactaagaacgttagagattggaaggaaattttcgatttcttcttacaagattccacgatcgttccggcgtcaccggagccggaagatactgagctccgaaagctcacgaaccagtggcctcaaaacccttctcatttcaggtgaccattttcttgattctctctcactcactgaattattgattggtgcgttcaatcacgagatcgagagtttaggcccattgggccttattagaatttcattttattatcctgaaagtgatttttttttatcatgtgtattggtagagaggtatgccaagaatatgcaagagaagttgagaagttagcttttaggctattggaacttgtctccattagtttgggtctacctggtgatcggctaaccggtttcttcaatgagcaaactagttttttgcggtttaaccattaccctccttgcccgaaccccgagctagcattaggtgttggacgtcacaaagatggaggagctttaaccgtcctggcccaagatagtgtaggtggattacaagtgagtcgtagatcggatggacaatggatccccgtgaaaccgatctcggatgctttgatcattaacatgggcaattgtattcaggtaaacgtagactttcggctcaaaaccaattagcaatgaacgaagttgcatgtcaatatatcttcgatgtattatattagag

SEQ ID NO: 165216 - DNA, 1172 bp, Arabidopsis thaliana landsberg
gagagatacatggatgtaacaactggaaagatctcatcgaacctttgaaccctcttctccaacaagagatcactcgctacggcaacttagtttccacttgttacaaagccttcgatctagaccctaattccaaacgttacttgaactgcaagtatggcaaacaaaccctacttaaagaaaccgaaatcgaccaacctgaggactaccaagtcacaaaatatatctacgccacaccggatattaacatcaacatcagtcctatccagaacgagatgaatcgacgagcgcgttgggtaggttacgttgcagcttcatccgatgactcggtgaaacgtttagggaggagagacattgtggtgacgtttcgtggaacggtaactaaccctgaatggttggcaaatttcatgagttctttaactcctgctaggttccatcctcataacccgcgtctcgacgtgaaggttgaatccgggttcttgagtttatacacatcagatgagagtgagagcaaattcggactagagagctgcagacaacagcttctgtccgaaatcttagagtttgttgattaggtaaagggagaaggtgtaggtctccccctcctggacatagcattggaaggtcattggctccactttttgcttatgacaatgcggaactaggtttaaaccggaggattggcaagggagatattccggtgaccgtgttctctttcgcaggacctagggttggtaacttggagtttaaaaaacgttgccaaaaagttagtggtaaggttcttaggatcactacgtcattgatccggtcacaaacttccaggtgttttattcaatgagaattttagggttttaggtggtttttatgagcttccatggagctgttcatgttatgttcatgttggggtggaactcacgctagattttttcgatgttcaaaacatttcttgcgttcacgatctccaaacctatatcgatcttctaaaccaacggagaacgaactcgagatcagtcgattccgatgaagatgaggacagtgacaatgttgcattagagtttttaaagacaaatggcgagaagatgatgttcttgaagagacaacgaatgatgtattggtccaatgccgtggatctacttttttctttttctaaccatatgtcgtattgtaatatattt

SEQ ID NO: 165217 - DNA, 1255 bp, Arabidopsis thaliana landsberg
gtaaaagttggaaccactctaatttctagctctttcgccaatggctgaaagcaagagtttttgagttatgaaataagtaacataaatataaagacacattcagcggaaaaagaagaacaaaccttgttgtcttggttacaatcaagcttaagaaacaccatgtcctgatacttctacgatagctctttgtatttgggagcaatcactttgcaaggaccacaccttgcaaaagccaaacgaggattgaaaaaaaagagaggcacactgatttttctcaacaccaaaacagaacatttaatagtaaactcatctcaagcattcatgatgatggaaattggaacaccttttatgcttatttattaaatgtacatgctctaattctcctgaaagtctcactattcataacttcatatccttttgtatatatcattcctaaccaacaaatgaattcaaaagaatgtgtacagagaagcagcagcctgatactgtgaagattatatatgatacttacaatgctgtaacttttgaatacaattgaaagtaacaaggtgatcatatactaaccctaaactatggaagctacacaatgtgaggttcatagagctaaaaataggccaagagaagcaaaggatatggttagagaccatgatatgattatgttgtagcaagaattggcaattgagaattaaagacatgaggatctgctaaagcaaagttctctggtaaacaacttagcaatgttatatcaactgagaaatccctaatcaaccctaatttccaacgacttatccaaaacctatcaaaaatctaagtacatgaattttccaattctctgaacatgcgacggaatcaagtagttccaaacaagagattgcattcaagtaattccaaaattcgcaccaagaagaagaagaaagtgatcgaaacgttaccactgagcgtgcatgtcgaggacaacattcttatcaccggcgggtttaacaatgggccagaacgtgtccttatcaacctccgtcacctggccaacagtgacattcactgtttctaagctacacctcaccacacaggaaccaatccttctaccggaatctaaaacaccaccaccaccagaacagaatccaattttcgtcgcgacgcccgaattcgggatccggcagtgctgcttcacgggggaaaatcctccggcgccggtagatgtaatcggagaataacggaaagacgtcggagatggagcaagtcggagagagagaggcat

SEQ ID NO: 165218 - DNA, 643 bp, Arabidopsis thaliana landsberg
atgatgaccctcaaaatatgaagagtttattaaactcatgaatgatattcgtgatcatgggtagaattgtcttctctcccttccctgttagatatgtttgtttgctcttaatttcagctatgacaacaaaaaaacacattgtgaattgttttttgatgttattattctctttgtagtgtcgataaggctagtggcattgcaaagttgactgaactcattaaaggacacccgaggctgcttcgtggtttaagtttcttctttccacaggttaacagagacatccatcatgaggctaagagaaccatcattctcaaggataaggcaaccatccctcccgaggctgcttatcggggtgctaagtctacttataccaaaataaaacaaattgagcctgactgggagaattttatgaacatgcttaaggtataaaatgctaaaatggttcataatttttttactaatgtatgattttagtaatttatatcttcgtatctgcagacaaggtttcggagccttgatactcatgtagttgagtcatttctcaagataatgataatgtatgatgaaggaaaaaaatcggaaaagaaggtgcaagaggaggtaggttctctgtgggctattttgcgttgtcctttaacttttt

SEQ ID NO: 165219 - DNA, 1191 bp, Arabidopsis thaliana landsberg
tcttcctactttaccaacattgatctctctgttaattgtgcagcaggagaagttaagtgataagagcagcaagaagaaatggaagctgtggaggatttcatcggagagcttagcatcttcttctttcaagagccgaggaagctatgcagcttcttcgttaggttcagagctaccgtctttctcggctgacgaggcttttactacggccatggcagcactcattcgagctcctcctagggattttttgatggttaagagagaatgggcttcaacaagaatccaggctgcttttcgtgctttcctcgtatgtgaatcttcactaatctctagttacatgagctattctagttgtggtttgatcattagtactcacgggtcttcttgttcattgtgttgtctgcgtcttttcttttttcaggcaagacaggcgtttagagctctgaaggctgtcgtgagaattcaggccatttttcgtggcagacaagttaggaaacaagctgccgttacactcaggtgtatgcaagctcttgttcgtgttcagtctcgtgtaagagctcatcgtagagcgccttctgactcgcttgagctaaaagatcctgttaagcagaccgaggtatatattaatctattgagtaaagtctattgaacattactttaaagtatgtgaatctggttgatgtttttacagaagggttggtgtggtagccccagaagtataaaagaagtgaaaacgaagttacagatgaagcaagaaggggctattaagagggagagagctatggtttatgcgctcacacatcaggttggtcaatgtgttttcagaacagaaattcagagtgttgtcgctaattgtaataatgtctcatgagttgttttggcagtcgaggacgtgtccaagtccaagcggaagagcgattacgcatcatggtttgcgcaagagcagtcctggttggaactggtatgatgatgttgggacattttcaaggaaaagtagtgagagcagtgtgttatctgaatatgagactgtaacagtcaggaagaacaatctttcttcaactagagttcttgccagacctcctcttcttcttcctccggtttcgtctggcatgagttatgattctttacacgatgaaacatcaacatcatcgacatctcaatcaccagttgcattctccagcagtgttcttgatg

SEQ ID NO: 165220 - DNA, 1625 bp, Arabidopsis thaliana landsberg
atgtcagctaagaagatgtttccgccttcattgactctgtcttcagacaggtaacacttctattatcttgtacacatcttcatctatttttggtcttcaggtggtctagaaaccaagacatgcctgcctttgtatgtgcgtttgacaaaacatatgacttgtactctttgttcttaataatatcacagatagagataactcttatttttattccttactctaatctgacacaagttaggttaatacgaaaagtatttgtttactgtagataatctattaaacacaaaggttagtcattttactcttcaagttcaagtaaatccagatcagagttttgtagcgtctattaaacctcaaactatctcaaaagtcaactctttgtgttgatcatatgatcaaaccatatctttagggttaagctataaacacaggtacataacctatctattatatatatatatatatatccatatactttcagaacctcaaagagaagaaagaagtcacagggatctgttagaaccaagaacctcacggtgaaaatgaagttgtatgatgctcattgtcacctccaagacaagagggtcatcgacaaagcctcgcagctcatatctgctgctttagctgtcggtgttaccaatttcgcagtcaatggaacctccgaggtttgttcccaaattttcatgatcgcttggtcactgtcatctatattacacaaacgtatacatatttttaagaggttttgttaatggagccagaaagatcccaacttggtgaaagagatgggagagacgtataaatctgttgttccttgctttggactccatccttggtatatatgggttttatgtacagactatcctttttgcaattgatgcacaaaagtttcagatcaaagtttcttctttttcttttctctgttttggtttgcaggtttattgctgatagaagccctcattggtttaaaacattgaagaagttctttgagaccactcctactgctgctgttggagaagtttgtgtctttatcacttattcatctaaactaaaatctttgtcttcaatttctttttgaattctgaaatgtttgctttgttggttcaagatttagtataaactgcaaaatgatatgttgtaatgaaaccccttttggctgacatctcattagattaacatcttcataaaatttaatgtgtgttttgcagattggtttagacaaaggtcccttagcaggaggaattgattactcagaccagctagtcgtgtttcgcccacagcttgaacttgcaaaagaactgaacaaaccagtagcagttcattgcatcgatgcatttgatgatctcctagagataatgaggtatgtatatctacatgttgcatttacaaagatatagcactaagtttctcaaaataaatacacgcagatccatagggccttttcctgctggggtgattcttcattcattcaatggttcagctgaagttgttcctaaactcgctgagcttggtgcatacttctctttttctggctggttcacttacattgatgagaaaattgccaggaagactataaaaataaatttgcttttttcctctgtaattataaaaaattctggaaagggaat

SEQ ID NO: 165221 - DNA, 335 bp, Arabidopsis thaliana landsberg
atgagccaattcattttcgaagccagcgatgaaactttcgaagccgaagttttgaaacatcccggggcagtgctggtggatttctgggccgaatggtgcggaccctgcaaagcactcggtcccgtgttggacggattggccaccgaataccaaaacaagatcaaagtggtgaaagtgaacgtggacgagagcccgaatgctccccagcaatacaaggttagaggtattcccacgatgatcttcttccgcaacggcgagatggtggatcagctagtgggcaaccagccccgtgatgccattaaaggtattattataaagtagtaaataagacgcgt

SEQ ID NO: 165222 - DNA, 2003 bp, Arabidopsis thaliana landsberg
ccttccccccaacagtagctaccacaaaaaccgggactctctctccttttctctttatgataaagccaccacaaacggcggatgctacactgcttcactctatggaggccacgttcttggcctctgtaaaagagacttccatcggcgaggatgtcttaactgggtataagaatccattcaccagattaaaacccgttgggctaatcttgttcaatcgtatcattgcaatagtgacgatagagaacgtgtttcttgtcttgtacgtaccaccgatcaatccacttatcggatacttgagcttggaccagctacgaatgacccgagtcctgttgttatcgacacatccgccaagaacatgacccttttccgccaagaatgggaagcaatggttgaccggacgcttgaggctgtaaccatgaacaattccacaacggttctcaagtattacggccccgtcaaagcagagttcagtgagtttccaaatgtttacatgatgatgcaatgcacacccgacataacttcccaagattgcaaaacatgtctgggagaatgcgtgacgcttttcaaagaacaggtttggggaagacaaggaggcgaggtttatcgtccgagctgttttttcaggtgggatctatatgctttccatggtgcttttgataatgtaacaagagttcctgcgcctcctcgacctcaagctcagggaaacgagagctctataacaaaaaagaaaggtaaaacattgatttgagtcttatttaagtttgttagtatgataaagatgttcttaggctaaaaggggtttgatgatttttaggaagaagcattggatatggtggaattattgcaatagttgtggttcttactttcattaatattttggtgtttattggctatatcaaagtctatggacgtaggaaagaatcatacaacaaaatcaatggtaagtgtacattatttcttgcttcaatcaaccacatgatgtagagagtaagtcttatatcttcttgttttttcttttagttggaagtgcagagtactctgattctgatggtcaattcatgttacggtttgatcttggtatggtcttagcggctaccgatgaattctcatcggaaaatacgcttggccaaggtggatttggtacggtctataaggtagtactaacatttgttttactaattatgagttcttgattgatcttgatctttggtgaataacaaatcttgtggaccggtttcaggggacattactaaacgggcaagagatagcggtaaagagattaacaaaaggttcaggacaaggaggtatggagttcaagaacgaggtcttactcttgacaagactccaacataggaatctggttaagcttcttgggttttgtaatgaaaaagatgaagagattcttgtctacgagtttgtccccaattcaagcctcgaccacttcatattcggtgagccttcgcgagacgagactttgcatctttgcatgttacactacttttacaaaacaagaaaaaaaactgtttctttgagatgtgcagatgaagaaaaacgccgagttctgacatgggagatgaggtatacaatcatagaaggcattgctcgaggtcttctttatcttcatgaagactcgcagctaaagattattcaccgagacttgaaggcaagcaacatacttttagacgcagagatgaaccctaaagttgcagatttcgggacagcgaggttgttcgactccgatgagactcgagctgaaacaaaaagaatagctggaacccggtaagaaatatatcaaggtatatttaaatgctctgttttgaaaacagagtccatgaattaatgttattggtttgcatatatgcagtggatatatggctcctgaatacttgaatcatggacaaatctcagctaaatctgacgtttatagcttcggtgttatgcttctagagatgattagtggtgaaagaaacaatagcttcgaaggagaaggacttgcagctttt

SEQ ID NO: 165223 - DNA, 755 bp, Arabidopsis thaliana landsberg
tatcaaaatatcaaacatgaactggttattaacttctatctctgtttttttttttaatgtgtctttgtcttaagttcagatgttgtattaagccttgttcatttttaacatcacaggaaaaagagttaggaaggacggtgagtgttcgtgaggttttcatcaagactcataccaaaccagatggtacttatgtcgacaaaaaggcagagcagattgttaaaaacttatgagaagaagctgcaagaagttgtctgaaatggagacagagacttcaaatgtttcagacggggaatcaagacctcgggagttcacaatagatgatcatacagtcatctttctggaggtaaagtttacattttcacttgcatattgtctgcattttctcaaactctttattaatggtatggctatttttttcataggccacaaagacagattcaagagggaactattatgcagttggaagcctcaaagataatcttccggatctagtcactggaaagggcaaacatgcagcagactctacctcctttgtgtcattgcaagagcaactgaaagaagctcaacagatgattgaagagcaggctgctcataatgctagacgtgaggaagagcaagtccgagctgtggctgaacagaaagacaagcttgagcacttggccttggtggaaaagtatttgcgccaaactgatccaacctttctcaactttatggctactcattcatctgaagcaaccacaaccgatcctatctaa

SEQ ID NO: 165224 - DNA, 3613 bp, Arabidopsis thaliana landsberg
atggcatcgatagatgatggttcatctacaacaaggatgacgtctacctcgtctccggtggttacgatgggcgtttctccttataccttatcaagttctgaaaatccaggaactatgatctcatttgtggtgttgaacggtgacaattacaacgaatggtcttcggagatgataaacgctctccaagctaaacgcaaattagggttcatcaacggatcgattccaaaaccttcagctaatgatcctaattttgagaattggatggcagtgaattcaatgatagtgggttggattcgtacgtctatcgaacctaaggtgaaatctacagtttctttcatctccgattcacaccaactttgggaagatttgaagcaacgtttctccgtgggaaacaaagtgagaattcatcaaatcaaagcacagatcgcacgatgtcaacaagatggccgatcagttctggattattacggtcaactgtgcactctttgggaagaatatcaaacctacaaaccagtgactgtctgcaagtgtggattgtgcacatgtggtgctactcgtgaaccggcaaaagagagagaagaggagaagattcaccaatttgttttgggtctcgatgaatcacggtttggaggtctcagcaccactctcatcgccgtggatcctttgcccactcttggtgaaatttattctcgagtagtgagagaagagcaacgattggcttctgtccaggttcgtgaacaacgacaagatgcagttggttttgtggctcgcaacgatcagagttccttcccatcctcacgacccgatatgcaaaacggaggccgtttagactcctctatcattaaatctcggtctgtgacttgctcacattgtggccgtgtgggtcatgaaaagaaggactgctggcagattgttggatttccagagtggtggactgatcgcaatggaggtggtcgtggatctggttcccgtggaagaggtggtcgtggatctggtcgaggaagagaccaatctgtgacagctcatgcaacaagctctaacccgaccggccttccagaattcacaccagctcagctgcaagctctcgcacaaatgattaaaggtcaacctaacaacagcagctccgacaaattatctggtaagacaaatcttggcaatgtaattctcgatactagagcatctcatcatatgatcggaacactatctctgttgtctaacatggtctccataccaccttgtgcggtgggttttgcggacggaagcaacacaatggctatgagtgtgggagtgttatctttttccaatgatgttgcgttggttgacgttctttatgtcccaaatttgacatgcactttaatctctgtttctaaaattgtgaaacaaataaagtgcattgcaatgtttactgatacgtattgcgttttacaggaccgtttcacgaggactttgattggaagcggggaagagcgtggtggggtttattatcttacgattgtcgctacagcaaaaatccatacggcaaaaatctcctcaaatcaagctttgtggcatcaacgtttagggcatcccagtttctctgttctttcatctttaccggtgttttctagtacttcaattcctgttggttctcgttcttgtgacgtatgctttcgagctaaacaaacaagggaggtttttccccttagtattaataaatcaagcgagtgtttctctttgattcattgtgacgttaggggtccatatcgggttccttcatcttgtggtgcagtttattttttaacgatagttgatgacttttctcgagccgtttggacctatctactactagcaaaatctgaagtgcgctatgtactcacgaattttatggcttacactgaaaaacaatttggcaagtccgtcaacacagtgcggagtgacaatggcacagaatttatgtgtcttgttgcttactttcgtgaacatgggatcattcatcagacctcttgtgttgggactcctcaacaaaatggtcgagtagaacgcaagcatagacatatccttaatgtggctagggctctattgtttcaagcaagcatgccggtcaaattttggggtgaagcggtgctaagtgctgcatatttgattaaccggactccttcatctcttcacaaaggtatctcgccctatgaaattcttcacggttgtaaaccaaattatgatcagctccgtgtgtttggatcagcttgttacgttcaccgcgtcacccgtgataaagacaaatttggggaacgaagtcgtttgtgcgttttcgttggctacccttttgctcaaaaaggctggaaagtgtttgacattgacaagaatgagtttatcattactcgtgatgtcgtgtttcaggaagacgtcttcccgtatgatgctaaggatgatcattcttcacttgtacctccatctcctatagttgcgattcagattggatgatcacaccgtctctctcgaacagggggagttctgtcatctttgactccaacactgaatttgatgccggtgagaacgtgatctctatttcaaccccgacgcttccctcggtttttgaaccggaatctgaatctgcatcggtaccagtttcttaaccggattcggaatctgcatctgtaccagtttctgaaccagaatctgattctgcatctgtaccagtttctaaaccggattctgatcaaattgaaaaatcagtctctaaaccaattgtaccggttcatacgtctataccggtcgtaacagaaccttctcgtgttgttgactcaagcgctgcttctccgttgtctgtgacaaggactccagctaaaactaagctcaaatctgttcccgtttccacaccagctcgggcaaccaatccgattgttcaatcagagacaccatcgcctcctccaggtcaaggtaagcgaaaacttatacaatcagttcgtttgcaagactatgttctctacaatactacatgttctccgataaacccccacgctctccccgattctactcaacagtcctcgtcaacagtcccaggtaattcgttggattccctaacaaattttatttctgacgatcaattctcgtcaggtcatcgtgcctatttgacagcaataacgagtactgttgagcccaaacattttaaggaagctgttcatattaaagtttggaatgatgctatggttaaggaagttgactctcttgagattaacaaaacatgggatattgtcgatttaccagctggaaaagtggctattgggagtcaatgggtctacaaaacaaaatacaatgccgatggttctattgaacgttacaaggcttgtcttgtcgttcttgggaacaaacaggtagcaggcgaggactacaatgaaacttttgctcctgttgtcaaaatgacaacggtccgtactcttcttcgccttgttgctgcaaatcaatgggtggtgttccaaatggatgtcaacaatgcttttcttcacggcgatcttgaagaagaaggttacatgcagctgccttcgggattttgtcattctcacccttaacaaagtggctcgactttgcaaatcgttatatggtctgaagcaagctcctcgttgttggttcaaaaagc

SEQ ID NO: 165225 - DNA, 1459 bp, Arabidopsis thaliana landsberg
  unsure (1)..(1459): unsure at all n locations
atgcaagccaaaagcaagtctttcttcaagcccacctatgcttcttctatcggtgcctcagtaacaacagacacagacgatgggtgagctgtctgggagaacaatcggaacgccatcgacaacacctaccagcgtggatnnnnnnnnnnnnnnnnnnaaatcaatgatctttggcggttttacttctctttaggttcttcgaatttcctactttatttgtgttcttcagatgaatagaaaatgagcgataggcaactcctgattttctgggtttcctttaagatatttttgggcgaaattggatttttttttttaattgggtgtctttttgtgtgtctcttaattttgggtattcagaagtgaagtgcttaaaggatgcatcgaaaagacgctgaagaaaggatcttcttctgtacctaaaaatcacaaaaagaagcgtaattatacacaattccacttagagttgggccaatctgattttcttctcagacattgcgcagaatgtggagctaagtatgctcctggagatgaattagatgagaagaaccatcaaagttttcacaaggactatatgtatggactcccttttaaggttaggatcacactgaccttattgctcaagatcatatgtttctttgattattgtagaggttattagataaattgttgggtgtttatatttggtctcagggttggcagaacgagaaagcgtttacatcacctttgttcatcaagaaccgcatcgttatggtatcagaaaatgattcccctgcacacagaaacaaggttcattgttttcacaattcaacttgcactgtttatggtaccgtacttcgtttctaaacgatggatcttttgcaattgcaggtgcaagaggttgtgaaaatgatggaggttgagttgggtgaggattggattcttcaccaacattgtaaggtatgagcctgtatccacgtcttaacaacagtcatttgcggataaattccatagctcatgagtgttgttttggtattttatgtctactatattgagttcatgggtatctgatacaccttgttgagaagcttggcgaatacttgctttactttggtccactataaatatgaaaaacttcgacttagtctgattccttccatgtctatgactagcattgaaatcaaacaaaaaagtctatgatatctttagatgacctcatttcaataaattcacaagaaagatgatataacccctaattactttcctcagttgttttagaaactatcttgttatgtgtaggtttatctattcatatcctctcagaggatctctggatgtctagttgctgaaccaattaaggaagcatttaagctcatagcttctcctgatcctcaaagacagttacaaacccccagctcatcctcgccttcaacctccataaagaatggaaacattgttctacaaagagaggtatcgaaaagat

SEQ ID NO: 165226 - DNA, 1674 bp, Arabidopsis thaliana landsberg
atgttgtctctgatttgcaacatcaaccacacaaaacaaaaatctaagagaaaatcaagaactctcggtatcatcgatgaagcagtagaacatactctagaaacaaatgttctcggtttaatgttacttatccggttagattatacaataaaactgattggcttataacaccggttagaccttaaaccctttcgtgacttattagttggactctgcgccgcgttctcttctctatcgattaagcaaaatcgaccctcttcgattttttttttccatctctgagcaaaatatcgtgctttcatcatcttcgtctgcttcttcttcttccaaggattgtcttcgatctcgaagtatactgattcaaagacctaatttttgtccccattcgattgtagaagcttcacatagattaataaaggaatcgactttgttctgttttagcgactatgtttacctaagctgtgtaaacttaagagaaacccttttgcggattgaatgtatgatttatgcatatctttctcttatgtttcaggccaaagtatggagctttctgatccaaacaatggcaagaccaacaaaccaaagcaacctccaaaacgtttcatcaagaaccaaatccctgattcaatcctcggtgatgcatccctcaacgctgctatctccatcttaccttcaatttaccattttgaagtccataaatgtgtgtggcgtatcaaaacatcaaacgctaaacgcatagctctgcagcttccagagggtcttcttatgtacgctcttacactctctgatatcttcacatcttttgctggagcttctcactgttttgtactcggtgatgttacttatggagcttgttgtgttgatgatttctctgcttgtgcgcttggtgctgacttgcttattcactatggacatagttgtcttgtccctatcgactctacaaaaatcccttgcctttatgtttttgttgagatccagatagatgtcaaatgcttgttgaacactatacatctgaatctcgcgagtgatgttacagaacatcattcttgcaggcactactcagttcacttgggcgattagagctgtgaaaccagagttggcgaagcacgcgttcaatgttttgagccatcagttaaagcctctatctgctggcgaagtcctgggctgtccagctcccaatgtgaagacggttgaggattgtaaagaccaagtactggtctttgtagctgatgggagatttcatctagaagcattcatgatagccaatccaaaaatcaaggcgtttaggtatgatccatatcttggcaagctgtttttagagaagtatgatcataagggaatgagggagacgagaatgagagcgattgcacgggccagggaggctaaaacttgggggatcgtgttggggacattgggaaggcaaggaaatcctaagattcttgagagattagagaagaaaatgatggagaaagggatagatagcacagttgttttaatgtcggaacttagtcccactagagtggcattgtttgaagactcggtggatgcttgggtccaaatagcatgcccaagactttctattgattggggtgaagcgtttcttaagccgcttctgacgacttttgaggctgagattgcatataggattcatccgcggctggtgggagaatgatt

SEQ ID NO: 165227 - DNA, 1762 bp, Arabidopsis thaliana landsberg
tgggtatagcataatcacttggacaagaagcaccattcactatgatgccaggaagtgagatcttttctttagagatgtcaaagactgaagctttaactcaagcttttcgtaaagctattggtgttaggatcaaagaagagactgacgtgatagaaggagaagttgtgacgatttcgattgatagacctgcttcttctggtggttctgtgaagaagactgggaagataacaatgaagccgactgatatggaatctaattttgatttgggatggaaattgattgaggcattggataaggagaaagtacagagtggtgatgttattgttttggataggttttgtgggaagattactaagcttggaagatcttttacgaggtctagagattttgatgttatgggttcaaagactaagtttgtgcagtgccctgaaggtgagcttgagaagaggaaggaggttttgcattctgtcacacttcatgagattgatgttattaaaagcaggtttgtttcttgatcttgttctgtatttgtcaattgcttagttttaggtttaggttaaaaagattgcttctttttcacgtattgatgctttttcaagttcttatttggattcttgttttctttctgttgtttgcaggactcaagggtatctagccctcttcacaggtgatacaggcgagattcgttcagaaacccgagagcaaatcgatactaaagtggcagagtggagagaagaagggaaagctgaaatagtacctggtgttctcttcattgatgaagtccatatgcttgatatcgaatgcttctctttcctgaatagagctctcgaaaacgatatgtcaccaatcctggtcgtggctacaaacagaggaatgacaacaatccgaggaacaaaccagatatcagcacatgggatcccaatcgattttcttgaccgtcttcttattatcacaacacagccttacacacaagacgagatcagaaagattttagagatccgttgccaagaagaggatgtggagatgaacgaggaagcgaaacagcttctgactttgatcggatgtaatacctcgcttaggtacgcgattcatctaatcaatgcagctgccctagcttgcctgaaacgtaaagggaaagtcgtagagattcaggacattgagagagtttatagattgtttttagacaccaagagatcgatgcagtacttggttgagcatgagagcgagtacttgtttagcgtgcctataaaaaacacacaggaggctactgcaggagaagaaacagaacacgaggccatggaagtttgagaattttgttttattgcttttacaagaacttattttttcaccccattttgtcatggactcatgggacatggttgaacaaaatatggaatttttcaagttttcgagttctcattgagagatagacaacgttttgtactgtgtttttgacggagcgataagatggtatgacaaaaaggtaagattgtggagacgtttgaagggttaattggtaaggctacctaagttctcacctaatgtttgtattcaattggctgattatggtggaaagatggcggctttgtgggtcgaacaatcgccttgtagtaacaacggctataagaataagatttggtgcgcggagattgctcttgaaaaacaagaaagttgtgaaatttggggagaagttgaatggtttggtcatgtgcttacagttcctaaagaatttgaatttgttaaagttccttctgctactgtt

SEQ ID NO: 165228 - DNA, 1895 bp, Arabidopsis thaliana landsberg
agtaaacacacacaacaaaattccgcaatgagattgttcttaatgtttgcgattctgtgtggtttttacaatgaagcctatgggaaaggttctttagatatcgatatgaaactgaagtctcttaataagccttccttgaagaccatcaaggtatggactaaatctaaatgcgaagatatgacattttctgtatattttttggtttctaagctcccaaatcgatttgtagagcgaagatggagatataatagattgtatagatatctacaaacaacatgcctttgatcatcccgctttaaggaaccacaagattcaggtaaacaaattctactatataacgatcatataaataaaagattttgtaaatacaaaatttggttatattttgctttggacctaggaaagtttctatctttacctaatctacatttatacatgcagatgaaaccgagcgtggactttggtacaaagaaaactactattccaaacaacggttcttcggaacaaataacgtctcaaatttggtctaaatccggaaattgtcccaaagggacaataccggtacgtagagttagtagagaagacataaacagagcttcttcaccgtctcattttgggaggaaaactcctcacagatatagctttctcgacaaggctcttcaacacaagggtagtttcaatataacagctgcaaaaataactcatgcccgcccaaagcttcgatcggtacgttaaacataatttattttgttattcgtatctacattcatagtttataattttccttctctttgctaataaaaatgaaaagagaaccaaaaaaacaacacatccattcaaaagctaaatcgttagactaaaacctatatatggttaactagaaaacacttattgtttgttaatgatataggaggctgtccttatcgccttagggtataattttattggagctcaatccgatataaatgtatggaaccctccgagggttcaggctagcgactacagctctgctcagatatggctgcttggtggcctctcagatacttttgaaagcatagaagctggttgggcggtatatttttacttccatcgaagtactatatctcgtatttgaggtaaattttaaactgatcgctatcaacctatttcaggtgaatccaagtgttttcggagactcccgcacacgtcttttcacatattggactgtaagtaataacatcactaaatcactaatgactttataacatcttaaatctcttccatgagttcataacttctctttctatttggatttgcagaaagatggatactctaaaacggggtgcgtcaacctcttatgcgcaggttttgtgcaaacaactactaagtttgcattgggtgcagcaatagaacccgtttcgactacctcgcaaaaacaacatttaatcaccgtgagcatgttcttggtaacatttttgccttatacacatatccaatgttttaaaagtagtctaggtagttgtctatgctttgatagaccgtaaagattggagttaggtgtttatgttattaagcggagttaaacacatttaggcagtccttagattcgttttttttgcttttatcgtatgtgttttggttaatgcctcaaagttggcgttataaatcaaaaatatgaagcaatagtttcctttggcacatgttttagaacctgcatatatactcttttagcttacaatgtttaatgatcgactatgtttgcaggataccaacagcgggaatcggtggttgacatgtgctaacaacgtgataggttattggccggggacactcttcgcctacctcaaacatagcgcaaccgctgtgcagtggggtggagaagtacatagcccaaacgtggggaagaagccacatag

SEQ ID NO: 165229 - DNA, 974 bp, Arabidopsis thaliana landsberg
gttcatttcaaatttgatctaatgcatgagactctttacctgacaatggacttattagaccgttacctctcccaagttccaatacataaaaatgagatgcaattgataggtcttactgcactcttattggcatctaaatatgaggactactggcatcctagggtaagagacatttatcctgaaagctaatacctctcctgaaaatagacatttacaatctattttctttgtccatgtgcagatcaaagacttgatcagcatatccgcagaatcatacaccagagaacaaatcttgggaatggtatataatgaactctgtttatagtcaaacttctctattctttataaaaaatacgggtcatttgcgtatttccccttgtaacttatcctaattttcattttcaggagagaagtatgcttaaacagttaaagttccgtttgaatgcacccaccccctatgttttcatgttgaggttcctaaaagctgctcaatccaataagaaggtacgcgaaaaacctgcattgtatgctttaataacctataaaattcttctgtttgaataggtagacattgaatagtattatttctattatcagcttgaacaactcgccttctaccttatcgagttgtgtttggttgagtacgaagctttgaagtataagccatcactgctatgtgcatcagccatttatgttgccagatgcactttgcatatgactccagtttggacctcgctcctaaacaaccatacccactacaatgtctcccagatgaagtaagttaaaatctcattaataactcctccttgtagatcacttagactagttacattctttaactaatcttacacaattttcttatcacagggactgttctgacatgatcttaaggtttcacaaagctgctaaaacaggaaacctgagggtcacttatgagaagtacataaatccagatcgcagtaacgtcgcagtct

SEQ ID NO: 165230 - DNA, 4996 bp, Arabidopsis thaliana landsberg
aatcatgcattgctgtctgtgttgacacttttttttactagttggcagataaatttccctgtatcctaatgtcatttgcataggtcggaattgttcacgcaattaacaagctacacaatgatctacccggtgtaagtttagcagtatccctccatgcaccagttcaagaaatccgctgccagatcatgccagcagctagagcctttcctttacaaaagcttatggatgcacttcaaactttccaaaagaacaggtagttcatgtactcttgactggttcgttgctgttaaatattaaaaccacaatcccttcagttacattgacgatcataacattatgccacattgtcattggatttaacagtcaacaaaagatcttcattgagtacataatgcttgatggagtaaatgatcaagagcagcacgctcatctactaggcgaattgctaaagacatttcaagtggtaaatcttcgatgtcttaatactcttaaaggttctgcaattatctgatgatattttttatggaaactctgtgctcttttcttgaacaggtcataaatttgataccatttaatccaattggatccacaagccaattcgaaacaagcagcatacaaggcgtgtcaagattccagaaaatcctgagggaaacatacaagatccggactacaattcgcaaagaaatgggtcaggatattagcggcgcttgcggtcagctagtggtgaaccaaccagacatcaaaaagactcctggaactgtggaacttagagacatagaagatctgcttctctaactttaggaccagagacatgaaacagacatttggaatggttttgtagtatctttgaagccactcatcaaaacccttttcttaaacttcacattttgtcctctcatcactttgtggaaaacacttggctcactcttatatgcaagacaaacagagatggtccttggtccttccacactatcacatggaggtttaacttctcttataaaatattcaccaacaagtgatgttatgtcatcattaaagttggaagtaaatgttaaactttaattttaatgaagtaaatagtagctaattagcttctcttcccgcctataaaactagctcctcactctgtcttctattccataagagaaaaaaaaacagagagatgagtattagaagatttgtgcgtctctctctgctaatcatagctctagtttcatcactttgcgagtctcaaaagaactttgcgtgtgacataagtgccccagcgacggctaagtatggtttctgcaacgtctcattgtcgtatgaagcacgtgccaaagatttggtctcacgtctctcccttaaggaaaaagtccagcaactcgtaaacaaagccacaggagttccaaggctcggtgttccgccgtacgagtggtggtcggaagctctccatggcgtctccgacgttggaccaggggtaaaaacatcattactgtatatagatgaatacgaacatacatgagttgttatgtaatgaaaacgctaacgttttgagttgtttcttaaggtgcatttcaacgggacggtgcctggagcgacgagtttcccggcgacaatattaacggcggctagctttaacacatcgttgtggctaaaaatgggagaagtggtatcgacggaggctcgagcgatgcacaacgtaggactagctggactcacctattggagtcccaacgttaacgtcttcagagatccgagatggggtcgaggccaagagacaccaggagaggatcctctcgttgtttcgaagtacgctgtgaactacgttaagggcttacaagacgttcacgacgccggtaaatcacggcggctaaaggtttcaagctgttgcaagcattacacagcttatgatcttgataactggaaaggcatcgatagattccactttgatgccaaggtaatatataaatacgtaagtttcaagaccttataattgaccttaatgttgatggatttgttattgttttggtgggaaggtaacgaagcaagacttggaagacacgtatcagacgccattcaagagttgtgtagaggaaggagatgtgagcagcgtaatgtgttcttacaacagagttaatggtatcccaacttgtgcagaccctaatcttcttcgtggagttatccgtggccaatggcgtcttgacgggtacatagtttcggattgtgattccatccaggtctatttcaacgacattcattacaccaagacacgtgaagatgcagttgctctcgccctcaaagcaggcaaaaatctttagatgatcatctcaaaacaattattacattagatatgtcattttgatctttgagaagtaaaatatgttgttttgtctggaaacaggtttgaacatgaactgtggagattttctaggtaagtacacagagaatgcagtgaagcttaagaaactgaacggatcagatgttgatgaagcgctgatttacaactacattgttctcatgaggctcggattcttcgatggagatccaaagtcgcttccttttggtaatcttggtccgtctgatgtttgcagcaaggatcatcaaatgcttgcgttagaagccgcaaaacaggggattgttctgcttgagaacagaggagatcttccgttaccgaagaccacggttaagaaacttgcggttatagggccaaatgcaaacgctactaaggtcatgattagtaactacgcaggtgtaccctgtaagtacacaagccctatacaagggctgcaaaagtatgtaccggaaaaggttgtttacgagccagggtgtaaagatgtcaaatgtggtgaccaaacactgatttcagcagcggtcaaggcggtttcagaggctgatgtgacggttttggtggttggattggatcagacggtagaggcagagggtcttgaccgtgttaacctaacccttccgggttatcaagaaaagctggtgagagatgtggctaatgctgcaaagaaaactgttgttttggtcataatgtcagccggacctatagatatctcattcgccaagaatctgagcacgattcgggctgttttatgggtcggatatcctggtgaagctggaggagacgctatagctcaagtcatctttggtgactacaatccttgtaagcctcttacttcatgaaccctaaaccctaattaaaccctagacactattacttacttatttgtgtttgttgttgcatcagctgggagactaccagagacatggtacccacaagggtttgcggataaggttgcaatgacagatatgaacatgagacctaactcaacctctggtttccctggaagatcttacagattctacacagggaaaccgatttacaaattcggatacgggcttagctactcttctttctcgacttttgttctctcagctccatcgatcatacacatcaaaaccaatccaatcatgaacctaaacaagacaacctctgtggatatctccacagtaaattgccacgatctcaagatccggatagttatcggggtcaagaaccacgggctacggtctggtagccacgtggtgctcgtgttctggaaaccaccaaagtgttcaaagtctctggtgggtggtggcgtgccactgacgcaactggtagggtttgagagagtagaagttgggagaagcatgacagagaaatttaccgttgattttgatgtctgcaaagcacttagccttgtggatactcacgggaaaagaaaactagtcaccggacaccacaagcttgttatcggatccaacagtgatcaacaaatctatcatcacctcaacgttagattggccggagattcaacggttgctatctgaaaaaaacaaagcccatagattctactaaagttgttattgtcaaaagtcaatactgtaatgctatcatcaattatgaccaaaacctaaataaaaatttggtataatagcacaaacaaacagggtcaatagttatccaaatatttgaacctatagtagtcaaattaatacaaagacaaatttgttttctcctttatgccacataatataaatattgggtttccataagattttctttgtattacagaaacatagaattataatggaggggttaattccatatctgattcatgctatcaagaaagaccacaagcctgatcatcagaggtatcgatcgctgtctgtgggatcgagccgaagctatcgaccgttgatgatgggacaagacggctcttcttcaatgcagggatcttctcaccgtcgaactagatcagactacaatccacctgttataatggataagtttgatcagagatcatcaggtttaggtcaagaatttgtgaagaaagattcttcttctcagaatatagcaacaaagacttagcttgcgtatactcgttaattatatgtaagatagaaaaaattatacgtttcattttttgtgtattgatcaatttgtaataagtttgatatcaatgaaattatttatttatttattttcacttactatattggtcaaatccaatagtcaaattgtgtttttggttgaactgacacaattaacaagaatgaccaagaatagtaaaagagaactgtcaaaataacgaaatggctaataaacagaggacacagaagaatgatctgttgattacttggcggtcaaggaagaaagatccacgttaggtctttttgatcatagaaaaagaatgaaggatttcccaaaaaacccttaacttcattctaaaaagaacttaaacataaacacattagactccaccaatcttgttcttgtctgtatgcaacagattgagaaacgtagccttctctgttcgtttctctctgtgtttcatctgatacatttacaagcattgcttcttgaaatggcagaattaagatcaggtgttcttttcaagcttctagaagaaatgggagtcgggaaagtgcgaagagacgtcgatcacagacccgttttgctgcaaat

SEQ ID NO: 165231 - DNA, 1451 bp, Arabidopsis thaliana landsberg
tccatctacatttctatataagtgaagtcttatccttttaactatatttttttgtctttaatgactttggtctatgaatgtaaaacctaatcttttctcatatttacgaaaaaaaaataaaaatagaacctaaatccccataaatgagttccggttaaattggctgtaacaaatcactgtagcacgtctatataatattttatagaccatgcgtatatatattcttggacgtgataatatggacatatcttatttactatacttattttcacgaacaattttttagaacatttgtaggtcccactaattatattcagtaacccatagctccaccacaccccaccctcttcattgatccagagaattagggttcccatttcatcacgatctcaaatccgtttcccttctgcctggttcgctcctctttaattatcggtgtttcttcaaatttcttagatcgttatttgatcacttttagtactatcctatttcataagccaaaatgccaaaaattgtctgcgagaaaggaaaatgtacccaccctcgaccaatgtcccctactagacattactggcgacccccaagcgcccttgcccctgttaggggaaatcaatttgccgtgcagcctcttcgtcaacctttggttcattttaacctacatgtaatgtttactcaaaaaaattctcaatccaattgagacactcattttatagactgaaattgatccaaaaattgcaaaatttagttttgaataggtatatagcctccaaaatttagtgttaacgttggtactcattttctctcagcctcctctgttccctgatttccacatgcctgatcacgtagcagctaaaatagtcatcttagtttctgaggacggtgtagatatgttaaaggcttggattcaatctggaccagatggaaaagccgctgttttttcaagtaaaactctttcttctgttcgactagataagtcccctttttttattcatatggctgaagaatcgtctagttatcacatgttttacaccaattgcctcaccgcagaaaattcgtacgccctatatcttcagagtttagtgctggcatttcatatgtttgagctccaggaagcaattgctatattggatgtcataaaagacgtttttccacatgctggtctactttatatcatgctccacagttgcgatggatcaattccgtgggaattttatattcagtacaaccgaaggtactacaaatttagtgaagtcgacttattcgcaaataaactaatgttccatatcaacgaggttggtccacgtcgccaagggacatacaaaaaatgctgggagttcgaagattccggtgagtgttgggcggaccataagaacctcaatgagtacgagggacagtggtgtaacacatgtatttactattacatgtcccaggaaattgcactcatttcataa

SEQ ID NO: 165232 - DNA, 3783 bp, Arabidopsis thaliana landsberg
caagattgtcatcgaaggagaaaccctttggaactcctttactctcgacaggttcatagaggtcaaccacaagcttaggatgagcccccgtagacatctcctccagctgccactgccccctcctttacctaaaattacttctgctcgggccatcgcagctcgacgcaagacactgtccaagtcgattgtggaggcttgcgaagtgaacaaatcattcctccaattcacagtcgacaagaaggaatatagaagaaccttgctagtcgacgatggcagtgcgaaggggcaagatctgacggtgcttacagacccactcctcaccgtgaaggtcatagcggtcgatcatcccacagggagcgatcacctcgtcgtgactcacctcggcccacctcccgaactggactaagcagcgagccacttgctgacctgattcggaagaagagagacagatcaacccgcatcagctcctcccccaaaagagacaagacgagagcctgaactgaccgctctactcggcggtcgccgccaccccgatctattggtcctcctcctccagtcaccgtatctccttcatccggatcaggaggtgaaaaggccgaacggagtgctaaccctcggtgggatgaaattgaggtccgagatgctggaactaaagctgttttggttcctcagaccaagtcgctcacgggttagaaatttctttctactttatatcattacattttttaccatttcgacttattgacttagcgttccttgactggtcaaaccttctctaacagcgatggaaacgtagggaaacatctttcgatgtttcaaaacacgaaaagacaccatccagccaggcttcgatagatggcgtcctgcaattcgcgagcgattcctactccatgctcaccactcatctcgggttagttccctttacccacaatagatattttaatctttgctccttcacttagacgttaaacccttctcgttattacctggttcaagcgaacagcgaactcaacgacatgattgagtactatgaaaggttgctgctagacagggaaaaggaggttatgacgtggaaagataagtcttcgtcccttggggcaatcgtttttatccaaaccaaaaatgttagaactgagctggaatcaaatacaaaggggtggccaactatcgggatgctgagttagcgaggtcgacatcaaaagccaggaaggaggtaaaaggtcgcgggatggaattgatccaaggggcaatcgtctttatccaaaccgaaaaggttagaactgaactggaatcaaacatcgaggagtacgagagcaatctcctccttttagatcaaacccatgataaagactcttccgagaagcaagaaaggtccgagttggaagccgatttagcagagaagcgaagtcttttggtcgctcttccttcttcatcattcaaccctcaacagttcgaggaattctttaccgactcacctcctttgagcgagtctggtttagattgggccggtaagttttaaaagcctcaaaattttgaaataaaatcgcaataagttactcttgcgtctttcttgatttgagataattgtttcaggtcccagtgaccccgtggaacccgaggtgtccgttatcccggttgaaactcctgaaatggcagccatcccgccagtaattcccccacccacgaactctgaaacagtggtcatcgaggacgacgatggttcagaatttgggatgcctaccgaacagctcactgccaacgaaccggatgaaactgaaacggctgccgcggacccggtcgatcctgagccaactcaacctgaactcgaggtggctgaagatccgtagtggctgtgtccacttaatggggattgtccctttttgttagcaaactcgaagtttatttctgaactattttaatcggctaagtaggctttaatttcttaacaagtattttgcctgaggagacttttaaactttttttaagacaatgatcccaagagggtttttactagatttaagtatggatttgcaaagtccatctttgtttaaccatttggtcaagttacgagatttataggttgatcaggcctatctctgaaaacgtgagtttgaactcgttttaaatccgcgaactccccaactcgggtttggtcagttcgatttactgggcttgagccttaattgtttttcttttatttaatgaaccgtttgtcttaaatgcgatggttgccattttcttccttggaaaataggaaaagcttcaagcctctaaggcaataattgccttttcctcgattcccaaaaacagtttaacccattcagacacgccacaattattaatttagtggtttcgagtaaaaaccctaaccctctataaataagagcataaactgtcattagtgcctcaaaatatgatctcagaaatttatttggtaaacacttcaagaatggaaaacgaaggagcctccaccgtatgccatctcgaccccagaagtccattgtttctgtccggcgatgactttgagcccgccggcgttctctttcctcatgcttgctttcactttccttcgaatgacaagaaagaggcgtacgattttatagacaaggtaagtcttttaccctctttcttatcggaaagactcccactcaaactaaagaactttgttctaggtcatcgacaagcatcgccgcctatgcgatgaaaggtagcgtttaggcctcaagaggcaaacgcttgaggcccgaattgctcgcatcgagaggaagataagggacatggagagcgacccttttcagtgggagtggaggaactttgactgcgtggcgaagatcccgcacatgctctcgatgtacctccgtgctcgaggccaagtccccggtcctgtaaacgctccggttcaagtgatcccgtctgacagtgaagaccgtgaagattaggaggaggatagtaacccctggaagcgcgtgaagtgaacccgacgtggacgacaaaaacgaagcgtccacttcgaaccccgaaccggcgatgaaggagcctgttcctgagccccttcactaaatgttccccgagactaaaaaccctcttttttattttcgcttggacctaactactgggcttcggcccatttatttaagggaactttctaattttccttgattcatcaaatattcgttttggagatactctttgaatgcagggcgactaaagcgacgtgaatgttccgcgaatcactccgactttaaatggaatcgcatcgctgaaagctaagagacctccctataaattccctctttagggttcttttcactccttactaaccataccgctcttttcttttgcagttatggccttcaacctccgttgctcggaatccatgccagacttttcgaggtcgatgatgatcgatgagacatcccgaacgtaccagacagaggacgctccccactttgcaactttaaatcccagatccgagctccgtgtgtgttaattaaggacctttcgagcagagatcaagacatcgcgatgtccttcatcaaagttctcgcggctcaacacaaaaaacgctcaacggaaaagaagaaacttcgaaagaagatcaaccaaatgctgcgaagagtcactgtgatatcaagggagttacacaccctcaactctctccccgaagattggatcgaactcggaatcgcagaatttgctcgcatcccggattgtatgatgcccattcttgacatcgccagtcaaggggtcgaggtgttctgcaagatgaggaggatttcctag

SEQ ID NO: 165233 - DNA, 1867 bp, Arabidopsis thaliana landsberg
ttggtgactttccactggctgatgcaggtattgggaagactgtgaaagaaaaagtttgtgcacacacgagccgtgatattcgtgccattgcaagtcagcttgttaatgtgtggctggatctataccggaaagaaaaagctaatagtggaaagaaatcgttgagtcaagcgaattactacaaacacctctagaataagaagaaaactgaatagtccggacacagacagtaagggaaagctgagcaatggcaacgatgtgaaaacagatgaagagtttgaggacaaccagctacctatgtcagaggaagagaaggctgtgtttgctgaagctgaggcggctcgtgcagcagcagaagcagctgcaaaggcaagttttttttaatctctaaattagtgaaaggcatttatggatgcttactgaatgtttttgttttctctgaggccgttaactctttatttatctgtttgttaacgaataaattatatgtttctgtcttgcaggcattttctgaggcctatcataatacttcattgcagcttcctaagatcccctcatttcataagtttggcaggcgagagcagtatgcaaagatggacgaatctgatttcaggaaaaagtttcctggaaatgtctcatgaagacaagattgtatgtcagagattgactcgaggaactgcaaagttagggactggtatgattttcctgcctcgtgccttgaccttgacagtgcaaggattccagttgataactattcacaggctagccattcgaatgagcttgtatctcattcgaagttcagagaatgttctggagaaagtgtggctgcggataccagtttcttaactggggcatgggttgatactggtggtagtagcgatggtttcaaggattctcaggctatagatagatggcaatctcaagctgctgctgctgatcctgaatttttcaatcgtactttgcatataaaggatgaagaagattcgattgcttgttcgactggccctcctagttggaagcatgaccaacgagcgaatgaatgttccgtgtcacaggttacagtgaataaagagccacataaaaatcatatccggagtgcagatcgtttgaaacagggagttgtagattttgttgcatcgttgcttatggccccgtatagagcaaagaaaattgatagagatgtatacaagtcaattatgaagaagccagcaacaaaggtttgtgactttgtggttttctacactactatattgcgtttcttgtttcaacttgaattaagaaaatgagtcttctgaaactcttgggcatttatcaggttatgcatcatttttcagatgtggagaaagctatggctgttacacagttcctcgactcaaagcggaaaaataaggtttgtaaatagcttcaaaagtttcagagttttcttttgccacagttattgtctcctaagtttctagtttatccctctctctggtgtcgacaaaaatgtcaatttagataatcttggtcacaggttctcatagtaaatatcactatatatttgttatctattttagaacagtttctgattgattgtccctgcatttgattaatatatatgcagattcgtgactttgtggacaaacaagttgacaagtacatggtgatacctcaagttccaaaaccttgatggtcactggatctttagtaatggccaatggtagttaagttggtatccgctgggatggcaaagcccatttgtggagaccacatatcaggaagcttatgaagcagatggtctgatgtaaaagagactttcccatgatttgacatacccaaagattggcagagacgagtttttggcattaccagatatgatgaaaggtcttgc

SEQ ID NO: 165234 - DNA, 4062 bp, Arabidopsis thaliana landsberg; identical to SEQ ID NO: 15351
  unsure (1)..(4062): unsure at all n locations

SEQ ID NO: 165235 - DNA, 637 bp, Arabidopsis thaliana landsberg; identical to SEQ ID NO: 23586

SEQ ID NO: 165236 - DNA, 5181 bp, Arabidopsis thaliana landsberg; identical to SEQ ID NO: 33414
  unsure (1)..(5181): unsure at all n locations

SEQ ID NO: 165237 - DNA, 3334 bp, Arabidopsis thaliana landsberg
agacaaaatgaggtaatagtgaggtttgatgatactcaagatcctgagattggttcacgtgatgatagggatgatgatgataggggtgatgaatacgttgaaccacgccctacagtagaatctagtcagtttaagaaagaatgggaagacggtatcagtttgactttgcgagaagaatttccaagcagggcagcattgcacgaagtggtggacaaaggtgcatttgctaacagttttggttatgttattaaaaagtctgataaggagcggtatgtcctaacgtgttcaaaagtaaattatgactggcgtatatgagcttcatgtattcaagatacaagtatttactctattagaaggtacaacaagatgcatacttgtacccggattagtaagagtaatacaaggatgaggaagaggaaaggtacccctgaattagtagcagctcttcttcatgatacttttcctggactgttggaaactccagctcctaaggttatcatgaagcttgttcaaacaaaattaggtgtgaagatatcatactccaccgcattgaaagggaaaaggcaagccgcttgtgatttaaaaggtagcgcggaagatagctacaaggatatcaattgttatttgtacatgttgaagaaggtaaatgaaggaacagtaacatatctgaagttggatgagaatgataaatttcagtacgtattcatagctttgggagctagcattgaaggttttagagtgatgaggaaaattttaattgtggatgcaacacatttgaaaaacggatatggcggagtgttagtgtttgcctcggctcaagatcctaaccgtcaccattacatcatagcgtttgccgtactcgaaggtgagaatgatgctagttgggagtactttttcgagaagctaaaaacggttgtacccgatacttaagaattggttttcatgacgggcataaatgcaagcctcataaaggccatacggaacgtgtataccgcggctcatcacgggtattgtatttggcatttgtcccaaaatgtgaaaggtcatgttactcacaccaaccgagacgtactcgcatggaagtttcaggagttaagtcgggtctacgtcgtggcggacttcaaccgagcgtatgacgggtttaagttgagatatcctaaggcgaccaagtatttggaggatacaaccgtgaaagaaaaatgggcaaggtgttgttttcccggagaaagatacaacttagacacaagcaattgtgtggaatctttgaacaatgtgtttaaaaacgcaaggaaatactcgttaataccaatgcttgatgcgatcatcaaaagaatctccgtttggtttaatgaacatcagatggaagccgcgtctggatctttagaaaataagatggtgcctttggtcgagaattatttgcatgatttgtgggtttttgccgagaatatgtagtcacatgcgacaaaggaatagattatacggtgagcttgcttttgaaaacttgcagttgcaaggttttcgatatccaaaaatattcttgtattcatgcattagccgctttcattaacattatggatgatgaagatcggagaagaggtttggagttacatgatttgattacaaaatattattgggcggagttgtgggtattggcctattataggactatttatcttgttccggataggtcgcagtgggaagtaccagatgaagtaaaggcgttgaagatagtttcgctgtctaaaaaaccgaagaaaggaaggaaaaatatgctaaggtttccatcaaccggggaaaagcggccaaaacgacaaaggacgttaaacaaaaggcgtccaaggcaatcgtgtcaatggttattatttgggaatacgcctatctgagtttttactttgtttctacagtgatttaatgtttatatggtatggacttactatgtaatactgtatttcccctttctgtaatactatgtctgtctctattgtttttttgtaatactagttataacaagtaatatcatgtctgtttctgtcgaatttgtggtcatattagtacgactggtaatattaagttggtgttatggagttcgaatttgtttacctcaaaactcaatgagaatgaatacagtgagttattaacagataaaaatgtattattaatcatttatacttaattaagttagaaattttaatattaaaatttttaacttatctttagtagactcaatacaacatatcccttatacttttaagctcacttttaatattatcaccaacttaaaatgaaaaattcatattgctacatatatttaatttataattgcacaaaatatttaaacctctatattgataaagtttcatccagtgtactactaaataaacaaattgtaaatataggaaatactgctaaacatgaaaaatatggaaagtaatactatttgagaaattggcactaccaaaaccttaggaaatactatgctgtaaaaaggctgcgcacatgtcaaaaataacggcgcacacgtgatgaattaatttttttggtttttccccaaaatttttggcgcctaacaaattttgagattccctccaaaaccaaaaatttcacttttttctttttcctctttctttttcgatctcttcttacaactttctttcatctctcatctctcttctccctcatctctcttctcccacatctctcatctctctcttcgactcgaattctctcacatctctcatctttctttcatctttttaccatggatagactgtgtgagagagacccctactacgatgatatgaaagtggcgaagagagccattgagcaaatggaaatggttgcgatgatggaagggattcctaagttttgtccatgtggtggtagcattgtcgagacgcgaaaggatgaaaagagatactatcaatgcgagaagtttaaggtatgttgatgtagagcacaagtttttcaagtttgtgtagatctagatctagatatatttggtatttcagagtattttccgttttggtaatactgcctagaacaagtaatactgcacaagtttttctagtttttgtagatctagatctatatttgataaatatttggtactttgtaggatgatagaactgattgtatgcacatccgtaaactttgggataaggctatggaagaagaggtgagtagcttaagggagagtgttgattacaatcggaagaaagttctaagtcatgagtatctcatagaagaaatgcaaaaagaattgaaagcccaccgtgcagagattgtgaacgtgagcaaagtggtattccgtaatcctatggctccaaagaagtaa

SEQ ID NO: 165238 - DNA, 4275 bp, Arabidopsis thaliana landsberg
ctgcagccgggagcgtctccaggtgatctggggggctctccggtgccgaaaaagaggggggttccggtattagaggtttccacgagtcagttgaatgtttccatcgattcaggtcatgaaagtgaggaggtttcaacaaataagattacgggttcaatccaagatgtatagaacagagggatgctcttagctagagagaatccacgctaaactcaaagaaggtggacacaaaggacaaaaaattgtatgcacaagtagctcaagaacacatctttcataaaaaaaagtttgtcgtgagtgaagttgatggtaaagagaaagtagttgtaccaaaggaggtttttgtgggagcaaaaacactttggaggattttgtaatcgaaaatttcttgaatacaaaggccacacatgttgggaagattcacatgattgtgaacaaaatttggagattgggcgctaaaacaaatttgaagtgaatgaaacaacaatgaaattcaggattcagaatgaaggtatgagaagaaggatcttaaacagaggcatgtggaacattatggatatccctatggttgtctcaaaatggactccatatgctgaagaagcgcaaccagctatgaagtcaatcaaactttggatcactctaaaggacgtccctctatcaatgttcacagataaagggttggaattcctagctagtgtagtggggaaaccaataagactgcatccaaaaacggaagcttgtgtaagtttcgatgaagcacaagtcttagttgaagcggatctaacaaaagagttgccaaaagagtacgtctttacgggagaagaagagggtgaactagatgcggtagtacatttttcctatccatggctgccaccgaggtgtattgggtgtggtaaatgggatcacttgaaggatagttgtcttgtggtagcaacaacagttgttaagaaaactcacagtccaaaaacagtcccagaaaaaactgaccaaggggtcttatctgtgtctgaggcgatgatgcctttgaaggaaggtttttgtgacacaaagactttagagctgcaaatttcagagccaacttcaacggtgggagtgtgttcacaaaataaaggcgatgatcagggctggattactccacctggttcagaccgcagtccgggaaataaaagcaaagagttgagatttggagaagtttcaattctctcgaatgcttacactgttttgagtgagaagggagattgtcatgatgttattatattgacagacaagcaagacgacaacacagttacgggagatgatggtgtaatctctttaaaagaaaatttagcgggggaaccgccggccacaacagagatgtcactgggtgagtctttgcctcgagtttctaaaacattccacaaagtggtatcagttccttctactcaattaactaggatacctcctagagatcagagtaaaagaaacaaatccaaaaatcgttaaatgtccttgttcttctcgaatgtgcgtggacttaacagatcctcaaaacattttgttgtcaagaagtgggttaaggaaactaattttcagtttggttgtttggtagaaacaagagtgaaggagaataaggtagcgcagcttgtaagtaagctttccaaggattggtcggttctaacaaactatgagcataatcgacgaggtcgtatttgtgttctatggcataagaacgtaaggcttagtcctttctataaaagtggtcaattgatgacatgtttgttgaagctagaagctcgagaggatgaatttttctgttcctttgtatacgcatcaaactatgcggagggaagaaaaacattatggtcagagttgagggatcattatgattctcccataaactgtggcttcttttggagattttaatgagacacttgatattgcagagcactcgcaagctattgatcaagctacggtaacgccaataatgcgagattttcagcagttggtaaactattgttccttgtcatatatggcagctcatggatcgctatacacatggtgtagcaagcgggaacatggtctcatcatgaagaaactcgacagggttttgataaatgatgtttggaaccaagctttctctcaatcttatagtgtatttgaagtaggaggatgctcagatcatttgagatgtagggtaagtttaagtagtgacgcatgaaataaagtaaaggcccccaaaccttttaagtttattattgctctcactgatttggaggactttaagccgatggtgagtaattactggcaagatacagaaccccttttcctatccacttcaactctttttcgtttctcaaagaagtttaaggggttgaaacctaaaataaggtgtatggcacgagatcgcttaggcaacttgtcaaagaagtcaaagctggcttacaagattctgtgtgagaccatcagataaagtcacgcgacgcgtctccaatggttatggaactagagaatgcagcctactctagagtcgatagagtggctgttatgcaagagaagtatcttaaacaaaagtcaaaacttcgttggtgtaaggttggagatcgatacacgcaagggtttcatagaccgtcgcccgcccctgaagctcatagcactatccgtgacattcttggtaatgatggaaatgttaacacaaaagaggtcctaatagaagcaaaggcagagaggtttttctgtgagtttctgcaactaattcccaacgattttgagggtgtaacgatcagagatctccaacagcttcttccttttaaatgcttagaagctgctcgccaaagtctacttcgaacggtcacagcagaggaaatcacaaaggttttgttctcaatgcctagtgataaatctcctgatcctgatggctatacctctgaatttttaaaggcaacatgggagattatcggagccgaattcattttggcggttcaatcgttttttgcaatagggtttctgcgtaaaggtattaactatactattcttgcccatatatcaaagaaaacaggcaagataaatgaaggattacaggcccatctcttgctgcaatgtgctttacaaagttatctctaagatcaatgcaaacatgcataaactagtgctcccaaaattcataacgggaaatcaatcagcttttgtgaaagacagattgttgatagagaaccttctccttgctactgaactcactaaggactatcataaagaaaccatctcaacacgttgtgctatcaaaatagacatctccaaagcatttgaatcagttcaatggccgtttctcattaatgttctcactgttttgtggttccctcgagattttattcattggattaatctttgcattactacggcctctttttcggttcaagtaaacggtgaacaagctggttattttcagagctctcgaggtcttcggcaaggatgtgcactttctccatacttgtttgttatttttatggatgtgttatcaaagatgttggatagagcagcggctgctagacagtttggctatcatccgaaatgtaagaccatgggcctaacacacttcagttttgcagatgatcttatggtgctttctaatgggaatattctttcaataaaaggactagttcaggtttttgatgagtttgcaacatggtcagggctccgtattagcttggagaaatccactgtgtacttagcaggaattccagcctctactcgcaatgaagtagcagtccggttcccgttttctattagccagttaccagtgcggtacttggggctggcacttgtcaataagcgcctctcaatagcacattgcataccgttacaggactaggtcaaaaaacggattgcatcttggacttctagatttctctcttatgcaggcagattaattcttatcagtttagtcctttggagtatctacaatttttggttagcagcttctcggttacctcgacaacgcatttgagaacttgagaaaatgagctctgctttcctttggtcgagcacatacatgaactcaaataaagcgaaaatatcttgggacatgatatgcaaacctaaagacgagggtgctcttggcttacgctcactaaaagaggatttagactagcttaaagttggtgtggaaactagtctaacatagcaaatctctctgggtacaatgggttgaaaaatatttactcaagaaggcatctctttgggaagttaagcaatctggtagtcaaggctcttagattttgagaaagttacttaaatatagag

SEQ ID NO: 165239 - DNA, 1421 bp, Arabidopsis thaliana landsberg
ttttgagtatgttaatgatcgcgaggaaagctttggcctcggcgcatactaaggcgtttcgtttggcaacaagggatgtacattgctttagttccatcttagtgtctcctcctctcgtgtcacttgacttgcctgaaaattggattccttactctgatcctccacctcctgtttcctttggtaatactctttgttgcattttcatggctatatatatatgttacaagaaaattctctaattgtatgagttgatttctgtgtgtatgcatttatacagagactgaacagaagactgtggtggtagatggtaatgttatcgctgaggaaatcagaacaaagattattagtgaagtggggaagatgaaaaaggctgttggaaaagtccctggtcttgctgttgttttggttggtgaacaaagagactcgcaaacttatgttcgcaacaaaattaaagcttgtgaagaaactggcattaaatctgttttggctgaattaccagaggattgtactgatggacagattatcagtgtattgagaaaattcaatgaagacacgtgtattcacggaattcttgtgcaacttcctttaccccaagtatgtttctcatttttttctttggacgttgtgatgggggatgttagtgttgttgatgtcaaagattagttctatgttaggaggtcaagtagttacgtttactttgttttcatacttgtatgtagaaattcttgattcatatattttcatcgaccatggactcatgcataacattttcccctttaaggtttccttttcgttggtaggtaaagcatttaatttacaggttatgcgatagagcatcttacttgtggagctctttttcaggagaacgttcttgtattttgttggtttcctttccctttttttttttttctcatgagtccaatcatttaatggaagatatcttgtgcagcatcttaatgaatcaaaaatcttgaatatggtgagaatggaaaaagattgtttatgggtttcatccattaaccgtggggattctgccaataagagggagggaacccctgtttgtgtcttgcactcctaagggctgtgtggagttgttgataagaacgggtgttgaaatagcaggaaaaaatgctgtggtcataggcagaagcaacatcgttggactaccaatgtctttattattgcaggtattagttcttctttatagttcaagtggattcttatgcttaaacattttggtttgggaattaactatgcatttatgttttctgaaattctcggatagaggcatgacgcgacagtaagcacggtgcatgcgtttacaaaggatccagcccacaccactaggaaggcggatatcgttatagcagcaacgggtatacctaatttagttctggaagtggcttagcctgggcagtgtc

SEQ ID NO: 165240 - DNA, 510 bp, Arabidopsis thaliana landsberg
cattcattccacaaagtattcgtaacttctataacttttcgtgtgtgttgtggacagaggaagattgcaagattatacattccggaaccaattctcgcactaattgttagccacgtatcagaagaaggaattgaggatttgaaaaactggattaaatttggtcatgaagggaaatctctggtcaagattatacgttccggaaccaattctcgcactaatctttcgagacactatcccgatttcgtttagataaaagccctgacttcatcaacatgtcttcgcccgactctgttcacttctcattctactcaaaatgtcttgcaaaacgaaacccttacgcaatgtatctccagagcttgaggctagggttctgttctctcgacctgataggcgccatttcattattgaatgattgtaaagatgtcattcctatagccaaacttctttacattgctctaaaccgctgcgcaggtaatgaagtattagacgcttttaatactttgaaatgag

SEQ ID NO: 165241 - DNA, 5829 bp, Arabidopsis thaliana landsberg
tttcttgtttccaaccatccaatcgattgctattgtttacttttgtttctctttattttatttactattttacttagcataattcgatttgtcattagtctattgtgtgatccgagagctttgtgaattcaatccctaagtgctgcaactgacctctttatttgagagagtagtcattagggtaatttgactcatatcacctactcaaatcactcttgttcttgctgatcgatctgtccgtcgacccgatggtatcctatgcgatgtccctttataagtcggttctagctacattcctacagattttctggttttatcttatgagaaagaacctaaggatcctctaatcttgggaagacctttcttagccactactggtgccattattggtttaaggaaggggagaataggcttgaatgtaggtgatcttagaatgcagtttgacatgaataagatggttaagaagcctaccatcgatgggtagactttttatgtggatactatctcgtctctggctgacgaatttctcatgaagatgacacttgttgatcctttgaaacatgctctaattccttcaatagacaaagttcccgacgggtatggtaagctgctcgatagaaatgagcacgtgatgcaattagttgctcaagaggagttaattggcacatctacaaacgcatcaacagttggcgagtggagcccaaaaaaagctcctaaacttgatctaaaaccacttcctccagggctaaggtacgcatttcttggtgcaaattctacttaccctgttcattgttaatgcttctttaaacaccgcaaagctcactttattgctaaccaagctgcacaagtatcgcaaagctcttggctattctcttgatgatattataggtatctctccagacttgtatatgcatatgattcacctcaaggatgagtctaagccctcagttaagcaatagagaagactaaacccaaatctgaaagatgttgttaagaaggagataatgaaactgttggaagctgggatcatctaaccaatttcagatagtgattgggttagtccagtgcatgtggttcctaagaaaggaggtgttacagtggttaagaatgacaagaatgagctgattcctacacgaactgttaccgcccacatgatgtgtattgactacaggaagctgaacgctgcaacaaggaaggatcattttcctctaccattcattgatcaaatgctggaaaggttagctaatcacaagtaatactgctttcttgatgggtactctggattctttcaaataccaatccatccagatgatcaggagaagaccacattcacgtgtccctatggtacttttgcctatcacagaatgccgtttggtctttgtaatgctcgtgcgacatttcacagatgtatgatgtcgatcttcacagacatgattgacaatttcatggaagtctttatggatgacttttctgtttatgggtcttcatttgaagcatgcttggagaacctttgcaaagttctagctagatgtgaagagaagaatttggttcttaattgggagaattgtcatttcttggtttaggaaggtatagttcttggtcacaaagtttcaggtgctggtatttcggttgataaagccaagatagaggttatgacaagtctacaggcaccagatagcatgaaatcagtgaggagttttcttggacatgctggattttacaggaggttcgtcaaggatttcagtacgattgccaagccactaacaactttgctttgtaaggatgtgaagtttgacttcaattctaactaccatgctgcttttaatcaaattaagaaagctttagtgagtgctccaatagttcaaactccggactaaaatttaccttttaatttaagaaagctttagtggagctgttttgggacaaagcaagaacaatagacttcatgttatccagtacgcaagtagaacacttgatgatgcacatcgaaattatgcaacaacagataaagaattgttagctatagtttttgcttttgagaagtttcgctcttatctggttgggtcaaaggtgattgtgcatacagatcattcagcactcaagtaccttatccataacaaggatgctaagccaagattactacaatggattcttcttcttcaacagtttgacatcgaagtacaaataagaaagggattgagaatggagtttctgatcatttttcaaggatcacagatgaagataacgtttctatcaatgattttctgcctgaagaaagtatctactcggttgagacaagtttgcaggagaatcatggcagggtcaattcacgcgtagatgagagctgcagagaatcagggtcgatcgacaccagatgcagcatagagacgatctgtttacacaccgccttggaaggcgagattgcagcacatgtcccatgttcccccatttaagtcgtgaacttcgccaagtcaagctattggaggcaaccactggtatggttttcgtttttctatttcctttatttgtgtttttcttttattttcttttttgcttactccggatttgaatgccactggggacagtgacgtttaagtctgggggagggcagttactaactacatttttcttgttgagtcttattcttactcttgtttttctttttgagtcgttttattgaatcaaaatgttattaggaattatgatctatattctttagattattgcctggttgattaatgctgcaggtttgaatcaatccgactattggaaaatccagatggcaaaccatgagacttgaggatatcctggtttctaacacaatcctttaaggttggagctaatctcactgcttttccttttacctcatcaaaacagttagtgttcatagaacttgactccttgttcatacctgatattgaaaccaatgtggtaaaaagaaaagtattcgtctcccgtgataaaagaatgtatcataatgacagattgacaggattttcagatagtgtataggggtaggaatgtttcgtatgtccccattattatgcattgtttgaaatggtcaatttcaaaggttggaaaaaggctgagggtgtcgatccagtatgcgagttcccctttgtttactctctaaaaagaataagtctgggagtatagaagcaagtccgcaataatatggatgcgttttttttatagaattgtcgattgatcctggtatagtacagcttatgcctctagaaggttctcaaaatattagcgtgtttgatgagatcgatcgatgaaagccttgtggatgtagttgtggaacttaggtatgaaatctagaatgttgtgtaagcttgcagagaattacatgttggttaggatttgttagaactgctagacatatggatttggttagaatgatcaaggcagtagactagaaaatattgggaattcctttgttttcaaacctcttccacgggtccggctttttgtgttttgcttgagggcaagcaaaagctaagtctgcgagagttgatatatccctagttttactgtttttaactatgttttaggtataggctttagagtctatttgttatttctagagtcttttctagtctttttcaggtctttacatgtttgagattcatttggagataatagagctttctggaggaaaacagagaatttatgctactgaagaaagtcgggagacaaaaatgcatgtaggtgtcgaacgataccacccctggtgtcgagcgacaccaatacctgacggcaattcgaagacgcaacttattgaaattttgaagattttcaaattcggctcagaactttatcctatttctaaagaaggcccatcacgtgttttaggtcatatatatagttttaaggtcattgtttaaacctaagcttggagaggctaatctccttatctcttttgtacttggaagcaaaaccttggagactccctttagagaaaatctttctataccttaatctcttcttgttttattcattgatttcttattcaatcatgttgtttgcttcattcatcatgcttgagtagttttcttgttaggtttagggtatttcattagggatttggatgatttaatagattgcccccttgctaggttatctgtaggattcttcatcttgattgttcttaatgttagttctagagtagctaactaaaacttgatattagatcataggtatgtccaccataggtacttgttgtttgaaccatcatagaggagcctatgcatttaagaaagaacaggtaggctcatagaagggctctggtttagatactaggtgaactaatcaaacttgataataatgcatgctttagtataggatttctcggcttctccggttatcttagctctaagtatagagaattttgcggaacaccaccggttactctaaaatcatagtttgagttcgagaacggctcgataacaacttagctatttctagatctactatcatctatctcctgagaataccctaagcatgacgcttttattattttgttttcacaactaacaatctgctattgcttacttttgtttctttttattttctttactgtttcacttagcttaattcgatagccattagtctactgtgtgatccgagaactttgtgaatttcatccctaagtgctgcaattgacctcttaatttgagagagtggtcttaggattaatttgaccaatatcaaatttggcgccgttgccgaagttctctttgattcaccattagactaggtgtagaatttatactaagttttttctttcttttgttactcacgcgtttcctttcttcttttttcctctgacgggaaaactaaaagatggaacgcaacaatctgatggcagatatcgatgacagtattgaacgacaccaacaggatgtcgaccgacaccatctacagaacaaaccagctaccataggtgacttcaacaatgttgatcttttctactcaaatcgatcatcgatctagctacctccttttgcaagagaaaaatttgctattctacctgcctattatgatcttgtttcaaaaggaaagtttagaggtgctcttgatgaatcaccactagatcatttggaaatcttcaaaaacttagtgtcctcaatctaagcagatgatgtaccagctgattatcttctttgaaaactcttttctcactctctaacgggaagaggagcatcatggctctcacagctagacgatggttcattgacaaattggacggacacgaagaacgcattcatgaaccacttccttgatgattcagtgacagaattactacgagaaaatatttcttcattttctcaagatccaacagaaagtttgaaggcagcttggatcagattcaaatcctatcagaaggactgcccataacatggtttccaagaaagccagctcatcaacatattcttccgcggaatcgatgagtagtataagatgtgtttcgatggtgcaagtgatggcaatttcatgaaaaggtctcatagcgaagcactggtacttatcaacaatgttgtcccaagtctctcaacttaggacatagaaagtgatcggagaaaagcggctgaggcttccgacatgcgcagagcagaacaaggatctacacacattgcttctccatatatcccttcttacatccaagcccacccaccaaccgttgctcagagtagaactgaagtcatgctagaggaattactcagactgttaaagaccgatattcctcaactgcgaacagaaatcaggaaacgcgagaagtctgcttttacaaaagaatctatcaattcagttgaatcagtgtag

SEQ ID NO: 165242 - DNA, 2615 bp, Arabidopsis thaliana landsberg; identical to SEQ ID NO: 29574
  unsure (1)..(2615): unsure at all n locations

SEQ ID NO: 165243 - DNA, 379 bp, Arabidopsis thaliana landsberg
atgcgtttgactacgaaaggtcgttttgccgtgacggcgatgattgacttggcgatgcgccaggacaacggcccggtcacgcttgccggcatcagccagcgtcaggaaatttctctttcctacctggagcagctgttcggcaagctgcgccgccacgaaatcgtggaatcggtgcgcggccccggtggcggttacaacctggcgcgcccggcggagcaggtgacggtggcggacatcatcatcgccgtcgacgaaccgctggatgcgacgcagtgcggcggcaaggaaaactgccacagcccggagcatgagaatggaccgcgctgcatgacgcatgacctgtgggccacgctgaatgcgaagatggtcgataccatgg

SEQ ID NO: 165244 - DNA, 1018 bp, Arabidopsis thaliana landsberg
  unsure (1)..(1018): unsure at all n locations
tttttagggttgccatgagaaatcttgagcagcaaggaacacaatctttgaactcgggaaaatacatccaaattgatctcctcatggatatattttctcgagttccgcgacgactatagcaaggtttccttgtgtatctaaattatggggatccatactttgccgtcaagattttactgagttgttcttgaatatgtctttgactcgtccacgcctgctcttattaaccttccaagctgaaaatgggaataaattcttcttctcttcacatctgcctcagaatccagatgagaacacatctctttgtacccacccacctgttatcatgtttaccataagaattctcctagagagttttcatctgaattggttctccctcttcgtggactcaattgttgccgagataagggaagtctagatactatcattatttataacccgatcacgggagagtctctatccttacccaaactggaattgaagagatttcatattgtgacaaagccttatttaggatatgatccgattgagaaacagttaaaagtattgtgcatcaagtttagtgaaatcccgagtactgttgatgatcatcaagtgttgacattgaagaatggaaaacatttatggagaacaattcaatacaaaccccattatcctaaatgtaatggaatatgcttagatggttttctgtattatacagctcggatcgataggtggatgtgggattccaaaatagtttgcttcaatgttaagtctgagaagtttaggtttattgacatagatggatgcatgttgatgactcattcttgtactttgatcaactacaagggtaaattagatgcacttcagtttacatttttgggtcgaagacaacttgagttttggattctagaagatgctgagaaatgtatatggtccaaagatatctatatattctagagtttacgaaagattaagaacatgcacgttcttcatatacctttcagccgaccaactatgtcatcaanagttgtggtgt

SEQ ID NO: 165245 - DNA, 496 bp, Arabidopsis thaliana landsberg
atgttaggggggcggagaagacgtctcccccaagatgggacttttaaccaaacacagccttttgatcgactggttggcagtaggcactctttctcctttgacttaaagtcggccactgatcgttggcctttagtctttctgtttgaggtggtgcagtacctatttgaccgctcctttgcctcaagtgtggttaatactgcatttgcatgcaatatcttagaggcgccttctggtaaacttaaacgaaggttctctcaagtatgctttgtggcagggcagccattgggatatcacggttcttggcctactttcgcgctatcacaccatatattagtgtgggggtgagcgaaacaagggcatactggagtacgctatacatcgtacgcggtacacggcgatgatgacgccaatgccgatcaggaagtccccaaagcctatgaatccgctatgggaggatagagggacgaaataagcacttaaaagggaccggaccccc

SEQ ID NO: 165246 - DNA, 553 bp, Arabidopsis thaliana landsberg; identical to SEQ ID NO: 77114

SEQ ID NO: 165247 - DNA, 915 bp, Arabidopsis thaliana landsberg
gtggagatactctctagagttccggctgtatttctagcacgattacgatcaacatccaatctatggttcactttgatcaaagatgggaaactttctaagaagcactcttctaatgctccaaggcactctatggctatcgtgttgattgatcataaggtttattcagtgagatccaatctccgtggaattcacaatagcgttgctccatatgttaacataacatgtcattttagcctaaaagaacatctttctaataattattcaacaaaagtcgatataggccacgtctttcactgcgatggcttattgctatgcaccaccaaggactatagactggtggtttggaatccgctttcaggtgaaacaaggtggattcaaccaagattttgctacaagaaagatgactgctatgctctcggtagatcctcttgcaacaagtacaaaatcttgaggcagggtcgtcttatcaatcctagcgaagaacgttacgtgtacaacatcgtgggggaggatcttgttatcaacaatagccaagaacgttacgagtacgaaatctatgactttaactctaattcgtggaggagtattggtgtgatcaccggcttgttcaatccaaatatcaccagtggcgtgtctgtaaatggaatcacttactggtttgatattagtgaacaattcttactaagttttgatttctcaacagagagatttggaagtgagtctctcccagagggtgatagtcatttggctttattagtgactagacaagggaaacgattttgtatgttatatactaattataaatatgtaattggaacaaacgttaatttatggatagcaatgaagaatagtccctactcccttagcaatgtaatggagcaagtataaaaataaaaacggggaggagttggtaaa

SEQ ID NO: 165248 - DNA, 2323 bp, Arabidopsis thaliana landsberg
cgcattgtttgcactgccattattatggatatacccatttcatgcaatgattccaaaatatacacatccttaaaaaagagacagatattaaaacccatacccgaatttgactgcacattgatgcaaatggtgcagatggcaggcaaagtttagggctttcggcctgagaataggatatgtgggcaacatctgttgggcctttttgttcttcccggtgacaagagcctctacgattctgccacttgtcgggttaacgtcagagtcaagtataaaatatcacatttggcttggacatgtctcaaatttttgcttcctcgttcacacagtcgttttccttatctactgggccatgatcaataagttgatggaggtccgtgttacatgcatctaccttaatcttatccttaaaacaaaacaaaacaaaactttcattctttcttttattccaactgatatttgtttttacgttttcttatatatgtgaagacgtttgcatggaatccaacatatgtgcataatctggccggaacaatagcgatggtgattggaatagcgatgtgggtgacgagtttaccatcctttagacgaaagaagtttgagattttcttctacactcaccatctctgcggtctctatatagtcttctacgtaatccacgtgggagactcgtggttctgcatgatcttgccaaacatctttctcttttttatagaccgatacttgagattcttacaatccaccaagagatccagacttgtgtctgctaggatcttaccttcagacaacctcgaactcactttctccaaaaccccaggtttataactagttcatccatttacgttgacattcaaatgttttgggtttataatctgaaagagaaatataatataaaattggattttaattaattatatactttgaatagtatttgcattttaatttgaactagagtgccacgttcaagagagagatgcatgcttcatgattgttgtaaccatttgttttactaactatagggctacattataccccaacaagcatatagtttctacatgtgccaagcatttcgaagattcaatggcatccatttactataacttcgagcagcaacttggagaaagatacactaagtgttgtaatcagaaaacagggaagttggactcaaaaactttacacacatctctcttcttccattgattctctcgaagtttctactgaaggtccttatggccctaactcttttgatgtctccaggtaaaaatttcaaaagtcttatttaagttccttacttaactactttatcttaagtatatctaattgttttcttcctgatcatatataggcacgattctctaatactagtgggcggtggtagcggagttacacccttcatttccgtgatcagggaactcatatttcagagccaaaaccggagcacaaagctaccaaatgttctccttgtttgtgcctttaaaaattaccacgatcttgcatttttagacctaatcttcccttcagatatatcagtctcagacatttctaagctgaatctccgaattgaggcttatattacaagagaagacaagaagcccgagacaactgatgatcacaaacttcttcagacaaaatggttcaaaccgcagcctctagactctcctatctcacctgttcttggacccaacaacttcctttggctcggagttgtgatcttatcatcattcgtcatgtttctcttgctcatagggatcgtcacacgttactatatataccctgttgaccataacacaggatcgatctacaatttcacgtatagagtgctttgggtcatgttcctaggatgtgtgtgcattttcatctcgtcaagcataattttcttgtggcgcaagaaagaaaataaagaaggagataaggactccaagaagcaggtacagagcgtagagtttcagacacccacgtcttctccaggttcatggtttcacggccacgagagagagctcgagagcgtaccctatcaatctatagtacaagccacttcagtccacttcggctccaaacctaatctgaaaagtaagtaatctattaccacctagagtccacattatatcatcacttacataacaaaaatggtataaatgaatgtgcattcatgcatgaggctgatactttaagccttatcgttttgcagagattctatttgaggctgagggttcggaagacgttggggtgatggtttgcggaccaaaaagatgagacatgaagttgcaaaaatatgttcatctggtttggctaagaaccttcactttgaggcaattagttcaactgg

SEQ ID NO: 165249 - DNA, 477 bp, Arabidopsis thaliana landsberg
atgcacatgtaagttgatgagacgatgcaaatggactcttctgagcttgaaagcccgtgtaaattaggttttaccttttcttcaacctgtggaattatagatatgtgtataggacactatttactcgtttggaaacaaaagaaacgagccgttatattaagaagaagaagaagaagtcaaagaaagatggctgtgtagaagatgatgttcatcgagagagagaactgatattgatcttggttataagtttcggtgaatgtgaagagaaagagagagagagagtgagaaattgatgattcgatgacatataaaaggtatagagagtgtggaccgctcaattgcgcgtggctttatccatgtccccatttgcgaacgtcacccaccacccgcgtcttttcacagtcttgaggacttgtttttcctaaatatatattagctatactatattttttattaggagtggaacggaaataaaaa

SEQ ID NO: 165250 - DNA, 4672 bp, Arabidopsis thaliana landsberg
tcagggaaagagtggaaattactcaacaaaaggcaggggttttcctcaacaaatctcttcaagtacttcaggttcctacaacaacacagagaatcgagttgtgtgtcagatctgtgggaagccaggacatccagctttgaagtgttggcacagattcaataacagctatcagtatgaagagttacctgctgccttgactgcaatgagaatcacggatgtgacagaccataatgggaacaaatgggttggtgacagtggagcgacagcacatgttacaaactctactcacaacctgcagcaatcacagccatatggaggatcagattcagtcatggttggaaatggagacttcttgcctatcactcatactggttcaacaaccttgccatcaagctcaggtattttatcacttaaagatgtactagtttgtcctaacattggaaaatctcttgtgtctgtttcaaaacttaccagggattatccatgctctgttgattttgactgtgattatgtccgtgttactgataaggccacaaagaagcttctggctcagggaaacaactttaatggtctgtatgttctgaaggattcatctgttcatgccttctattcctctcgtcaacaaacaacatctgaagacgtctggcatatgaggttgggacatccaaatcaacaaatccttcagctcctacacaagaataaagcagtcaacatcagtaaaagttctaagggaatctgtgaagcatgtcagtatggaaaaagttcaagattaccattttctagctcttgctctactatttccaagcctcttcagaagatacattgtgatctgtggggtcctgcaccaataaagtcagtgcaaggctttagttattatgccatttttgtagacaattactcaaggttttgttggttttatccactaaagtttaagtcagatttctttaagatattcaccatattccaagctctagtggaaaatcagtttcaaaacaaaattggcagttttcaatgtgatggtggaggagaattcacaagtgctaggtttttgaatcatctacaacaacatggtattcaacaacttatctcttgtccatacacaccacaacaaaatggattagcaaaaagaaagcataggcaccttattgagttagctctggcaatgatgtgtcacagccgcgtggcgatgagatactgggttgaaggattcttcacagcaaacttcctcattaatctcctgccttcttcagttctgtcagacaacaaaagtccctatgaggtattatttggtcagaaaccagattatacttctctcagagtctttggatgcaactgttatcctacattaagagattatgcaaagaacaaatttgatccaaggtctctgaagtgtgtgtttcttggatataatgaaaagtataagggatacagatgcttactgatttcaacaggtcgagtttacatcagtcgtcatgtgctattcgatgaggaggacttcccattccataaggtatcgccttccccacagttcatcactactccacttcgcatggcttggcaaaagagttttcaacctcagacatcagaaacaacacttagttcagaccagaatcagaaagtatcagctcagatcgacatagaagcttcagcaatacctattcctgctacttttccaactagtggtgatactgggagttctgggtgtacagcaggcattgatcctgttcctataggcaacaactctttagtatcatcacctagcttggcagaggtagtgacatctgcaacaacagaaacagctacaacaagtcagtcatcagcaacaacaacataaacaactacagaaaatagaggattatcagtacctactgtatcatctgtcagacaatctcaaggacatcacatggttacaagatctcaggtgggaattagaaaaccaaatcccaagtatgcacttgttacttccagagtcaaatatcctgaaccaaaaacagtaacttctgccttaaaagatgaaggatggaataaagcgatgcatgaagaatatggaaactgtcaagaagctgaaacatggtcattaataccttatacacgtgacatgcatgttctgggctgcaagtgggtcttcaggacaaagctaaatgcagatggttccctagacaaactcaaagcaaggttagtggcaaaaggattcgatcaagaggaaagaatcgattacctggaaacctacagccctgtggttcgaacagccactgtgagaactgtccttcatgttgccacaataatgggttgggacattaagcaaatggacgttaagaacgccttcttgcacggtgacctcacagaaactgtctatatgacacaacctgctggatttgttgatcctacaaaaccagaccatgtttgtcatttgcacaaatctctttatggcctgaaacagtctccaagagcctggtttgataaattcagtacttacctgctcgaattcgggttcacttgcagtatgtctgatccatccttgttcatctacatcaaaggtaaagatattataatgatactcctatatgttgatgacatggcaattacaggaaacaattcagataccttggctaaactgcttctggaactcaacaagaacttcagaatgaaatatatgggcaagctgaactactttctcgggatacaaacgcagtttcattcagggggactgtttctttctcaacagaaatatgcagaagatctcttgatagttgcaggcatgcttgactgtgctcctatgcctactccgttgcctctgcagttaaacaagacaccacatcaagatgagaggtttgaaaacccgacttattttcgaagtttagctggcaaacttcagtatctgacacttactagacccgacatatagtatgcggtgaactatgtgtgtcagaagatgcacatgcctacagtttcagacttcaatctgctgaagagaataatcagatatatcaagggaactgttactatgggaatctcgtttaataaagagacggattgtaccttaagagtgtatagcgacagtgactatgcaggatgtcagaacactagcagatctactggtgggttttgcactttcctaggtaacaacatcatctcctggcaatcacaaaaacaaccaacagttgcaaaaagttctacagaagctgaatatagagctttatatgaagctgcatcagagattacctggctgtgcaaactcttgaaggaaattgggattcctcttcatcagcctccggagctgtactgcgacaacctctcggcagtatatcttactgcgaaccctgcttttcacaaaagaagcaagcatttcctgaatcactaccactatgtgcgtgaacaagttgccttggggaatgtaagggtttctcacatacctaattatctgcagctagccaatgtcttcaccaaatcactaccgctgggtccgttttcttcactcagattcaaactcggcgtcgatgttccacctactccaagtttgagggggactattagtagagtgagtgaagtagagcaattctgcttgcctaaagcaaaagaagaagaagagagatcgacaaaagctgagcaaaaggacaagagagttaacctagcttcagacataactctaaacgacattgttggattaagtgagctgaaacagaaactgaagcccagtaacatggtctggaagcccaaagcaaaacaagagcccatcatggcccaagagcagcaacggttatctgcaaaagaagaagacataaatggtgagctggagattaaggaagcttcaagaaagagcatctccagctgtcttggtcaagaccttatcttgactaatagattcaaatgtttagagggtttaacctaattctctaggactatataagagagactaatgtaatctgaaatgttaaaagtgaaaaataagatggaaatattatcagtctccttcatacctctcatctagatagctcactacgttcatggtatcagagcttcatggttaatcaatccatggatctctatgcttatcctgcgttaaacatagcaaattgtgttacattaaaactcaatcagaaaaactatatatcatggaagtctcagtttgaatccttcttgtgtggacaaaacctacttggatttgtcaatggtgccatttcagctcctgtcactgccttgcaagttccccaagtaggaggtgctgttctagcggttccaaatccagactacaatgagtggttcagggcagatcagattgtgcgagcgtggctccttggttccttatctgaagacatccttgctgaagtcacaggcaccacaacatctatggagttatgggttgctcttgcaaaacatttcaacaaggtgtcatcttctagactctttgaactgcaaagtaaacttcagacatcagaaaagctagataaacctatggatgagtacttaagagatgttaagaatacttgtgagcaattagcatctataggaagccctgtttcagaaaaaatgaagatttttgcagtattgaaaggcttaggaagagagtatgaacctattaaagtctctatagaaggaatgatagatctctctccgggtccaacttttgaagaagtgtcctctaggctcaagagttttgctggcagacttgcaa

SEQ ID NO: 165251 - DNA, 591 bp, Arabidopsis thaliana landsberg
gctcttacttaacgtttcaccaattatgtgatcttacacaggagacctccaactccagaagagttaaatcaaccagattccccacttaaagccttgttttcaatgatggaggggcatctcctcatgctctatgagattgcatatgggaaagacaacaaaacatttctaaaggtgtgaatcttcactagtcgacatcataactttctagtttccatatacaagtttaaagattcatttatataaaaattcatgtggcagaccatcctttatgtggccatcatatacaacattgggagctacatcagcctcctcacaattttgtatatatgtaagaccacatatatataactcatgacctgttatcgatctccttgtctttttatgtcgtccttctatttgtttctaataactattattataaccatgcacatccttgcaggcttggtttgctcgatgacaatcccggttgtttacatgcaatttcaagagctcattgacagtttcatggggaaagtatcagaagagaagaacaatttacttgaagtattcaaacaagttgtctctaaaattcctagggcccccaaggtggag

SEQ ID NO: 165252 - DNA, 264 bp, Arabidopsis thaliana landsberg
caatggaaggcgaagtccacattgctcatgttccaccacgacgtgaagttgaaaccggagatggagtttgatgatggagttctagctttgccggctgtttttgtagcagagtcttttgtcggagttgaagctccggtttcacagcggcttcgaaaacgaaaaggaaaaagagtgagacttgaagaggaggaggatgacgcacctgaattgggggttgacgcttacaacgaagaagactgtggtgtgtatggtgatgaagactgc

SEQ ID NO: 165253 - DNA, 236 bp, Arabidopsis thaliana landsberg
atagttcagaaggtcctcgagctgctgcatgcgaagaaggtgtttggtacctcttcgatggggagagagctttgttccgaatccttgacaaaagcgagcgcctgttcatcatcaagaactaaggtgggagaaactcaaaactaaaattcagtagaccggagcctgaatgatggaggaaacaaatgaatataatgaaaagtttttgataagaaagtgaagtgaaggagataaagaga

SEQ ID NO: 165254 - DNA, 1523 bp, Arabidopsis thaliana landsberg
cgcaccgagggttgtctatatgtatgcttaacttaaatcctttgagagccctagctggtttactctttgcttgaaccttgatcaagccctatcttctgaaccaagtaataagaagaagtcaagtgggtatgttttggctacagtatcaatgcctcatcctcgtcttgtgcaacgttccagtctcgtggcggttggttctaatatctacaacattggcagatccatatcaccttactctagtgtctcgatttttgattgccggtctcacacgtggcgcgaggctccaagcttgccagtggagctagttaaagtttctgctggcgtccttgacggaaagatatatgtaggcggaagttgcaaagatggagcctctcttcccttgaagaacactttcgaggtgttcgacacaaaaacacaagtttgggatcatgtacctatcccttacaacgaagcaaaacacaacatttactccaaaagcttatgtattgacgaaaagtggtatgtaggggctaagagaaaggtggtttcttacaatcccaagaaaggtatatgggaccttgttgaatcagagatgtgtagttataagtcttcatatgattattgtgagatagagaacgttttgtactctgtcgaaaaaacatggcgtggcactgttttcagatggtatgacactgagctaggacggtggagaaagttggagggtttggtagaacaactacctattattcttgcttgtcctagattagctaattttggtggaaagatggcggttttgtggaaggagaatatgacttatagtgggtctaataagatgctctggtgtgcagtgattacgcttgaaaggcgcaaaaaacgtgaaatttggggaaaagttgagtggtttgatcatgtgcttacagtccctctaacatatgttttcgaaaatgttcttgttgctaccatttgatgaatgtgtgtggtgtatatgcatgcaaccatgatgtataactctttctattgtttcacttctaatcatttaatgccactggttgattatagaatctgttcactttttcagaaatttataaaaccctacaaacaactcataattatcaagagtgtttcatgatgttttggttgttcataaataaggttcattatcaaaccgttccttgtaaataggaattcatgatgttttcttgtagtgcgcatatgtactcaatgaatgtgtagtgctccaaaagatggtatgacactgagctaagacggcggagaaattggagggtttggtaggactacctaggttctctcttcatgcttgtgttagattggctgaatatggtggaaagatggcggttttgtgggagcagaatatgccttatagtgggactggtgacagaggcggtaagaagatgatttggtgtgcggtgattacgcttgaaaggcgcaaaaatagtggaatttggggaaacgttgagtggtttgctcatgtgcttacagttcctaaaacatttgttttccaaaagtttcttgctgctactgtc

SEQ ID NO: 165255 - DNA, 400 bp, Arabidopsis thaliana landsberg
aatccacaatccatgagcctaagcagcaacaactcaacatcagatgaagcagaagagcagcagacgaacaacaatataatcaacgagcggaagcagagaaggatgatttcaaaccgagaatccgcaaggagatcgcgtatgaggaagcaaagacaccttgacgagctttggtcacaagtgatgtggttaaggatcgagaatcatcagttgcttgataagcttaacaatctctctgagtctcacgacaaggttcttcacgagaatgctcaacttaaagaagaaacatttgagcttaagcaagtgatcagcgatatgcaaattcaaagccctttctcttgctttagagacgatataatccccattgaataaagcatttgtccccgattcatatttatgaaaa

SEQ ID NO: 165256 - DNA, 1335 bp, Arabidopsis thaliana landsberg
gcaactgggttcctctatgggaaataacactaatctcaaggaattgcatctactgaattgctcgagtttgatggaatgcccttcttctatgttaaatttaactcgtctcgaagatttgaatctcagtggatgcttaagtctggtgaagctcccctctattgggaatgttattaatctccaatcattgtatctcagtgattgctcaagtctaatggaactccccttcactattgagaatgccactaatctcgatacattgtatcttgatggatgctcgaatctactggagcttccctcatctatttggaatatcactaatctccaatcattgtatctaaacggatgctcaagtctaaaggagctcccgtcttctattgagaatgccattaatctccaaaacctgcttcttgacgattgctcaagtctgttggagctcccctcgtctattgggaatgccactaatttagtgtacatgaaccttagtaattgctcaaatctggtggagcttcctctttctataggaaaccttcagaagttgcaggaattgattttaaaaggatgctctaagctagaggatcttcccatcaacatcaacttggaatctttggacatacttgtgctcaatgattgctccatgttgaaaaggtttcctgagatctctactaacgttagagctctctatctctgtggaaccgcaatagaagaagtgcctctctcgatcaggtcatggccccgtcttgatgaattgctgatgtcatactttgataatctagcggaattccctcatgttcttgacatcatcacaaatctggacttgagcggcaaagaaatacaagaggttccttcactgatcaagagaatatctcgtgttcagacactcatactcaaggggtacagaaaggaggtatcactcccacagattccagattctttaaaacggattgacgctgaagattgggagccttggagagactagattgctcctttcacaatccaaagataactctattgtttggctagcgctttaaacttaatcaagaatcatgaaacctaatcatgcacacacctactaaacaagcactcttacctggtaaagatgtgcctgtgtacttcactcaccgagcgagaggaggttcattgacaattaagttgaatgagaggcgtcttcctacatcttttagctttaaagcttgcatcttgctggttagaaagggtgacaatattgactgtgagaactgggggtccgtatatcttaccatcctagagaaacagagtgagtcgcaaggtatagtttcgaaatctcaactctattctccactgtttaaaagagcatcg

SEQ ID NO: 165257 - DNA, 644 bp, Arabidopsis thaliana landsberg
aagaaggggaagaagacggagaagaagcttcacctagtccttgtttggaaccacacgcttatccattcgactcttgtttcgtaaatttctaaaaaggagaagtatctactcgaacaagtcgattcaaggttagatttatggaaatcaacaaaggccattccaatgagtatatcattaaacttcgaccttttcttcatgaatttctattaggagccaacgagcatttcactatgcatgtttacacaatgggtttattcacttacgcacagaccgtgttgaagttgattgatccggacaaagtttactttggagatcgagtcataaccagtaaagaaagtcctagtaagaagacacttgagcttgttgtggctgataagcaaagtgtcgtaattgtggatgatactagtgatgtttggcctcatgacaagagcaacttgttgcagatcaccaagtatgagtagtttttcagagatggtgatgacaatacaaagtcgaaatcttacgcagaaaagaagacggacgagtgtccagacaacggatcattggcgaatgttctcaaatttctcctacagattctaaaaagattccaagaggagttggattcacaagacttgaggctgttgatacatggtccttgcagacaa

SEQ ID NO: 165258 - DNA, 557 bp, Arabidopsis thaliana landsberg
tgccctgtatcgcctgcttgctgtgacggcccaccaaactggtgtcgacctcgccgatgcgaaggctttggcggctttagcccctgaaatggacatcagattctctgaaactgatgaaaaacaagaacttattattctcaataatcaggatgtcacgcgtctggtccggaccgagaccaccggcggcatggcgtccaggatcgcttcaatccctgaggtaaggcttgcattgttcgagcgccagcgggcatttcggcaggcgccgggattgattggcgatggccgcgatatgggcacggtggtgttcccggacgcggttttgaagatttttctcgatgccagcccagatgagcgcgcgcgccgccgcttcaatcagttgagggaatccggggtaaatgctagtctagacgaccttcgcgctgaaattgctcagcgtgatgaaagggatcgcgggcgcgctgttgcgcctctggtcccggcgacagacgctgtgacgatagatacaacctcactgccaccggccggggtactggccaaggtggatgaactgttgaagt

SEQ ID NO: 165259 - DNA, 1755 bp, Arabidopsis thaliana landsberg
atggatgagacagaatcgtcatcttcaaggccagagagagaacagagagaatacgaaagtttcagaaggaaagctgagatagcccgaggaaagagagcgatgacagagaggtatgagcttataaacgaagatctggaagatgagtacatgcctgaacatttttgcagagctaccaaacttctgcacaagcccgacgtattgcctgctgaggaatatgttaggcttttcaagctgaacgagttctgtagcataaggtatccttgctcgacctcacttgcacaactcggattgttggaagatgttcatcacctgtaccagagttgtcatctggacactctgatggcttatccgtatgtagcgtatgaagatgagacaatacaatttctctccacgctgcaagtagagctctaccaaggtatgacctctgatgagttggattgtgaaggattgggattcttgcgattttctctgtatggtcatgagtataggttatcaatcaagcgcttggaaggattgtttggcttccctagtggaacgggatctaagcccaagtatgacagagaagagttgaaagacttgtggatcaccattggcagctctgtaccgctgaatgcttccaggtcaaagagcaatcagatacgcagccctgtcatcaggtacttccagcgttctatagccaatgtactctactcccgagagatcacatggactgttactaactctgatatggagatgatcgcaatggccctcaagggaactcttcgccaaactaagaatggtatgtctctccaaggtgaaatcaatgacacacctctctctgtacttcttctgatccatctgtgtggatacaagagttgggctgtcagcaataaccgcaagagagcaggaggcgctctgtgcataggtggtgttgtgacaccgattctgatagcttgtggagtcccaatcatatctgtcggactcgagccgcgagcaatggatatcgagcacctacgtcactgtgaattcctggagtttgcaatggttgacgacttccacaggttcaggtttgagcactctacaaacaggagagctaacatccttctccctagccctgaggttacacgaataatagagggagataatattgattttcgacctgaggttggacgcctctactatgagaacgctccgccattagatgaggaggatcttctagaataagctgtttcggatgggatggatgacgattgcgcagtggagttcgacactagcatgtatcactttggtgaacatgtacctccagcgaggcagagcaagagcttgaccgaagctcataagaacaacagtaaattgcagaagtggtgcaagaagcaggacaagctgctcaccaagtgtttcaaggctatcaagcttctgacagataagctgagttgttcctcctccaccacagctattccacagggactgcctcctctggagatgccagcgaggagatttgatgagcctgagtactctcttccaagtttattcacacagtggactgtgtgatttaagtttgggggagggctcaggaagtgtgtgttgcattgtatatatttttgagtctgcattcatctaaggcatagaaaaaccaaaaaaaatttgaaaaatttcagaaaatgatttcacaaaaaaagagtgttcatgtagtttcattacatttaggatcaagtctagagtgtttcatttaagattgttgcatatgcataggggatgatgatgagatagtcttgt

SEQ ID NO: 165260 - DNA, 589 bp, Arabidopsis thaliana landsberg; identical to SEQ ID NO: 39349

SEQ ID NO: 165261 - DNA, 1568 bp, Arabidopsis thaliana landsberg
  unsure (1)..(1568): unsure at all n locations
atgtcgtcggatatgcgtgacgagcgtttcttttatcatcgttatctttccgttacaaatagaacaactccaactacggcaacaaacgtgccaacatcaacatcgaatatgcgatctacgagtttgatgacaccaagggttgcacatacttcaatgtcatctggaggagattttcccgacgaccgttttttcaatgctcgtcatcagtccgctacggatagagcagcttcaaatagaagcagggcgatcatgcccatatcgacaacaaacgtgccatcatccacatcaaactcacctagggttttgcagacgtcgatgtcgagacgagttacctcaccaatgtcctcgtcgacgaggaggagtgtgcaagcatccatgtcagcacgagaaacggtatcgtcgtcgacatcaacgaggagcatgcaaacgtctacctcaacaccggaaattatgcctacatcaccaagaaatgtgataacaaggagcgaagaaatagcaaatacattcactcaaacttcttacatacaatttgggagcctgtactgggagacgaatacaacttattcaactagaagttggacgaccatgcccacatcgacaacaaacgtgtcatcatcaaactcacctagagttttgcagacgtcaatgtcgagacgaggtacctccccaatgtcctcgtcgacgaggaggaatgtgcaatcatccatgtcaggacgagaaaccgtatcatcgtcgacatcaacgagtagcatgcaaacgtcaacgtcaacaccggaaattatgcctacatcatcaagaaatgtgataataaggagcgaagaagtagcaaatacattcagtactcaaactccttacatacaatttgggaggctgtgggagacgaatacaacttcttcaactaggattaggactaccgtgcccacatcgaccacaaacgtgccttcatcaaactcatctagggttttgcagacgtcaatgtcgagacnnnnnnnnnnnnnnnnnnnnnnnnnnnnnnnnnnnngtgtgcgagcgtcaatgttggcaccaggaaccgtatcatcgtcgacgtcaacactagagattatgcctacatcggcaagaaatatgagtgaagaagtagcaaattcattcactcaaacttcttacatacaatttgggagcttgtgggagacgtttaaaactgtaacaaagttgtcgcgtgtagcgatggtggagaatggagagtgtgtgatatgtctggaggaatggcgcaaaggtgatatggagacggagctaccatgtaaacacaagtatcacttggagtgtgtgaagaaatggttgaagattcacgccacgtgtcctcagtgtagatacaaaatgcctcttgaagctgaagactagtgattatgatttctgaatcttctgactcagtatgagggttttgacatcaacttttgatttttttaggggaaattaatgaattcaattggaatcatgttttgtagaagcatgattaggatctattgttgaattcgtatgtgaagatcatattcccttcgcatttgtcaatattggttacattaccaaat

SEQ ID NO: 165262 - DNA, 468 bp, Arabidopsis thaliana landsberg
  unsure (1)..(468): unsure at all n locations
nnnnnnnnnnnnnnnnnnnnnnnnnnnnnnnnccacgcgtccgactacgcgtccgaccacgacataagagacaacgaaaacctctccattgtgcaaatcgtggacaccccaaagaacgttccgaacgggttcgggtctactttcgtgatggacgatgcgatgaccgaaggaccagagctgagctcgaagcacgttgggagagcccaggggctgtttggcttggcctcttttcaggaccttgggatgttcatgctcaccaatttcgctttcaccgaaggagcttatgctggaagcacgttgagcatgcttgggaggaatcccatatcggagcagaatagggagttgcccattgttggtggcactggcgtgtttagatttgacactggctatggccattgctaataggcgttaattccgtttttacccctcaacatttttgttgctgagtccaatgtacaagtgtggcat

SEQ ID NO: 165263 - DNA, 595 bp, Arabidopsis thaliana landsberg
atgtcgaatcaacaatcatcacatctcatttcattacacaaagatggtttataccgtctaaacctcaacgaaaccacgttgttgaagctagacttgccctttacattaccggccgaaaccgaacctgtctgtattcttcattgtcgtggaatgatgtgtctgaccctcaaagaaaacaatgacctagcgatttggaaaccaggttcggaggaattcaagagaataccaatggttataccgggccaaaccacaaatctattgggatttggttatgaccggatttctaatgattacaagattgtaacgaaaattggtttcaaaacctatatctatgctttcaaagaaagctgttggagagaaagtgtaccagatacttctcttcatcgcaaattcatagaccggaccggtacggttgtggatagcagacaggtctcacaccaaaaacccccgtaggaaaaacaccatcctctgtttcgatttcgccaaggaagagtaccaagagctattatctcctatgcacacggagtcgaaatacagttcatggttaggggttttaagaggagagctatgtgttatcgatcattacccaagtcta

SEQ ID NO: 165264 - DNA, 2166 bp, Arabidopsis thaliana landsberg
aagagtatcattcgtattactctctcttttactttcttattcatttgtcatttttcggacgtgcttgcggctcctactaggcacttgtgtcgtcccgaacaaaaggatgcacttctcaagttcaaaaacgagtttgagattgggaagccttctcctacttgtaagatggttggcattgaatctcatcggaagacggagtcatgggggaataacagcgactgttgtaattgggagggagtcacgtgcaatgccaagtccggggaagtgatcgagctcgaccttagatgcagctgtctccatggccggtttcattccaacagcagtattcgaaaccttggtttcctaaccaccctagacctttcatttaatgattttaaaggtcaaatcacgtcttcaattgaaaatctttcgcatctcacctatctcgacctttcttttaatcatttttcgggtcaggttccatctttcattggaaacctttctcatctcacatctctcgagctttcttctaatcagttttcgggtcaaatcccgtcttcaattggaaatctttctaatctcacctttctcagtctccctagtaatgatttctttggtcagattccatcttcgattgggaaccttgctcgtctcacctatctctacctttcttacaacaatttcgttggtgaaatcccatcttcttttggcaatctaaaccagctgatcgtcttacaggttgattccaataagctcagtggaaatgttcccatctcactactgaatttgacgaggttgtctgctttattactttcccacaatcagttcacaggcacgattcctaataacatcagtttactatcaaacttgatggactttgaagcaagtaacaacgctttcactggaactctcccttcttctctcttcaacattcctcctttgattagacttgatttgagcgataaccaactcaacggcactcttcattttgggaatatatcttcaccatctaacctacaataccttatcattggcagcaacaacttcatagggacaatcccgagatctctttccagatttgtcaacctcacgctttttgacctttcccattcaaacatccaaggcccagttgactttagtatcttctcgcatctcaagtcgcttgacgatcttaggctatcctatttgaccaccactacgattgacttgaacgatatcttaccatatttcaagacgctccgttcattggatctctcaggcaaccttgtttcagccacaaacaagtcttcagtttcttcggatcctccttcgcaatcgatacaatctttgtacttgtcaggatgcggtatcaccgattttccagagatcctaagaacacaacacgaattggggtttctagacatttccaacaacaaaatcaaaggtcaagttcctggctggttatggacgctaccaaacttgttctacttgaatctttccaacaacactttcatcagttttgaaagctcgtcgaagaaacatggactctcctctgtccggaaaccatctatgattcacttgtttgcctccaacaacaacttcacgggcaagattccttctttcatatgcgggttgcgttctctaaacactctggatttatctgaaaacaactataatggttcaatccctcgttgcatggaaaaactcaagagtactcttttcgttctaaaccttcgtcaaaataatctgagtggaggtcttccaaagcatatatttgaaagcctaaggtcgcttgacgtcggtcataacctactggtgggaaagcttccaagatctttgatccgtttctctaatcttgaagttttgaacgtggaaagcaacagaatcaacgacacgtttccgttctggttgagttctctgtcgaagttacaagttcttgtattacgctccaatgcattccatggaccaatacatgaagccacattccctgagttgcgaatcattgacatatcacataatcacttcaatggaactttgccacagagtactttgtgaagtggagtgctatgtcatcacttggaaaaaacgaagaccagtctaacgaaaagtacatgggatcaggcctttactaccaagattcaatggttttgatgaataaggtttagcgatggagctggtacgtattctaacaatctacacagcactcga

SEQ ID NO: 165265 - DNA, 718 bp, Arabidopsis thaliana landsberg
cgtccgattgaaattggtatcgacgttcctgacgaacattcgtgatagaaggttaagattgggatctattttgcaacttggtgggcattgaacgttgtgtttaatatctacaacaagaaggttttgaatgcttttcctacatgtggctaacttcgacgctctcttgcttgtggctctttgatgatgcttgtctcttgggtcactagaattgcagaagctcctaaaatcgatctcgatttctgaaaaactctggtctcggtaaaggatctaacttttattagtcttgttgcttcatatattgctttgctttagatgtgtttgatcttgaaagggaaacatttttaggttaagtgtgtagtagtattggtggaattgtgtgatgatggttttgattgttcaggtggctttggcgcgtacgattgaattcaggtggatagtggcacaaagtgtgttctagcatttgtataatcaagtgtcatacatgtccctcgaccagatttcaccattgacatttagcgttgaaaacataatgaagcggatctcagtcatcgttgcctcaatcatcatcttcccaaacctgttaaaccggtcaatgctctcggtgctgccattgtgatttttgggactttcctctactcacaggtaaacaaacaaactgatttcttgtttacctgcctctagtactttgttctttagtgaacaagttctagttctaata

SEQ ID NO: 165266 - DNA, 211 bp, Arabidopsis thaliana landsberg
tttgtgatagtcgtcatatcatctccaattttgatcaaatcagaggtggcacagtcgtggattccatcagatctcaggctgctatgcttaccggcaatgaccacaggaggacaaccaactaaggattgttgcaacacactgattgggcaaaaggaaagtttatgtggttacattacaaacccattatactgtttgttttttacctctccag

SEQ ID NO: 165267 - DNA, 1043 bp, Arabidopsis thaliana landsberg
  unsure (1)..(1043): unsure at all n locations
atgatcaggggacaggagccaacatagacctacaacaggctcaaaaccctggtcaacaaaatccgaagctatggaagcacaagatggacggatcatgacgtcgtccgactcatgctcaggtcatttacagtaattaaccctcatcttgtgaaccttattcgtgaaaaccccaggtacaccaagatgacccccgaggaaatcctcagaaaatttgtgagcgggcgcatgatggtgaaggaggcgcgatacgtggacgatgcgctaaatggtccactgcccatctacgagtcgcagctcgttgctcccaaagcaactagcagcaaggaggcactaccaagcaaggtagcacaagtggaggctgctgggctcaatgaagatgaaatggcacttatcatcaagcgcttcaagaccgcgctaaaaggacgcaaggagtaccccaacaagaataaaacaagggggaagcgctctgcttcaaatgcagtaagacttctagaaaagcaagaggacattttgtatgaggacatgacaagtttgttagtgttcaaaagtcccttgctttagaaattaaaagaaatgaaatgctattctctgagttgtctgcttgccatgaatctatctctagtttaaataatttaaatgatgaattaaatgctaaactagaggaagttaataaaactagttcatgtgtagagcatgttgttatttgtaatagatgtaaggattttgatgttgatgcctgtaatgaacatcttgcttctattaccaaattaaataatgaggtggaaagtcttaatgctcaattaagacttgcaaggttgattttgataaannnnnnnnnnnnnnnnnnnnnnncactgttggtagacacccttcaattaaggatggacttggttttcaaaaggaaaccaagaacttaacaagccaaaggactcccattcccaacaaggagaaagggaaggcccctatggcgagtagtcctcaaaggaaccatgcttttatttatgataagaaaattgtagccgctctcattatcataagagtta

SEQ ID NO: 165268 - DNA, 433 bp, Arabidopsis thaliana landsberg
acgatgccaacccagtctgtaactcgtctttcgctgaatcctagatgtgcagttagatggactaagccaccactagatacgcttaaatgtaataaacatgtttcttggcttaatgatgttcacatctgtggcggagcttggattgtcaggaatcatcatggggacgctgcttttcatgcccgagaaatgtttttaccagcgtcaaatcgtattgctgcggagttgagaggggttttatgggtcttacacagtttacgtgacctacacttagataacattgagatatggtcggactgtctatggaagccattagtgatcccataaattggccaacgtatttatcttatcttcccagaattcatcccattctttcgaattttggttagaacgtgtttaaaatttcatctacaaaagccaatacaatagcacgagg

SEQ ID NO: 165269 - DNA, 1660 bp, Arabidopsis thaliana landsberg
tacaaatcaattttaacgagaataaacataattgaaaaaagttgctatacaaaaaaaaaagccttgctatacagagcttaagcaataaaagctacaaccacaagcaatttggtctgtcacatttctgaaaattattataattcttttgttagtacccaagaaaataagacgcggcacaaaagcaatactcacataaacccttcaggttcttgaaacaaacaaaaacacttgcttcacaagcctaaacataaaaagtaaaaaaacatgtatctacactatcatatttcatatttcttaaaattaattaaagaaatagtatccataaaagaagaagacggcgcagcacaaaacccacagtaacataaaaccctaggttgttcatgtatccttccagcttgagagcatgatgagaattcttctacaacacgcaacgcgttaccgggttcgctcctttggaaccctatcatccccatgtggcagagagccaaacactgcagcatcgtatcacagatgctctccatcgaaatgcacaaatcattccggtgctagaacagtggcggcaacaggggaatcaagtgaacccttcgcacgtgagagtcatcatcaaaaagcttcgtgattccgaccaatctctccaagcccttcaggtttccatattttccctttccccaatttggtgttctctatctcttataagtgttggaattgatgtcttgcggtgatgttataattaggtatcagagtggatgagtaaagaaaaaatctgcaatctaatcccagaagattttgcagctcggcttcatctgatagagaatgttgtagggttagaagaagcagagaagttctttgaaagtattccaaagaacgcaagaggcgattctgtttacacctctctcttaaactcgtacgcaagatcagacaaaactctgtgtaaagccgaagccacgttccagaaaatgagggacttaggtcttctcttaagacctgttccttacaacgcaatgatgtctctctacagtgcactaaaaaatcgtgaaaaagtcgaggagcttttgcttgagatgaaagataacgacgtggaggcggataatgtcacagtgaacaacgtgttgaagctatactcggctgtgtgtgacgtgaccgagatggagaagtttttgaataagtgggaagggattcatgggatcaaacttgcgtggcatacgactcttgacatggcaaaggcttacctgcgagcccgttcaagtggaaaggcaatgaaaatgctgcgtttaacagagcaattggtggatcagaagtcgttaaaatcagcttacgaccatcttatgaagctgtatggtgaagctggaaacagagaagaggttttacgtctatggaaactttacaagagtaagataggagaacgtgataacaatggttaccgaacagtgattcattcgcttttgaaagtagatgatatcgttggagcagaagagatctacaaagtgtgggaatctttgccacttgagtttgatcatcgaatcccgacaatgttggcctctggttatcgagacagaggaatgacagagaaggctgagaaactcatgaacagtaaaaccattaaggacagaagaatgaataaacccgtcactccgcttctggagcaatggggagatcaaat

SEQ ID NO: 165270 - DNA, 436 bp, Arabidopsis thaliana landsberg
tactccgtccttcaccatataaatacatctcatatacctactttcttcttatctttgttctcactgtttctttctgttctatctaataacattgaaacatcgtcgaattctcaccttattcctcttccaaaatgaatattgtaatcgaaaacaacccttcgagcagaaggttatctgaccttggagtcatgtcatggcctaagtaagtatcaaacatgcacatgctctgctcctattactactaactacatagattttcactttttccattcctcaatttattggtaataacatgatgaatctctctgacaaaacagatggtcttgtcagccggggaaatatgcattggtatttgaagaaagagagacatgctatttggtgaaaggaaaggaaaaggtgtatccaaaagggtcatctgagtttgtagagtttggtg

SEQ ID NO: 165271 - DNA, 968 bp, Arabidopsis thaliana landsberg
  unsure (1)..(968): unsure at all n locations
atggcaacttctgcaatatctaagctcttagtgtctgatttcgcctcctccgttcacatcccttcaaactatgtccgaccaatctccgaccgtccgaacttgtccgaggtcgagagttctggcgattccatccctctgatcgatctccgggacctccatggacctaatcgagccgaaattgtccaacaacttgctagtgcgtgttccacttatggtttctttcaggtaactccatgttagtatttctctgtttcaaattcactctgttttccttgcaacacactacgatctctgttttccttgtgatacacgtttgctctgtttcaaattttcttgtttattatgttctagatcaagaatcatggagtaccagatacaaccgtcaataaaatgcaaaccgttgcgagagagttcttccatcaacccgagagcgaaagagtcaaacactactccgcagatccaacaaagacaacgagactctccannnnnnnnnnnnnnnnnnnnnacaaagtcttgaactggagagacttccttagactccattgctttcccatagaagatttcatcgaagaatggccatctagtcccatctctttcagagaagtcacagctgaatatgccacgagcgtaagagctttggttttgagacttcttgaggccatctcagagagtttaggccttgaaagcgaccatataagcaatatattaggcaaacacgctcaacacatggcgtttaactactatccgccgtgtccagaacccgagctaacttacggacttcccggacataaagacccaaccgttatcactgtccttcttcaagaccaagtctctggtttgcaagtctttaaggatgataaatgggtcgctgttagtccaattcccaacactttcatcgtcaatatcggcgaccaaatgcaggtttggtaatcaaaacaaatcagattccgttgtttaacttttactag

SEQ ID NO: 165272 - DNA, 409 bp, Arabidopsis thaliana landsberg
  unsure (1)..(409): unsure at all n locations
gcgtaaccatctttttggtttcctattttggttttgggtttttattatagttcaaagaattttatatgtttgtctttttattcagggaaccagaattgacgctagagtaccttggggggattatttgaacaattacaagcctagcctatttgaaggaaagtgatattgcattgctgacttccaattgaagagagcaactttaatacctaagtactcatcatttaattatgaaaacgagtttctgtggcacacaaaaatgtggcttgtnnnnnnnnnnnnnnnnnnnnnnnnnnnnnnnnnnnnnnntgctaatgaagtcgaatctgaatctgaggattatgtaactggtaattgtatatagtttatgctttcttgcaattgtatttccttagtactaagatttataagt

SEQ ID NO: 165273 - DNA, 875 bp, Arabidopsis thaliana landsberg
atgtctcttctccgacgattcgttaaagaagcgaacaattccagatttctgcttcaatcaatctcgggacgttcattctccaccgtaaatcccaatccaactgcttcacctggtcgtcgtacttgcgtcgaattcgataacctcatcttcaaagccggaagctccggcgatttggaagccgtacgtcgtctcctcaacagccgcgtcgtaaacgcgtgtttcaacacgacagctactttcaaattcctaacaaacacagactcttactcctcctccttagaagatctccgccgtattttgcctcagaccgacgccggctacactcggaaacactcctacgaaactctcatcgctcgtctctgcaaactcggccggatcgacgacgctctggtcttgatcaacgatatggcgatcggagaattcggactctcaacctgcgtatttcatccgatcttaaacacgctcacgaagaagaacagaatcgaagaagcttggcgcgtggtggaattgatgagatctcacgcgattccggtggacgtgacttcatacaattattttttaacttcgcattgttacgacggtgacgtggcggagcgagcagggtgttgaggaagatggaggaagaggaggaaggagttatgtcgccagacacgcgtacttacgacgcgcttgtgttaggcgcgtgtaagtcagggagagttgaagcggcgatggcgattctgaggaggatggaggaagaagggttatcggtattgtacgccacgcatgcgcacgttataggagaaatggtggagagtggctattatgcgctaagtgtggagtttgtgatggcgtacgcggggaaagataagagattagatgaagagaatttggga

SEQ ID NO: 165274 - DNA, 1010 bp, Arabidopsis thaliana landsberg
atcttacggttgcatctccactgcgaccacatcgtctatacattagtttggtggaccacaagtgtgattcaagggaggtctgccacagcccccgcgagtctgtactgctatcattctcatcgccttctagtttcgaccaagatttgacgaccatgcaagggatgggaggactacatatggtgactcttcgtggcttgattttatacattgtttgcggaaaagcgtgtctctataatcccaccaccagacagagcgtaaccttacccgccatcaaattcaacatttttgtccaaggaaacgaacatagtctcctctacttcttggggcacgatcctgttcttgatcaatacaaagtagtttgcacttttgtgtcatcatcctcacaagatttggaaacgataatctcggagcattgggtcttcgtactggaagttggaggttcttggaaaagaattgagtttgatcaacctcatactcctacgagatctggactgtgcatcggtggagttatatattatcttgctttcactagtatgtttcaggatatcgttgtcacctttgacgttaggtctgaagaatttaacattatccaagcgcctcttgtgttgtctgcatatgttgactctctggattttatagagtacggtgggaaaccagctattttttatcatactagtcttaaagaaaacggtttggtagacttatgggtcttggaaaatgctggaaactggtcgaggaaagttttgagtttgcagccttgtcagctgcatttagttgataacgacattccattgacgttagtagacacaactcaaaacggcgaggttgtcttggtaccaagtgacttgtgttcccctttttacattctctattatgatatacagaagaatcatctgaggaaggttgaaatccaaggaatgccggaccataagaaggatgggatcaaaggaacaccggactttggtttcaaacttatggataagagtgagagcttcatctacttggaaact

SEQ ID NO: 165275 - DNA, 422 bp, Arabidopsis thaliana landsberg
gaaagcaaaagagttctccatgtacaaagtatatcttgctgggcacctagctgcattggaccttacagtcaggtgaatgaaatctcatcattgatttctaaataatcttcaaattgactagcaaagtcagatacttacaatatcatctacttcaggccactttgcaccagagtgttcttcacatggctggacaattaggacttgaccctcccacgatgaatcttcaaaccgaaggcgcaattgctgagctaaatcaagcattgacgaacagtgaagcaatagcagagtcttttagctgctcaatctcctcatcagctatactctttgtggttttctgttcagcacgcacaaaacaaacagagaggaaccaacttcatgaaaagtttgttactttcttgggtgtggcaaagtcaaacggaggc

SEQ ID NO: 165276 - DNA, 223 bp, Arabidopsis thaliana landsberg
atgcccaaacggccggatgaaaaaggcgctgaaagcgccgaactgcaggccgttggccagtttgaagaggccatgaaagagctggaagcgctcgtgcagaaaatggagcgcggcgacctccccctgcaggaatccctgcaggttttcgaacgaggcatcgcgctggcgcagcagtgtcgccagtcgctcgaaaagccggacctcaaggtccagaacctgctcg

SEQ ID NO: 165277 - DNA, 502 bp, Arabidopsis thaliana landsberg
  unsure (1)..(502): unsure at all n locations
aacgacatgcttacacccagccaggccctgcagcgcctgatcgaaggcanccaggattttctcaacgaccgcccgttcaccgcgcccatcgaccgccacagccggttgcagctggcggccggtcaagcgcctttcgccgcctatgtcagctgctcggactcacgcgtgccgccggagctgttgttcgggcgcggcctgggcgagctgttcatcgtgcgcaacgcgggcaacacgcttggcacggccaccatgggcagcctggaattcgccgtcagcgtgcttaaggtcccgctcatcgtcgtgatgggccacgaggcttgcggcgcggtcagggcggcgaccgacatggtgcgcgagaaggcgcgtttctccagcacgatcagccgcatgctggagcccatcatcccggcagtcctgtgcgcgcacgggcacgacaaagcccccgcgacactggaggaaatcacccgtgagaacgtgcggcgctcggtacgggagctgcgcc

SEQ ID NO: 165278 - DNA, 392 bp, Arabidopsis thaliana landsberg
gcttccttcccctgagtctgatgtttggcgtgctctatttctggccattcgtccccagatgaaacgccataaagaacacaaggccatgatctgagccattcaatagggtgattaagtcatcaccaccggtggtttgttgggcagaatttccaagctgggcgatgctcacatgtccctggtggtagccacgatgggtgacaagcccgtttaagtgcttgttcagcgcgcatcagttcaaaccgtattgccccgcggatccatcacagactcacgttaattagccgtcatgaatcgataccccctgtgtaagcccatccatattgccgtggtgatgggcctgggcgtgttacacaccattgccgaacttattcgctcaggcgccttccgtacag

SEQ ID NO: 165279 - DNA, 2909 bp, Arabidopsis thaliana landsberg
  unsure (1)..(2909): unsure at all n locations
gtaccttgcaacccgctttccagacgcatctctgattcgcctgttatagcacggctgttatctgttgcatgcatctgcactagttctgacactaatgacaagcaccacagagagatgaaagctctcaatgacaaactagacaaaatcatccaaacgcagtatggacatgtaaacttcatctctgaagatgaaccattccaagtacaagagggggagaacgatctgtgtgctgacagctatgttcataatcaaggtggctacaacaaggggtacaacaattacagacccaacccaaatctgtcatacagaagcaccaatatcgccaaccctcaggatcaaatctaccctcagcagcagcagaaccaacccaaaccgtttgttccttacaaccaaagccaagggtttgttccaaagcagcagtttcaaggaggatatcaacaacatcagccaccacctggtttcacaccacataaacaacaagcacntgcgcctcagaattcagacataatgattgtgctccagcagctcattcaaggacaagccacaggagcaattgaaatcactaagaagctgtctgaagtaaacaacaaagtcgaccgacaaggcgtcgaacttaacagcaagttcgaatcaatgagcactaggatgagatatgtggaaggcatcctcgcttcaccatctgttaacaacaacccatgccagcttccaaggaaagcaatccagaatccaaaggagtatgccactgcccatgccatcactatcacacatgatcgagagctgccaactcgatatgtccctacatcaaacactgaggacagtgtaattctagagggggaggatttttatcaagatgatgtgttggctgacaacccaatcgaagagcccatactcaccagtcaacccactcgaccacaagctcccccagctactccctttgttgaaaaaccggaagctgcaaagaccaaagacatagacttcgtgccaccgccttacaaacctctgcttccattcccttgtcgtttcaagaaagttctggttgcaaaatacagagccctcctggaaaagcacataaaggatcttgatgtcactatgcccttggtagattatttcgcgctgatacctgactctcacaagtacgtgaaagacctgatcacagaaaggatcaaagaagtccacggaatggtgatattaagtcatgaatgcagtgcaattatccaacagaaggtcatacctaggaaattgggagatccaggctcattcactctgccatgctcactaggccctctatcattcacaagatgtttatgcgatctaggtgcttcggtcagtctgatgcctctctcagtagccaagaaacttggttttgataaatataaaacttgcaacatttcgctaattctagcggacagatccatcaggatacctcatggcctgttggaagacttacttgtcaagataggttctatagaagtacctaccgactttgtggtgctggatatggacgaagagccgaaagacccattgattttgggaagaccatttttagctacagcaggagccatcatcaatgtcaagaaaggaaagattgacctcaaccttgggaaagatctttggatgacttttgacatcaccaacatgatgaaaaagcccacactagagggtaaagttttctggatagaagagacggaattgctagctgacgaggttttagaagaactagcagaggaggaccacttacagagggccctgaccaaagacagtagagaaaaagacttacatgtggaaactttgggataccagaagctgatggatatgagcaaggaagtcgatgactcagaagactttgaggagttgagacaactcgatcgcaccaatgacccactcgatcacgtcactcgatcgcaaggcaagctacatcacttgatcgcttcactcgatcatgatttcatctccgacgctgaatcaccatctgacgattggtctgaggtcaagacacccaaggttgacttgaaccgctgccgaaagggctaaggtatgttttttttggaatcaattccacctatcctgtgatagtgaatgatgaactagatactgaacaagtaaatttgcttgtaattgaaatgaaaaagtataggaaagccataggttattcactagatgacatcaaggggatttaacccactttgtgcactcatagaatccatctcgaaaatgaatcctattctagcattgaacttcagaggagattaaatccaaacttgaaagaagtagtaaaaaaggagatacttaaactattagatgtgggtgtaatctatccaatatctgatagcacttgggtatctccagttcattgtgttcctaaaaagggaggtatgacagttattaaaaattcaaaagatgaactgatacccattaggaccataacaggacataggatgtgtattgactataggaagcttaatgcagccactaggaaagatcatttccccttacctttcattgaccaaatgctagaaagattagccaatcacccctattactgttttctagatggctatagcggattttttcaaatccctatccacccaaatgaccaagaaaaaactacattcacgtatccctatgggacttttgcttacaaacgaatgccttttgntgcttgtaatgcacccgccacttttcagcgatacatgacttctattttctccgatttgataaaggagatggtagaggtattcatgaatgatttttctgtgtatggctcttctttctcctcctgtttgcttaatctgtgcagggtactcaagagatgcgaagagacaaacctggtgctgaattgggaaaaatgtcaattcatggtcagagaaggaatcgtcttggggcacaaaatatcaagaaatgggatagaa

SEQ ID NO: 165280 - DNA, 1724 bp, Arabidopsis thaliana landsberg
ttctctcaatgaaaggcatttgtaagttaatggacatgattattagccttgggcattttagcatgaacaagatactctgttttccaagttttggattacattgtttactctaatgtgcaggtttgggcaacctatcaaggttaactgggcttatgcgagtggccagagggaggatacatcaagttggttcacaatcttatgcttgatttcttgctaaaacagtattttgggtgttctattgatacaataacgcacttctgtgatcttcatgtgcaggtcacttcaatatatttgttggggatttgagtccggaggttactgatgcaatgctgtttacttgcttctctgtctacccgacttgctcgtaagttttttataccatcctcagcattcttgtattggaaatggaagtttaagatttgcagaaactcttccgacaattgctattgtatgtagggatgcaagagttatgtgggatcagaaaactgggcgttcaagaggatttggatttgtttccttccgtaaccaacaggtacttgactgtctaactctcagtccttgtgtatagattggcttttactttaaacactgatcgattgctgcaaatcttatttccttatgcaggatgcccagactgcaatagatgagataactggtgagtgttgcaatttgttttcccccttgatagttgatgttaatattttgttattttagctttgtgtttttgagcttattgtaattggtgggagattctcttctgcttttcagggaaatggcttggttccaggcagatacgttgcaactgggcgacaaagggagccacttctggtgaggacaaacagagctctgattccaaaagcgtcgtggaacttaccagtggtgtctcgggtatgtttaactattacctatcatgaaatagaaaatcaaatggaaatagagaaaagcctcaaataaacttaattcttaccctttgatgtttatacattggcttatttgttcctgcagaggatggtaaagatactactaatggtgaagctcctgagaacaatgctcagtacacaactgtttacgtcggtaatcttgctccagaggtaaaatagaaaaactgttataggtattctgtgacttaactcaaccatcatccataccttttttgaatcaaagatattttcgttatccaggtgtcccaggttgatcttcaccgccacttccattcccttggtgctggggtcatagaggaagtccgtgttcaaagagacaaaggtttcggatttgtgagatactctactcatgtagaggcagccctcgctattcagatgggaaacacacattcctaccttagtggcaggcaaatgaaggtaaaactaactaacttaaactgttcttttgtgggactcaccattctttttggtttgggaatgctaaaattgttgtgttcgttgttcctacagtgttcttggggaagcaagccaactccagcaggaacagcttcaaacccgcttcctccaccagctcctgcaccaatcccgggattctcagcgagtgatctcttggcttacgagaggcaactagcgatgagcaagatggcaggaatgaatccgatgatgcatcacccgcagggacaacatgcttttaaacaagctgcaatgggagccactggttcaaaccaggcaatatatgacggtggttaccagaacgcgcagcagctcatgtactaccagtaa

SEQ ID NO: 165281 - DNA, 1073 bp, Arabidopsis thaliana landsberg
ggtattcagaagttgcggttgttgtacgggaagcagaattctgctcagctgatccaatgtacaagataggtacgtattccactcgttcctaatgcagcagcagttatggtgaagtctgcatcaaacaaagaaacacctgtctggaggcttacaccatctgtgacttcacttggcgaagctgttggctgcaaaattccatggccattcaataaaatcattctggacaatatggactcaccaactggaattaagacagctggttcatcggtaatagtccttttctttgaactagactaatttttgtttgaagcttatgactggatggcctataataatttttgtttggttatgtatataggctaccaatgcattagatgataagatcctgatttatgattggaattctgaggatgaaataatagctgagggtagttggtattcaacggaccaaaaagatctagtcaacaatgttcctttaggtccaaatgctgcaattgtgactgttagtaaagtagttaacaaagaggcttttctatggagacctagtgctgatatgagtttgatgggtgatgcactacatgagaacattgcatggcctatacataagatacaattcattcaagcaccatggcgtcaggaatctgtttcaaaacacgcatcacctaaggtaaatttcaaaaccatttcccttttacttgtgatgatgaattgttgcatttttaggaggctttgttgtagtgaatgaaactgaaatgattgtttggcctctttattgtagagcactagtgtaagtgtaagtaacagcactgacaccaacaaaggtggaaagaagaaatgcatcatcttagattgcaaaggaacatgagaaaaagttgtagaaggcagagtttgttttacaaacccaacaaaactcgtccattttgtgccattgggtcgcaatgctaccaaggtttggatagacgtttctaaggctggagatgcaccagaccgccagaccaatttaaaaagtgcaaatcattgctgatgcattaggtgttaaaaagacttggccaaaagacaaacttgtttttatt

SEQ ID NO: 165282 - DNA, 1570 bp, Arabidopsis thaliana landsberg
tcaattataacaggcaatagacgtggggaactcgcttatggattctgggaaactcaaggaagctttgccatactatgaaaaggtcatggagaaaatagttttcaaggtaatttctgcaaatctggtttattattcatcttatactcatgtctacgtttatgcattagtctactcataccttttctacatatgccttactcgttttgacaacatgaaaacttgtttattatctacggatctacccatcagtacgtatgtggagcaaaaattcaacaagcttatataacagccaaccacataatcagtaaaagtaacttaaggacctgattattttgcattaattagtttcttgctttgttgggtgtcactttatcgaaatcttaatcgattgatccacctagatcacctaaagttcttatgttcgctgtagtagatgtgacctaactagttccgagtttagttgtgcagagtgagcttcatggactagcggctttgcagtggtctatttgtcaggattcacttcgaaagtaagtttttctctcctaatttcgcttgatgcaactacaggatgacaagtatttcttcatgagtatatatttgtatttgtaaaccgtagtcccaaaactctatcaagctccaaaagtccccaaagaaaaacacaaaatactagtttatacctaccaaggtgatgcctcattcgtgaatgttctaaaatatcctcaaaagtagtcttgttgagtattggccttatgggatcttgtgcgttaaaatcgtattttgggagtgattgacaggacagacaaagcaaggcgcatgtatgagaagcttatttcccatccaaacccgggagtgagcaagaaagcgaggcagttcatgttcagttttcaggtaagtcaaacacccacaaaagtattatacctacaaagcacaacaagcagatgagttgagtttgctctatatttgactatgatcggacaagagccaattcaactctttttgtttgcttattgtgtgtctaatgataaaaagagttggcttaagaaattgttttccctgaaaaatgtgagggtttttctttatacacttataggcaatggagatgctgaaggttaaggggtcgagctttgctgaaggaaacactggttatcaggactactttgaagcctttgttgaagataaaacgaattacaaagcgcaggaggaaaagaaaggagaggaaatggggataaatgagacactcctatatgtgattcttcttgcttctccgattctaatggtcttcattgtagctgcacagagaggggtatacacactgaagacacaaattcttgtcaatttcttacatgtaagtgttgtatatattatgaattaattcattttattacagttaaggattaataacacaaagcttcttttattaattgaaagaacataacagaatcagagaatcgaacaccaaagagaataaataaacaaagctagttgatcctagtttcttctacctttggatgagtctgatacttcatctctatagatactaaaacataaaacaaacccaactaggaattga

SEQ ID NO: 165283 - DNA, 881 bp, Arabidopsis thaliana landsberg
tcgatccttctcaaatctaaccccatccacaatgaaggttttgaactcctacacggggacctctccatctgtgagtccctcaacgttgttcaatacgtcgacgaggcttggccatccgttccttcaatccttccttctgatgcctatgatcgcgcatctgctcggttctgggctcagtacatcgatgacaaggtaaactagtttagaggctcacttccgtggatctctgtttcatgctctgttttgctttgtcacagtttgatactttagtttttgaggttcaactaaaagcttggatcttgacactcaaatatagatctggctgattaagatccgatttacggatatgagtattctggttaatctggttttgcttgctaaagtttgaaactttttaaatggagctaaacaaaaaaaactctgttcttgatagatctgtgtagcttgagatccgatttatacactcaacgctgaagtctctagattagtcatctcaagggttttgtgttatgtctatgaaacagtgttttgcggcggtggatgcggtggtcggagcaaaagacgacgaagggaaaatggcggcggcgggaaagctgatggagtgtttggcgatactagaagacacgtttcagaagaccagcaaaggattagggttcttcggaggagagaccatcggctaccttgacattgcatgttcggctcttttaggtccgatctctgtgatcgaggcgttttccggcgtcaagtttctccggctagagacaacacctgggttgatcaaatgggccgagagttttagggcccatgaagctgttaagccttacatgcctagcgtcgaagaggtcgttgcattcgcaaagcaaaagttcaatgttcagtga

SEQ ID NO: 165284 - DNA, 2664 bp, Arabidopsis thaliana landsberg
atgccattagttagactcaacggcatcatatcgacgattgggtcaccaatggaagacgacgagttagagagttctgtacctgtagttgctccaccggcggaagtcatttcagagtcaggtggaggagatggaggagtagaggcagctgctgttgataacagaagagtttctggacgtcgtcggacaggaagtagagtcagagtcgtagaagatgatgagcctgtaattgatcccgagcttgaaattgatcccgagccggatttggaagatgattgcgccgtgtatggtgatgatgactttgatgttgttgatgatgctatagctggtgaaggcaacgaagataacgttgttgaagaagatgctaacctcaacattgcagatgattttcctgaggcttatggagcagatgaagaagctggttctgattccgacaccggagatgatatatgggaggatgacaagatcccagatcctttgtcatctgacgatgaagatgaaaacggagttggaagagagagagctcgtcgagatgcagagaatcctgaggtcttgctagcaatggacaaaactttcaacactcctgaggacttcaagcttgctttgttgatgtactccttgaagacaaggtatgatatttgtctgtataggtctgaagctttgattgttgctgcgaggtgtagttatgtaggtgctgatggtgttagatgtggctggagagtgtattgctcttatgagaagttgaagcataagatgataataagagcttatgcgaatgagcatcattgtgttaggtcaggctatacaaaaatgttgaagcgatcctccattgcacttttgtttgaggagaggctgagagtgaatccaaagctaaccaaaaatgagatggttgctgagattaagagggaatataaattggaagtgactccggatcagtgtgctaaggcgaagacgaaagtgttgaaagcaagatatgctactcatgatgaacacttctcaagaatatgggattatcaagctgaggttattaaggagaatccagggtcagagtttgagatagaaacagttgcagggacatttattggaagcaagcagaggttttatcggtgctacatttgttttaagtctcagaaggagtcttggattagaacttgtagacctgtgataggaatagatagagctttcttgaaatgggatataaaaggtcatcttctagctgcagttggaagagacggtgataataggatcgttcctttggcttgggcagttgtggaaatagaaaacgatgacaattgggattggttcttgagacagctagctgctagtttgggactttgtgaaatggaacatcttgctatcatttcagacaaacagtcggttagtgttatcaagaaactttatgcttttgattctgtcttgattgttttctgttgtgagcaagtgctttgattgttttcagttttgtgcgttttacgttttgtgctttgaatgtgctttgaatgtgctttgattgttttgattcgtgtttaagattgattgtattgtttttgactgttttatgcgattgttttgattcttttatgcgattgttttcgtagggcctagtcaaagctatccacacaatactccctgcagctgagcatcgacaatgttcgaagcatatcatggacaattggaagagagacagccatgacattgaactgcaacgtctcttttggaagattgcccgcagctacaccattgaagagtttaacaataatatggaagagcttaagaagtacaatcttcaagcacatacctctttgcagcttacaagtccgatgacatggtcaagagccttctttatgataggaacatgctgcaatgacaacctcaataatctgagtgagtcttttaataggactattagacaggctaggagaaagcctttgctggaattgctagaggacatccggaggcagtgcatggtgagaactgcaaagaggtatatcatcgctgatagattgaagacaagatttacaaggagagcccatcttgagattgagaaaatgatagctggtgctgcaagttgcgagagatatatggccagaattaatttgcatcaagtcgaagttaatggtgttagctactttgtggatatggaaaataaaacttgtggctgcaggaagtggcaaatggtgggaatcccttgtatccatggggcatcagtgataataggaagaagggaaaaggttgaggactatgtgagcgaatattacacaaagatcatgtggcgagaaacatacaaggatggtatcaggcctgtccaagggatgccattgtgacctagaaccaataggttaggtgttttgccaccaccatggagaagaggaaattctggtaggccaagtaattatgctaggagaaaaggtagaaatgagattgcttcagcttcaaataagaacaagatctcacgggttgggagaatcatgacatgctccaactgtctccaagaaggacacaacaaacaaaggtgcaaaaatgcaacagttctgaatccaccaaagagaacaagaggacgaccaaagaaaaatccggttagttactaatacacatacatacatgtttacttactaatacacaaataagataaatcatgtttattactaatccacatactatttaaat

SEQ ID NO: 165285 - DNA, 432 bp, Arabidopsis thaliana landsberg
tagtcgggggccacgccgagagtcggtggcaaagggcgcatggcccatgtgcccttaatcgaggatgttgggcgcgcgttcaccgcctcgggccaggactatctggcagtatgcccttaggtcgatgtgatgctcagccacatccacctcgacctcgaggacatcgccagggtcgaggccgccctgccagccatccgcgagaagctcggcgggcgcctggacgcgctggtgaacaacgccggcatctcgcccaagggcccggaaggccagcgcatgggcgtgctggagagcgactatggcacctggctgaaggtgttcaacgtcaacctgttctccaccgcgctgatggcccgcggactgttcgaggagttgaaggcggcccagggcagcatcatcaccgtcacctccatcgccggctcgcgggtgcaccct

SEQ ID NO: 165286 - DNA, 1336 bp, Arabidopsis thaliana landsberg
tcgcaaatttatctactctgagaaaggaaaaggcattgcttccccctgcctccccccaaagatcccaagagtgtctgttccagcttttgatgactctgaactccgacgtaaacattctctaaccattattggaagactcaccaaccctcttgcccaacgggtttggggaatgattccctttctcgcagatctgtggaaaacttccacacgtccgataggcgcggacctagggcaaggacgctttcagtttcaattctcctcggaacaagatctttttcagtgcgttggagaaccaaccctaccactatgcaaaatggatggtgattctccaaagatgggaaccgaccacatcctcctcatttccttctaagatccccttttggaatcgatgttcaaggcatccccatccacctttggtcggaagaaatgttcatcagcgttgcaaagggagttggatctttgaaaaggctgagattactaacacctatgccagaattcgagtgacggtgaatggactgaaaccactcatcaagaagatttttgttgactttgtggatggctcagaggctttagctgatctagtttacgataaacttgaacgtcattgcaagagatgcaataaattggatcacgacgaaaaggattgcccggattctcaaggtctgggagatagaaaagaacgtctcccctctcccccctcttctccttctaaggatcgtcaggatcaaccttctcggcatcttcaaaggaactacgatgatagaaaccagaagcgaccttatcaagaaagatatcaaagacaacgaagccctgagaggcctagaagatcggatcatggacgctactcaaattaaagagaatactctagatttgactctagaggtagatatgatctttccaagaccttgaatcctagagaaccagttcgggagacctctaggcatcaccagggcagtcgagctttggtggaagtctgagatagctctcaaggcctgagtgggtgtaaagaaagatcttcgagaggcttatcctccacttccaggattcagaatcctttggctactttgctacctcaaaaagcgttaaatatcgctatgggagagctcagagacgttatgatccaatacgtcaattgtgcagacccgacagagagtgctgcctggaaagagcgtctttgacaagctgccgatcatggacaatctgacgaaaccgctggtcaaataattaaggacaatctcagtctcccacctctggctttacaagatctatactctcaacgaactggctctcaagagccaattcctatatctcaaagattatgccctgttcatgcacc

SEQ ID NO: 165287 - DNA, 1977 bp, Arabidopsis thaliana landsberg
tgggttccttattccaaccatagggtttttatttgtagacaacctctttaccttaatttacccttgggttccctgattccaaaccttagggtttattatatttgtagtgaaaccctctttacctgaatgtacccatgggttccctgattccaaaccttagggtttattatatttgtagtgaaaccctctttaccaaaatttttttatcaatccttagcttacagtgatgctttcactaacgacatatgtttcactaactgcccttgctgcgtctttttctcgatttcagccatggagcacatagatttcaacatagctcttgatattgcatgcagagtaggggctgattcatttacggaccttgtagggatgctttcaacttcaaagttttttcgcagccttgcttacaatggcactgtcttgagacaagtttctctgaagtcgttcctcgataattctgccctcatcaacttaagctccacctttcgtcctttctttgaactttgcctggaagcacaaaacccgactgcttgctatctcaaagccctgagacttgcttgtagaaaagggcgtgctgaagacggtctagctctgttgttaaccatgccatcttcgtctctccatgcacagtttgctactgcattgttggaagtttgtcttggcaagtatcacgatgcaatgcatatctctgctgcatttctagaagcatcatcttcttttgaagcagctgatgcaattgccacgactgtcttccaccagatgattcaaattggtcctcggagaattcattcacactgtaacacttggcactttgaagtttacccttcttgtcctctaactggatgtcaaatgcataaccgctgcacagactgtttgctgtactggtactcggtcatgtttcttgttttatgttaatatcttaacaaaaatctcattttacgcttaagtccaacctatttcctgtgttttcctcctctgttgtattcgcttgtatgaacctatgtatttaaactatgttttgctacaagttccactcagtccatcagtttgttctcaatcttgacaactttacttaaaaattcatcttttctattgctcatcccactgtttgctttatcccctattacgcaacacatttaccacagagttaccaactcctactgtctttacaccaacttcaattacttccccatttaaccctgacctactaccttcacttcaacaactctatgtaacatccaacgcttatacttttaaccaccaccaacattttcatcattgtttgcctaatttaccagaaacaagctctctttcattgtaaacactgaaactttaaaccctcctatctctccaatgtcttcttacattccaatacctttgctcactgatatcgtcatgaaggttgggcaatctggttttcgtttacttggcccattccttgctgcaggatctactctctgcaacattgtcttctctaattccgtcttatctgaagtctgtttaagtgagttctttcagcttaggtctatggccaatacagattctccgtaccgttctttttttcttaggtgtgttttggctgagaaccacaccgccaagtatctagaatccctgcgcattgctgcccaagaaggcccttctgttcagtcactcgacatgctcagagaagctgcgttgcatagcatatatgctcggtttgcttttggaatattcctctgtctttgtggttcttctgaagttggaataagggttttagtaacctttctcgataggattcctaattttggagaagcaattgttatcgcagaacaggtatgcacacatatccgagttatgggaacactgggtcaacatgcttaccgcaactacaagggcatgactcttcctgtgtgtggtttagtccattactcggctttggacgtttgtccatcttgcttacctctacattattattttgaaatctctgacctttattaa

SEQ ID NO: 165288 - DNA, 292 bp, Arabidopsis thaliana landsberg
cataaggtccttaccatgtcaatcacatggactggtgtgagtatagcttgttccacaaccaacactatattattagttgtgattatacatataatattgttgccaggatgttgcctcccttgcagttgcaatcatgataaagggactgcggagtcgaatatttctgggctgtgacaacaagcccctttccaggtaactgctgaccttgttcatatcggtttctgtgttttgtagtcagttttgttgtgcagagttactctttcggtttgcctaatttaaaaggaggtagact

SEQ ID NO: 165289 - DNA, 2333 bp, Arabidopsis thaliana landsberg
gcatgcatctctttttgttagtcagtgtggaccaaaatcgttgttataaattagtgtttttgtttgagtaggtattggtgttcctttggcccgaatgacaatagaaaaggcggaactgtacggccaagtaggagtacgtatgttccgaaaaagaacaatgcaggccgacccaattctaagagagggtgcaggtgtcacttcattgtgaaacgcttaattgcagaaccgactgtagcattagtaatttataacaatgacaagcatgtagatgaaaaagggtttccgtgccatggtccacaagacaaaaaggctgctggaacaagagccatgtttgctccatatatatcagaagaccttaggctacgtgtatcatctttgctctatgtcggtgtctctgtggagaccataatgcaaaggcataatgaatcagtggaaaaacaaggtggtccaagtaaccgagatgatctgttaactcatagatatgtacgaagacttgagaggagtattcgacgttcaacatatgagctcgatgaggatgatgatgtcagcatcagcatgtgggttgaaagtcaccaaagtcatgtgtttttcttcgaggggttctctgatacagaccctttttccttgggtatccaaactgagtggcagttgcaacaaatgattagatttggaaactgtagacttttggcttcagactcaaggtttgggacaaatacactaaaggtcagtttgcatcaggtgctaaatttggtatttatattatcaggatgattctcaggtctatgtgttggtttattttcagtatcctatccatagtcctgttgtattcgactctgagaataaggctattccagttgcttggataattgcaccgcggttttctagtggagatgcatacagatggatgagagctctttgtaaccgagtccatgccaaggatccctcctggaaggtggctgggttcatagttgatgatccttttgctgacataatagcgatcaggttggttgcttcaaaggccactttttcattataaaacatatttcgcatgttctttccttcacgaaatttggcagagtttaccacagcaaagcgtttagctttgaatgtagttaacttaagtacataccaaatatcaacgtattgaatgaagctgactttggtaatttcgaattttcgatagtggagctctatgtagcactatttggacaaattgactaggatgttacaaccataggtcttgaatccttgatggaactggcaattggctatgtgaagaaggcttgacatagttagattatggggttcatcaacagatactgaaccatatctttctcttttgttagaaagaaatttgtcatacacatatttcagacaaggaaccaaattgccaaccctaaatattatatttattgaatgctattgcttgcgatattgtcagggatgtatttcagtgtacagtcttgttatcattttggcgtcttcgccatgcatggcataagaacataatcaagagatgtcgagaaacaaagacacgcgttgagatttcaagacatcttgggcaggctgtagataaaatctctagaaggcaaggaacagccacattgtttgacagttttgtggaggattttgttggtagtccagaatttgtggagtacttcagatctgtttggtctcccagaataggttattttcctattctctcttttcttttctgtttacactctacaattaattgatagctcagaaggttcgtggacctaggtatcaagttcttacttgtaattctacattgcactctacctgaaattattgttgatatttgacactagtcctctcgagaatgactttttccctccaatttattttaggagcctggactagtgcgttacaatctcttcccttggcaagccaagagacctgtgcagcgatggagctttaccactatcagctgaagtgcaggcttttgaatgagagggactctgaagcttatcaacgtgctgattggttggttgataagttagggacaaaagtacattcttacttctggcttgacgaatattctggaaaggataattttgccaggtattggaaagaggaatgggtgagcgggttgacttccttccgcaaagcattgagtataccagattctgatgttgttatctctggtatgtctgcaaaaataacagatgagtgtgacggcaacgaaattcatgttgtatggaatccagggtcacagtttggggtttgcagttgcagctgggcagaaaagggatacatatgtaagcacatgatcaagcttacacaactctgtctaggaaaccgagctgcca

SEQ ID NO: 165290 - DNA, 426 bp, Arabidopsis thaliana landsberg
acaactcaatcagcacaattaatttgataaaactaattaaatatgttggcattactataaatatgcacatgcaaaattgagtatagttatttttttcatgtgccaaggcggcgacttcacccggggcaacgacactggcggcgagtccatctacggcgccaagttcgccgacgagaacttgaagctgcgctacacggggctcgacgtgctctccatggccaacgcggggccgacaccaacgactcccagtttttcatctgcaccgcgcagacgccctagcttgacggcaagcacgtcgtcttcggcaaggtcgtcgatggctacgccatcgtggacaagatggtggttgtcggttctcagtcaggtgccacggtcgagatcgtacgcatcgaggactgcgaccagcttgccgacgactgagggact

SEQ ID NO: 165291 - DNA, 2565 bp, Arabidopsis thaliana landsberg
gctaatcccgtccaggtcctgccaattacgacgacagacaattatagtttggtggaggctttggtgtcccgtatcctctctatgtgtgccttatagctttgtgaaattgatgatctctttaccgctagaaatgtgtattctttaacctttatatgttagacatgtctgagattgatgaaaagcagatgttgttgtatgcacagatggctaatcttgtgaacttgattcttcaatttcctagtgttgacctaagagagatcgccgagaacttttcaaaggttggtgatgtggtcccgggattttttgtattcctctttattggaatgttgtttagggataattacttaagccactttcatttctactgaacacagttctcatgcaatgctcatagcatttgtgatagcgaattgagacctcaagggattggattgtttccattggtttccatcattaatcacaggtaaatgcttttactttgtgttctttaatcactttgtttcctgcctaaatcttttgctctgtagctgctctcccaatgcggttttagtgtttgaggagcagatggctgttgttcgggcgatagatagcatatcaaaggattcagaggtagtttatgctttgtttcgtctctagtctttcgtatttgctagtagcacactgacatatagctgttagattcttttgtctttggtcagataactatcagttatattgaaaccgctggaagcactctgactcggcagaagtctctgaaagaacaatacctcttccactgtcagtgtgcccgttgcagtaacattgtaagtagtcgctatttctcccacttatcaacgaatggagtttaatattctcggttttttacaacctgtatcaacatttttcttcatacctaagggaaaacctcatgatattgaagaaagtgcaatattggaaggctatcggtgtgccaatgagaaatgcactggtttcttactccgtgatcctggtatgttaagtaaaacttacgtagtttgtgtccaaaaacatttatcgatccctccaatcctcatttgtttacttttgcagaagaaaaaggctttgtttgccagaaatgcttgcttcttaggagcaaggaagaggttagaaatttagcaaatgatctgtaaacaggtttcagagaaggctcctacatctccttccgcaaaaggtatctggtgcctttgtttcccccatacctgcaattataagtctgaacaagactaactgatctttgtgacattgagctgtcttgcaagttgtctgagagaatctttgatcattgtcagataaacaagccgctattgaactatataagacaattgagaaactacaagttaagctttaccattctttctccatccctttaatgagaacccgtgaaaaacttctcaaggtacgtatcttttggacttttggaagttgtacagagttttgaagacgagacagacatggtttctcaaagcttgccgttacacattcttttgcagatgctaatggacgtagaaatctggagagaagctttgaattactgcagactaatagtccctgtttaccaaagtatgtctacttcatcttgattattactttgttcgctccttgacgcatgttcgatcaatatttttcttttctttaggataccttctagtatatagatctaggtgtgggatttatattttgaacataagtacgaagctcttaagagttttgtatagatacatttacttataattacgtaggaactgattgcatacagtatcagagctaactgtactactactaatggctgctaattataccttaaacagaaacatctacataataattgtaaaatcattcaaattcttttggtggttattacttgttcttactttgtttataaaattgcaggagtatatccggcaacccatcctttgattggactgcagttatattcccagggaaaactcgaatggtatcaaagcttctttcccttctctagtttatattttgataatatatatgagctgcggaaactaaaaatgattttgaagacggattaatgctccggtcaaaatccttagatccaatttataagtgttttctctcaactgtcaacactgccattcctctacatgttctcagtgttggagactcttattctactgtgacgttttcagtcagggaacacgtaaagattggctagtggtaggcggaacttggctaaaagccttcaaattggatatccttaagttagaatctctgcggaaagaaacattcgtgtgcctgtaaaatattatcattatcatattttaactttctacgttaatctgagtctgagtgcaataacatggcgtcggctactatcatattctgcggataaaaaaggtataattgtgatgttgcaggttgctgggggaaaccaaagaggcggtgagttcattgattaaggcatttgacattctgcggatcagccatggaacaagcacacctttcatgaaagagctctcatcaaagttggaggaagctcgtgcacaagctttttataagcagcttgcattgcattga

SEQ ID NO: 165292 - DNA, 512 bp, Arabidopsis thaliana landsberg
gttgtgtgtgtcttaccagtgtataattttctctctcacaacagaacaagacaagatttctgactttgagttgaaattgcttgaaattgacagcgaacacttgggtattcctgatacagaatacaaagctgtggtaaagatgcctgccgccgagttccaaagaatttgcagagacttgaccattcttggtgatacaggtacgtgtgctgttgtccctcggcgttatttgtgaactaacatgtgttctgcagttgttattagtgcaacaaaggaaggtgtgaaatttagcgtcaatggtgaccttggaactggcaacattacatgcagacctacaactggcgttgacaccaagcctgaagaaaccacaaccatcgaattggaagaagctgtccaactgacatttgcgctcagatatctcaatttcttcaccaaagctacagctttatcacccacagttactctgtcaatgtcgaaagatgtacctctcgtcgtagagtatcgaatggaagacg

SEQ ID NO: 165293 - DNA, 1707 bp, Arabidopsis thaliana landsberg
ctgctggcgaggaagacagtgaagatgaagacggaaatcagcatgacttgaataaagaagttggtgttggagacaataggatagtgcctcttgcttgggctgtggttgagatagagaatgacgacaattgggattggtttatgaagttgctatcaagtactttagggcttcaagatggaaaagatatggctgtcatatctgacaaacaattggttagtatgtgttatttttgcagataaattggaatgctatatcttctaacttctgtgttatttttgtagggacttgtgaaggttatacacagcattcttctagaagctgagcatcgtcaatgtgcaaaacatatcatggataattggaagagagatagtcataacatggaacttcaacgacagttttggaggattgcacgcagctacacagcaggccaatatgcaaaaaatatggaagcactgcagaagtataatcccggtgcctatacttctctattaagcaccaatccgatgacatggtctagagctttctttagagtaggtacatgttgcagtgataatttgaacaacctcagtgagtcttttaatagaaccatacggcaagctaggaggaaacccttattggaaatgcttgaagagattaggcagcagtgtatggttaggaatgggaagagacatataattgctggtagattaaggaccagattcacttagagagctcatatgcagatagagaagatgatagaagggtcacagttttgcgtaagaagaatggctaggcacaataaacatgaggtagagttgcatgatgaaaaatattctgttgatatgaatgacaatacatgtggttgtaggaaatggcaaatgacaggtataccatgtgttcatgcggcatctgtcattataggaaagaaacaaaaagtagaagactatgttgttgactggtacacgacacaacggtggcagcaaacatacaaagatggtattgcacctgtacaagggaagattctatggcctagagtgaataggtttggagttttaccaccaccatggagaagaggaaacccagggagaccaaacaactatgctaggagagaaggcgcttttgaatcttcaactgactctagctgaagtaccaccgagctatcacgtttgcaccgagtgatgacttgatcaaatttgaaaggagacatgacacattaagcagggatgtcagaacgagacagtcgcacctccatctaaaagaccaaggggtcgcccaagaaaagacaaggtatcctctttaacattttaacatcttgatgttcgcaaaaattctgcgaatagttttgatataatggttgattgaaaacaggatccgaggatggtcttttttggacaaggtcaaacatggcaagaaccgcaagcacaaggagcaccatcttctcacggagcaccatctcaagtttttcacggagcacctctttcacaaccatctcaggaagcaccatctcaaggagcaccatctcaaggagcacaatctctttcccaaccatctcaagaagcaccatctcaagcagcaccaactgagacaagaggaacacggagtgtaagaagaggagagtcacagagaggagggagaggagggtctcagagaggagggagaggagggtcacaaagaggagggagaggattacaagggttggaagcatggtttaattgttcaaactaggat

SEQ ID NO: 165294 - DNA, 1445 bp, Arabidopsis thaliana landsberg; identical to SEQ ID NO: 12202

SEQ ID NO: 165295 - DNA, 427 bp, Arabidopsis thaliana landsberg; identical to SEQ ID NO: 78394

SEQ ID NO: 165296 - DNA, 1770 bp, Arabidopsis thaliana landsberg
  unsure (1)..(1770): unsure at all n locations
atgggtttatctaaaggtaacttgctttatccagcccattgttcatcaatgttcttcaccggaatcctgtttcttcttgctcaatctgcattaaaggcttagaaacttcttcaccaaggctgaattcgagtttccctgtgcatttattggtggtgtatgcatatttaaaccctatcaacctttttaaacctttcaaacctttgaaatctgtctcgacactgctctccccactgtcctgctacttgtaaccctgaaagttcatctgacttaaccatgtcaaaccgcatcccttactatcaaanaggcaaaggcatcgagagagggtattcgcccccaccccgtaagcgaatccgagctccagacatagatttctcagatctcattgaagagaatgctctaacccttattggccgtcttaccaatccttctgggcaaatactctgggccctcttcttattccggtccaacagatggactcttaggggaaaagctactggttcagatctagggcagggagtctttcagctcaaatttgatttcatggaggatcttcaacaagtccttgacaatagaccctaccattttgaccaatggatggttatcctacaaaagtgggaaccagtcatctcaccttctttcccgtgcctgatccctttctggattgaactccaaggcctccccaaacacttctggaaacctgagatgctcaaaaccattggagaagagcttgggaaagtcttagaccaagaaatcacctcctcttctgtcaaggttaagattctgctggatggcttacaacctattataaaagaaacaattgttgagttcccagacggaagagaggcagttgtctatcttgattacaagaatcttaaaaaccattgcagtcactgccaccgtctcactcatgagaaaaagttctgccccggagtagcaaggaaacctgatgatcaacaccacatctctacctcaaaatctgcctctgctcatgcctctaagtcaaactcacgaaactactacaccccccatgacaacttcacaactcctaggagtaattctcatatctctgaaagaagtgtcatccctcaacagtttgtcaaccctgcaaaacgaaagttgaaccatgatggggccaagtccaggtccccacctgcccgtagaacctccccacagaggaagtcttatgctcgagaggactatcatcttcagggtgctgttcagtctccccgctatgaaagcaggcagggttatcattcttctcaacaattgcagtggcgagagaagtctaactcttcaacagggaatcatgtttcaccatcagaacaatctagagctcggagaccacctctcgagagaaatgttacaactcctgatcctcctacccctccacctctgcagactcttgaccccagatgctcggggatggaagtttcttctcctcctctacccccaccttctaaagaccaggtgatgagtgagctgagggatgtcactatccagtatatctcttgccctgacccaattgaaagtgctgctaggaaaatcagggtgttccaaggagaaaccaggaacctgatggagaacactgctatggtggtctagccctgttctggaaacaaaatattgaagttgaaattctcacctcctgtcaacactttatcgatacaaaaatcaaagctaagggtcggttcttttactcaactttcctttatggcgaacctgacagaactaagagagttgaagtctggaaccagttacatgagttatctg

SEQ ID NO: 165297 - DNA, 596 bp, Arabidopsis thaliana landsberg
  unsure (1)..(596): unsure at all n locations
tgatcgtttacatgnatgcgttcggcgtccgcccgtcgttgctgaacttggggcgggccatcgccgagttgggttattacgtgctggtgccgnatgtgttttatcgctccgggccgtatgccgtgatggatcgaaagcaggtgtttgcctcacccgatggcttcaaggtcatcaaggacgagttcatggcccgggcggatgtggcgaacgtgatgtccgacacgcgcgcccttgctcgattttctggcgaaccagccgcaagtgaaggccggcccggtcggcacgacgggctattgcatgggtggacgtttttcactggcggcggccggcacctttccgcggcgcgttgcggcggccgcatcgttccacggcgggcgcctggccgcggacgatgcgcaaagcccccacctgctggccaacgcgatgaaggcgcgcgtattcgtggctggggccgcgaatgacaaggggtttccggacgccatgaaagccgacctcgagaaagcgctgaccgacgccggcgtggagcacacggttgaaacctggccggccggacacggctggacgttttacgacatgccggtctatacaaggcgtcg

SEQ ID NO: 165298 - DNA, 2690 bp, Arabidopsis thaliana landsberg
  unsure (1)..(2690): unsure at all n locations
atggtgcccaaaagtcgacaaacacaggctcatcagccttgagaactagagagtcccatgttgaatcgttgaccactggaactgcatggatcatatagcaaaaaaaaaccaagattaatgactcaccatgagtgtagaattatgaatgaagggataacaaatccaacaaacaagcatcttgagtttctatagatagatacttagagatcctaatacatatgtgcataaataacatgacaaagaggttcaaatccgaagaaacctttttctagttgtcttccaatttcactacttgaacatggaagtcatttcatagacactaagagagagccccattagagttaacccataagaattcccagaaacaaaacgcataatcgagaaatagcattgatttacaaagacgagagaacatacttcctgtagcagtgtcctgagcttcacagataacgcctcgtcgtaatcgggaaaccctagaattcttcgagagtgaagatagagaaacgcgagtcctcaatccgctcgattccggcaacacagagaacatctgtcgagtagagaaggaacccgtcggcgaggaagcgattctcatctctgaccggatagaaatcggcggacggatagtacacgtgtaagcagccattgttgtgtagcgagataagagatagatagaagcaatctacacgcgcgatagattcgatttcttcttgagtcccgaatgtaataatatccaagcgaagaagatatcaaaaacaaaacccacgaaaatgagagataggagaagattaagaggagtgactgattttttaggaatccttttttctttagagctactattgtttaattttatccgattaaataaattccctattattcaagctctaagactattgggccgcagtttcattaaagcccattaatatttctcgttttgggaaaaacaaaaaattatcgaaccaattaacttgaagtgtatcaatcaaggttaaagctcactgggccttagtttcattaaagcccaatagtattcacttaccccgtaaaattaaattattattcctcgagaagcccaaacagtaaaaacgatgcgttgtatcgctggagcatccgtagccgatttctctccgtcgctactgtttcaccgccgtaatctcgtagctgttggccagagattgcttatgacttcctcgattttgcgttctcatacgagggaattcgacgtttgcgatgaaggaatcatctcggtagaggagtggcggaaatggggtccggtgtctccatttccatccgcggtcaaacagattgtggatgatttgaaagttctggagtgcaaattggattctccgatagattttggtggtaatggtggcaagttacaggtaaatgccgatgactatcatgataatgaaacctcgttgcttgtttcctttcaatcgttttatgcttggattgtttagtgctttctattggataactatgaatctggttttgtaatttttgtgttcaaactagtaacctaagttagatatttgagctatggttacgtatgtggtgctatgtgccagtggtttctgacttgatgttttgagctcttaaatgttatagtgaggttataatacttctacttgtgtgacaactatcacagggaccgtttggtgcatacgaagataagaagcatagggctacatatgaagcattagatgacccggagaaaaagtttcgttttttttctgctcgacaggttgcttgtcggctgcttgggagcaggggttatttatgccagaaggtacttcatttactcttcttgaattgttgtattttgccatgaataaacaactcaatacctaaagatgaaacatttctgaatatgcagtgttggcttgctatggaggattgcatgtgttcatatgttaagccatgtggtttatggaaacggatacgtttttggctgtatatgcatcctagggttagtattgtacccactagttttagctattccaatcgccaattcctatgtattgatatgctgtttagctgttggcaggattttctacgccagaacaacacagggaagctgttgtggcagatatttggcgtccaatcagctacactctgcgtctttggaatagctgaagacgaagagatcatgtggaatgaattcaagcgtgcaggttgttgattcttctaagtcttagtgtagatgcatttgtttaatcttacatagatgtcactccatgattttgctaaaaatcttgtctttttgttctgatggatgctcaggaaaaagccaagtccgttgcctctatcccaaccacaactcggaagtaactttctcggttaaagacgcttttggtagttcggcttcagagaatcatgtatcatccacggtaaagattgcaatgttttgactatggactctctgttcttctatcgtcacttatttcaaacagaaaaatattagataaggttgtggaaggatatagagtgaaactctacactttctatatttcccagacagatgaggataaaactctgcatttcattttgcttgatggcacgtggaacaattctgctgcaatgctcaagcgtttaaaggnnnnnnnnnnnnnnnnnnnnnnngcctttcatcttttccccctttctataaagaacaaaacgaaaatatgcttaaactctaaactcatctgtag

SEQ ID NO: 165299 - DNA, 1845 bp, Arabidopsis thaliana landsberg
tcaggaacttgatgatgaggaacaacctatgcagccagagaggatgttttttagtccaagcgaatacgtaaagacgtgtaagatagggacgagatgcactgtgcagcagacagtgaagtatttggaggagtttaaagaatatttgccatggttcaaggcgcatccacagtttaggcatgtattccacatgcctgaggagaaaaaccacatgacccaaggcttgtggatgcttttgcttcgcacagcacagacagagatggatagggagtgctggtttgttgttaatggagtgcctattaggtactccattaaagagcatgcgttgttatgtggtttcgattgtcatgattacccggaggagttgcagccgagtatgaagatcgtggatgcagatttgaagtttgccaaaaagatctttaagaaggtctctgggattaagatcgttgatgttgagaaaaagttggatgaaatgaagaaatgtggagaaaagaagaagacagataggaagaagttggctatcttgctttttttgtgcaaggtgatcgcgaccaagtcaaaggctgatggaaacattgacaaattctttctgaagattgttgatgatgtgcgtgcatgtgagacattcccatggggtcgtttcacatttgatggatgtatggaaggtatcaagtcggtaatgaaatcgatgaaagggaaagcaaaattgcagacttgtttctccggatttattcttccattagaggtaacaatttagagtaatatccattataagatgcattagtagacttaaaaataatactaatgtgacttttactttgaatgtgtagattttgccttttgaggctattccacatttgggacaaaagtttagagaccatgtaaggttcgagaatgagtgtccgagaatgtgtaaggccaaattctctagtagtgtcatgaaagggttctcgttgcaagagataaacgaggagcttgcaagtgtaaaggtacgagttgtcccagttatctctagagttgtcccagttatctatgagctagaatatgattatttttgatgtgtgaatttgtataggttatctctagcgttttggaaccggattacgaggagaaagatttgttgaggcggattgtagatggtgatcatgttgatgatgggatagggtttgttgatccggttgtcgatagctggagaaaccgtttgatcaaagagaggaagagaatcttctggaaggatatgtttgaagcggatgtccgggcccgaagcggcggcgagcaaatggaggaagagaatgttcagagacatgttccgggcagcagtagctcttgctctttgaaggaacctattgatgaaggctttaagagagtgatggcgatgttggcggaacacaatgaaagccttgtgaccattgaaaggagacaagccggtgagagtgtgcctccatttgagaagaaggtccattccgatgtgaataaggagaaggaagatggtggtaagaatgagcccgaggctgttgagactgatgctgttgagaccaatggtgttgagaccggtggtgtggagacccatgatgttgagaccgatggtgttgagcctgagggttttgtgcccgagtttgttgaacctgagggttttgtgcccgagtttgttgagcccgatgatccgagttctgccatggttctttatgttccgcatgttccaatcggtatggtttgttttgtcaatctttgatctttttaatatatgatgtttgtaggttatgaatggttgtcttttcttttgaaggtgatgttcaagttgaaagggaaactgaagcggataaaggcgatgatgagacgccgaagaag

SEQ ID NO: 165300 - DNA, 1603 bp, Arabidopsis thaliana landsberg
gatataatcaagaggatcatgtccttcactgcaaatggttctcgtgggatcagtgttttgtcagtaaatggtgcggttgctaacgtcacgattctacctcacggttcaagccgcagggtcatgacgtttaaggtacatatttatatgataaacttggtcttgcaatgcaatcttataacctaatggttcatgtattggaaagatgcattgtaaagtttggtctatatatagaattaataagttgtcttacatggataagaaaatgataacaacttggtgtaggaggagtatgagatagtatcgctgaccaataatacaatggcgatatctgagagcggaggagtgaaaaataagacaggagggtggcggattactattggtggagctgctggtggacgtgtccatggtggtgctttggctgggagtctcattgcagcaagtccagtccaagtaagaacacaaagcatcttctttatttatgcatggttcaatgtttgaaactatcttataattccctttttaataggttgtgattggaagtttctggccgttgatcacaaatccgcgtcaaaagaggaagtatgtgtccaaagctagggttgctccatccataacaccaaacttggtggcttcctcatccacaggaccggtccaacaaccagagatggttggcccttctcactctcagaagaggaacagtgagtccaacagaactatggttgttctttcagccacaccaccaaacacattggcttcctcatccacaggacaggtccaacaaccagagatggttggcctttctcactctcagaagaggaacaatgagtccaacagaactatggttgttctttcagctacaccaccaaacacattggctttctcatccacaggaccggtccaacaaccagagatggttggcccttctcactctcagaagaggaacaatgagtccaacagaactatggttgttctttcagccacaccaccaaacacattggcttcctcatccacaggaccggtccaacaaccagagatggttggcccttctcactctcagaagaggaacagtgagtccaacagaactatggttgttctttcagccacacaacaaaacaaattggcttcctcatccacaggacaagtccaggaaccagatatgattggcccttattactctcggcagaggaacgatgagtccaacgatgtgattcttctacccacagttcaatacttactggcttcctcattcactggacaagtcaacgtcaaccagagatgacagacccttcccattctcagaaaaggaatgatgagtcccaagctgtggttgttcctcctgcaatcccaaatttattggcttcctcattcactggacaagtccaacgtcaagcagagatgtgcatgcccttctcattctcagaagaggaacgatgagtcccaagctgtggttgttcctcctgcaatcccaaacttattggcttcctcattcaccggaccagagatgataggaccttctcattctgaggagatgaacgatgagtttaacccttctcagtttctgactctagggtggtacagctctacaccggagcaagacaagtaa

SEQ ID NO: 165301 - DNA, 469 bp, Arabidopsis thaliana landsberg
  unsure (1)..(469): unsure at all n locations
cattggccagctgatcgtgaccatcgacgcagttgacccctgcttatgtgtttatcccctttatgaatgggaacagatagaagccaagttgcgagcgttgccgtcnnnnnnnnnnnnnnnnnnnnnnnnnnnnnnnnnnnngatcggcaatgcggtggacctggagctcgacggcagtggccgtttcctggtaccgccccgtctgcgcgagtacgccaagctcgacaagaaggcgatgctggtggggcnnnnnnnnnnnnnnnnnnnnnnnnnnnnggaagcctggaacgcagtttcggcagccgacctcgcagctatccaacaaccgggcgcgatgcccgacgatatgcgtgacctgatcctgtgaccatagatagcggcttcaaccacatcaccgttctgctcgacgaagctgtcgaggcattggccctgcgcgccgacggttgctatctggacggcaccttcggac

SEQ ID NO: 165302 - DNA, 1765 bp, Arabidopsis thaliana landsberg
tatcaatcttgtataagttttaatagcagtaatgatcccaatggttcaaaatttcatgtatttttcattctctagattaggcaagtcggtatggtgagaacatttgatcgaatctgcgggtttgtgtgtgtgttttcggtgtttcgtcatcactaagacactctactgaagtatatttgtttctgattaggtaattttctaaagaaaggaggtgaagtgaagctatggtgaaattaagctttgttcagcttcctagatgatcggattcattcaagtaagaaatatcagaaatggtcgtataagctttgtttcgtgttcttcacaaatgtcactaaaacgttaactttatattttcccattgtaagggacaaaatagtatttctatggtgttaatatacaagtgaggaaatcattattcggctaatgagtctattactcgaaaatgaaatttcaatattctcaagaatatagataatcaactttcatcaaagacaatttttaagtttgaataattaatttaaaatccatatatttttcttgattttttgtctaacttggtactttttattagttcctttaaaaaaattaggttattatcatccatccaaaacaaagattctactatatgtacggaaaaagaagtaccaaaaggtcattattaaatcccaaaacttgtttacctatttttatcaggaatcaattgatcaccactacctaaaaaccacaaattgcttaagtttgttaacactgattgacaagtgtcatacaagtaatcccatttgccacgtgtcatgtcctttttatgtaacctaggacttgaaaaccacaagtgcaagcaaataacctagatgacacttgttagagagcgacgtcaccaagaacctctcacactctctattccaccacttatttaccacggcaccgccttctccgtggcatcttcttcatcgtcaagccctgaaacatcgccgattcaaaccttaaacgatctcgagaaactctccgttttaggacaaggaagcggtgggacagtctacaaaacccgtcaccggagaaccaaaacgctttacgccttaaaagtctccggccaaatctcaacaccacggtcaccgtcgaagccgacatcctcaagcgaatcgaatcgagttttatcattaaatgctatgccgtttttgttagtttatacgatctctgtttcgtgatggagcttatggagaaaggatctctccatgacgcgttacttgctcaacaagttttctccgagccaatggtatcgagtctcgctaacagaatcctccaagggttacgttatctgcaaaaaatgggaatagttcatggagacataaagccttcaaatctccttattaataagaaaggagaggtcaagattgcggattttggagcaagtaggatagtagccggaggagactatggatcgaatgggacatgtgcttatatgagtcctgaacgtgtagatctagagaaatggggttttggaggagaagttggatttgcaggagatgtgtggtcattaggagttgtggttcttgagtgttacattggaagatatccattgaccaaagttggggataaaccggattgggcgacattattttgtgcaatttgctgcaatgagaaggtggatattccagtgagttgttcgttggagtttagagattttgttgggagatgtttggagaaggattggaggaagagagacactgtggaagagcttcttcgtcattcttttgtgaaaaacagatag

SEQ ID NO: 165303 - DNA, 1357 bp, Arabidopsis thaliana landsberg
  unsure (1)..(1357): unsure at all n locations
atgtcttcacctgaatcaccttccnnnnnnnnnnnnnnnnnnnnnnnnnnnnnnnnncggcaatcatcaccacgtcgtcaacctgtaatcgcggttctattaaatcgagcttcaggacgacgaggagcttcgatggtggttagagaaacagctgcacaagagcttgaagagcgacgagctgattggggttactcgaaacctgttgttgctttggatatgctttggaacactgcttttgttcttgttgcgattgttatgcttttggtttttaaagaagagaagccaaatgttcctattaggatttggatctgtggttatgcgattcagtgtcttgttcatgttgtccttgtttggcttgagtttagaaagaggaatgctagaagcagacctggagatttagaagctgctcaagctacgaatcaggatagtgaagatgaagacaacgatgagaggtttctgaggttagctctcgattcaattatctgtgctgtataaatctttagccaaaatgatttactaatgatttatgagaatcaattattttcagcactaagacttgtgaatcaatgaacactataatatcatttgtctggtggattgttggattctactggcttgtttctggtggtgatatccttctgcaaaacgcgacgcatttgtattggtatgtgttggtttgctcaatgtttatttcttctagttgaatggtaatgacatcattatgtttattaatgtttgcaggttaacctttgttttccttgcatttgatgtgttctttgccatcttttgcgttgtgctggcatgtcttattggaatcgccctctgttgttgcctaccttgtattattgctcttctttacgccgtcgcggggcaggtatggactataacagtaacccttttggaagaaatgaaagcaataaactgccttttgatatgtgtgtgtgtgtgtttaggagggtgcatcagaagcagatctcagcatccttcccaagtacaggtttcacacgatgaacaatgatgaaaagcaaagtgacggtggtgggaaaatgatacctgtggatgcagcgagtgagaatttaggaaacgagcgtgtgcttcttcccgaggatgctgtaagtttttgttttgaaagttatcttgtggatgttttatatgaagcttagagctttcttttgaattgggttggtatgtgtaggactgttgtatatgtttgagttcatatgaagatggagcagagctggtctcacttccttgcaaccaccactttcattctacgtgcattgtgaaatggctgaaaatgaatgcgacatgtccactatgcaagttcaatatcctcaaaggtaatgaacaagaatga

SEQ ID NO: 165304 - DNA, 3315 bp, Arabidopsis thaliana landsberg
ttgattttttttttctcgacaatgtcaactgaaagcaacacctccgctgcgactgaagtaaggagaacaatctctccttatgacctgacttctgctgataatcctggagctgtaatctctcatcctctcttgaagggaagcaactatgaagagtgggcttgtggttttcgaaccgcgttgatatcacggaaaaagtatggatttctcgatggttcaatttccaaaccagaagagacttcccctgattttgaagactggacgacgattcaagctcttcttgtgtcatggatccaaatgacaattgaaccaactcttcgatccaccatttctcatagagatgtggctcaagatctgtgggaacatctgaaaaagaggttctctgtcatgaatgggtcacgactacaataattgaaatctgagctagcttgctgcaaacagagaggtttggctattgaatcttactttggcaagttgactaggatttgggataacctcgccacacatcatccgttgcgtgtttgtcgttgtggtaagtgtacctgcaatcttggtgctgctcaagaggcagatcgggaggaagacaagactcatgaatttctcaatggtcttgatgagcagtttcgggcggtccgatcaactctggtggctcggactcccattcaaccacttgaagaggtgtacaacatcattcgtcaggaagaggacttgcgtgttcccgtagaagagtcaccgtcaatgacagcctttgcggtgcaatcaaaaccacgtcttccaactgacgaaaaggagaaaagtttcttctgcaaactgtgtaatcggtctggtcacactgcagagcggtgctatgctgtgattggctatcccgagtggtggggtgatagaccaaaaggtagaacactacaaggcagaggtcgcggtggagcgagctcgagtggaggaagaggcaaaggacaaatgacttatgctaatcgggtgaatgttccaagcattgagaatcaaaaccaagaacaagtgaaccatgttcatactgatcaagatcgtgatgcagtaagcggtctgagtgagcaacaatggcgcacaattaagtccattctcaatgctggcaaggagaacaccaccgagaaactcactggtaagttatcgtttccctcttggattatggacacaggtgcttctcaccatttaacgggcagaatggatgctctgtcaaatgttagaaatatgtcacctgtcttgattattttagctgatggaagagaacaagtttcgtttaaagaaggatcaatacgtcttggttctaatctggttatgaagtcggtttactttgtggaaggtttcaaatctgatttgatttctgtgggacagttgatggatgagaacagttgtgtggttcagatggctgatagttttcttgtggttcaggaccgagtttcgaagatggtgactggagctggtaagagaataggaggaacctttcacttgcgcagtacggagatcgcagcagcagtcacaacgagggacgataagtcgtttgagctgtggcataataggatgggtcatccttctgcaaaagttgtaggattgcttccttctgtttcaagttctgtttcttttgataatttgaataaagcatgcgatgtctgtcttcgcgctaagcaaacacgagattgttttccgattagtatgaataaaacttcgatgatttttgagttgattcacgttgatctatggggtccgtatcgggttccttcacattctggagcaagatattttttaactatagtagatgattactcaagaggagtttggttgtatctattgaatgacaaaactgaagcacctgagcagttaagaaatttctttgctctcaccgaacgtcaattcaacacaaaagttaaaaccattcgcagtgataatggttcggagtttgtttgcttaactaatttctttcaaaagaatggagttgttcacgagacgtcctgtgtcggaacaccgcagcagaacggaagggtggaacggaaacacagacacattctcaatgtcgcaagagctctcaggttccaagcgaatttgccgatcgaattttggggagagtgcgttctaacggctgggtatttgattaacaggacaccaagttctgttcttggcaacacaacaccgtatgagaaactgtataacaaagctccgtcatacgatcatctaaaggtatttgggagcttgtgttatgcacacaatcaaacacgtggtggagataaatttgcatcaaggagccgtagatgtgttttcgttgggtacccacatggaaagaaagggtggagagtttatgatcttgagaaacttgaattttttgtgtcacgagatgttgtgttttcagaaacaaaatttcctttctctcctgaaaccacgttgcctctaattgacgaagaagaagagggacaagtcttgtgggctcctatttcagaaggaattattttagaagaagatttgggcctaactgggcctgttttacaaaggcaaataaatttgggtccagtcactgaaaggtcaacaagagaaattggatctacaagtcaacaaactaggcctattaattcggctcaacagaatgaagttgcagttcagcccatgacacaaacactacgaagtcgtgatacgtcttctacctctacacaagctgcaactcaaattgtagaaccttctttgggcaaaggtaaacggcaaaagacgcagtccgttaaattgaaagattatgtcatacctccacaatctaagaaggctcaagctgatgggtaacaagcagattgaaggagaagactacggagaaacgttcgctccggttgcaaagatgggtacggtgcgattgtttctagatattgctgcaaaacgtggttggatcgttcatcaaatggacgtccataatgcgttcttacacggcgacttggaagaagaagtatacatgagaatgcctcccggatttcagtcgtctgacaagaacaaagtttgtcgtttaagaaaatctctttatggcttgaaacaagctccaagatgttggtttgcataattgtcatctgctttgattgcatatgggtttgagcagtccttggaagattactctctgtttacatatgacaaaggtacaacacgactccatattctcatatatgttgatgacttgataatcgcaggaagttccgtcaaggctacaaaaaatttcaaagactatctgtcgtcttgcttccatatgaaagacttgggtcctttgcagttctttttgggcattgaagtagcaagaaatgaatcaggcatatatttgtg

SEQ ID NO: 165305 - DNA, 868 bp, Arabidopsis thaliana landsberg
tcttaaaagaaaataacaagtatcaaaatgtcccctaagattccaaccttagatttctcaagagaagatttgaaaccaggcacaaagtattgggaatcaacaagagacaacatcagacaagcacttgaagaatatggatgtttcatcatagatcttaaagacaagactcctttagatcttcttgatcgagtctttggttctttggtcgacttgtttgatcttccaacacagaccaaaatgaagaacaaatacgataagcccttaaatggctacgttggtcagattccagctcttcctcttcatgaaagtcttggcattgataatgccacttcgttagaagcaaccagaagcttcaccggtttgatgtggccacaaggaaatgaacattttaggtatgtataaaaggatccagtaacattttagaatcctcaactatcattgtccgatatttaaacattcaactttgcttggtttatatatgttagtgaatgtttgtataagtatgcggagtttgcagccgagcttgatcaaatggtgactcggatggttttccaaagctataatgtcgagaaatactacgatccatatatcgaatcaaccacttaccttctccgtgtgctgaagaatcgtgcaccgaacaacgaaaaccctactttaggatttgttacacacacagacaagagcttcacaacaatacttcaccaagatcaagtcaatgggctagaaatggaaactagagaaggagagcgaatcaatatcaatctatcatcaccttcactcttcatggtcgtcgcaagcgatgcattgatggttaagttaaatcataatacaaaattacaattctgtaactgagagaaacataaactga

SEQ ID NO: 165306 - DNA, 1467 bp, Arabidopsis thaliana landsberg; identical to SEQ ID NO: 35397
  unsure (1)..(1467): unsure at all n locations

SEQ ID NO: 165307 - DNA, 251 bp, Arabidopsis thaliana landsberg
ccacgcgtccgctcacccccaatgttgcaaccatatctgactttgagttcaaagagcacgggggcgatgactgctccgggtcgctcaaggagggcccgaccggcacctggacgctcgacaccaaggccccgctcaagtaccccctttgcatccgctttgctgtcaagtccggtggctaccgcatcgccgacgacgtcatccccgccgatttcaaggccggcaccacctacaagaccacactcagcatctaa

SEQ ID NO: 165308 - DNA, 1042 bp, Arabidopsis thaliana landsberg
cccgttcttcatcagccaccttcctccaatctttactatgttataaggttaagcgggaaacacacagggtgatttggtaccttgacgtgtctttagaatcttaaatgattatagcatatattttcattcaaaacgtctactcttttatatagaatttacaagaactcttaaagtttactccttttaaatttgcagtgaagcatgtgttagtgcaaaagaaggggacagagcttcttgttgcttttgctttacttatatccctgaggctgttccaaggcctctggatccttttgacataaaccaacaatttgagatccatcaaggaggatcatcaaccaagaagttctttgctacatctgttgcttcagatgggataccacctcagttcctgacgagaaaaggttggtcggttattttctcggcccccgaagtcgaagactatggtttgattgatgatgcaaaaggcatagttgacgcaaagctgcgctatgagcttcctgatttagataacagcgttgtagttgggaaatggtatgttccgttcttgtttgttaaggaaggtgatgcaaaagatcagatgtataagtcaatgtattatagtatgacgcttcagcaaagatttgaagaggttttcttctgtgaaaacgttggcaacaataaacgttttgaggttgtagttgatgtggaggtagaaacagaagtggtcaagcttgaaggagagaggattgcaagagagacacaaggtgtgaactcagatggagttgtgtggtttaattcctcagggaatgagaagataggtcttgggtctgttgtcttagagaggatgaaatgggaagaggagaggtttgggtggttaaacaaaggctatgaacaaaggtctagcattaagagaactgaaagatttgaaggcggtggaccatattggaagagttatagatgctatgtattggtagagacctttgaattgaagagaactgatgggagtttggtattgacatatgagtttaaacatgttgataagttgaagagcaagtgggattga

SEQ ID NO: 165309 - DNA, 3333 bp, Arabidopsis thaliana landsberg; identical to SEQ ID NO: 35613

SEQ ID NO: 165310 - DNA, 1543 bp, Arabidopsis thaliana landsberg
atgtcgaagaacaagggcttagctgaacaagatctaagtaaacttgatgtagctcagctgcatcctctctctcctgaggtcatctctcgtcaagccaccattaacataggtatacacaagtttttgtttcattgagttttgatgctgaagaaactgatcagccgtgcattgaaagctaaagatatgactatgctctctatatctcaggaaccattggccatgtcgctcacgggaaatcgacaatcgtgaaagccgtttccggtgtgcacactgtcaaattcaagagtgaattggagcgtaacattaccattaaacttggttacgcaaacgcaaagatttacaaatgtgaaaaatgccctagaccagtagcctacaagtgaattcttgctcttcttttgctacaataaggttacgtagtgtacgtagcaacttatgatatgtgttaattataggtctttcgggagtggcaaagaagacaacccaagttgtgatgtctctggacatgagaagtacaagatgaaactactaagacatgtctcatttgttgattgcccggtataaaatgagttttaacactatttctaaatcttttgtaaccattttctatatgttaatgaggtgttttgtgtgttgattagggacacgatatcctaatggcgacaatgctgaatggagcagcgattatggatggtgctttactaatcattgctgcgaatgagacatgttcacaaccacaaacaggtgaacatcttgcttctgttgatatgatgcatcttaaagatatcataatcattcagaacaagattgatctcatccaacaaaacgaggctattaaacagcacgaggacatacagagatttattacggtttgattcaattttgccattctgttttttttttgcatttatcacttcttgattagttggataagttttaaacttgttattacagaacacgaatgcggaaggtgcacctatagttcctgtctcagcgcaactgaaatacaacattgatgttgtgagtgaatacattgtcaagaagattccaatccctgtgagagactttgtgtcaccaccaaagatgattgtgattcgttctttcgatgtcaataaacctggctcggcgggtcatgaaatgaaaggtggtgctgctggtggaagtatcctccaggtatgtttttatctctctgtttctcctctgttcttacctgactgtgaaacaatttagtattaatatgtgtctctctttgtttgggtgttttgaaagtgaaccaactgattgaaattagacctggtatcactggcaaagatgagcatggaaactcaaaatgcactccaatttactcgcgtataacttcactatacgcggaacagaacgagcttcagtttgctgtaccgggaggtctaatcggagttggaacaaccatggaccctacgcttacgcgtgctgataggttggttggtcaagtccttggtgaaatgggtactctccctgacgtctttgttgagcttgaagtaagttaccagcttctgactcgtctcat

SEQ ID NO: 165311 - DNA, 2423 bp, Arabidopsis thaliana landsberg
  unsure (1)..(2423): unsure at all n locations
acataactgttgaattggttttttatccatttctgtcatttttatttggtgtttgcttttgtatctctttgtgggggggcagggttgactcatctgaaaaagctaaaagctttggatctaagtaacaatgttttttcgagcataatggaattgcaaggcaagctttctttttaatctttctttatgcataagaaatgtctcatgaactattattctcttattattctcaacattttgttgttttccaaactatcttttttttgcagtagtttgtgaaatgaagaatttgtgggagcttgatcttcgagaaaataaatttgtaggtcagcttcctctttgtttaggtagattaaacaagctaagggttcttgatttgtcatgcaaccagctaaatggaaatctaccatctactttcaacagactcgagtcccttgaatatctatcattattagataacaacttcaccggcttcttctcatttgatccactcgccaacctcacaaagcttaaggtgttcaaactttcatcaacatcagatatgttgcaaatcaagacagagagtgagccaaaatatcaatttcaactaagtgttgttgtaataagagtttgcagcttggagaaaatcccttcctttctcgagtaccagaaaaacttgcgtctagttgatctatccaacaacagattatctggaaacctacctacatggttgttggcaaacaatccggaacttaaagtattacagttgcaggataatttatttaccatcttccagatgcctgctacaatagtgcatgagttgcagttcttggatttttcagtgaatgatattagtggactgctccctgataatatcggttatgcgcttccgaatctgttacgaatgaacggctcaagaaatgggtttcaagggcatttaccatcttctatgggtgagatggtaaacattacatcccttgatctatcttataataacttctccgggaagctacctagacgctttgtcactggttgtttttcactaaaacacttgaagctctcccacaacaattttagtggccattttcttccaagagaaacaagctttacttccctggaagagttgagagttgatagcaactcattcactgggaagatcggagttggtttgcttagctccaacactacgttatcagttcttgacatgtccaacaattttctaacggnnnnnnnnnnnnnnnnnatgtctaacttatctggtttaactatcttgtcgatatcaaacaattttttagaaggtacgataccaccatctttgctagccattggctttctttctctcatcgacctatcgggaaacttattatctggatccttaccgtcacgtgttggtggggagtttgggataaaattgttcctacacgacaacatgctcacggggccgattccagacacgttgttggaaaaggtccaaatacttgatttacggtacaatcaactttctgggagtattccacaatttgtcaataccgagagcatatatattcttttaatgaagggaaacaacttaacaggatctatgtcaaggcagctctgtgatttgagaaatatcagacttttagatctttcagataacaagctcaatggcttcataccttcatgtctatataatttatcatttggaccagaggatacaaattcatatgtaggtacagccataacgaagattactccgttcaagttttacgaatccacatttgtggtagaggattttgtggtaatatcctctagttttcaagaaattgaaatcaaattttcaatgaagcgaaggtatgattcttattttggagcaactgaattcaacaatgacgtacttgattatatgtatggaatggacctatcaagcaatgagttaagtggggttatcccagcagagcttggaagtctctcaaagctacgagtcatgaatttatcttgcaacttcttgtccagttcaataccatctagcttctccaatctcaaggatattgagagccttgacctttcgcataacatgttacaaggaagtattcctcaacaactaaccaacctttcttctcttgttgtctttgatgtgtcttacaataatttatccggaatcattccccaaggaaggcagtttaatacctttgacgagaaaagctacttgggaaatcctcttctttgtggaccaccgaccaatagaaggttgtgatgctaagaagacctcagatgaatcagaaaatggaggagaagaagaagatgatgaagctcctgttgatatgttggccttctattttagtagtgcttcgacttatgtaactacattgataggcatttttatacttatgtgctttgattgtcctttgcgtcgagcatggctccgcattgtcgatgcttccatcgcctcagtcaaaagtatgttgcct

SEQ ID NO: 165312 - DNA, 3287 bp, Arabidopsis thaliana landsberg; identical to SEQ ID NO: 35141
  unsure (1)..(3287): unsure at all n locations

SEQ ID NO: 165313 - DNA, 2361 bp, Arabidopsis thaliana landsberg
  unsure (1)..(2361): unsure at all n locations
atggagttctcgttgtccgactctctctctcttgagaaatccattgtcgtcgtcacccaaaaagtaagctgtttctttgatcttcctgttcacccaaaagcaagcttcttctttcacatcccttcttttgcgtttcgtttccaatcgtaagttaacgtttaattttattattaaaatctcaaatcatcaccaatttgatcaattagatctgttgattttacctgtctgaacttaatttgggttctaataatcgatttttttttttgattctccttgtataggttctatatatgggttccagagatttaattagcagtctgccagatgaaattcttggcaaagtcctgtctttgcttccgacaaaacgtgctcttccacagctgttctgtctaaaaggtggaacaatctgcttgctcttgtagacaagcttgatatcaatgacgcaattggtggtcctggaggcttccctgaattcatagataaaacacttgccctcttaacaaattctaccaccattaagagaacctctctgaatattgaattccagtatggcgagtctcaagtgaacacttggattcgcagtttcctcgagcgcggctgcttgcaactttacttgaacgctcaaagtttgtatactatagacactgagttcttcacgagcaacacacttgttgagctcactataaccggtgggttttctcctgatggtcttcttcctcctggtggcgtgtttttcccaaagcttaaaacactctctctcgttctaatgacgtttgtagattctgatatgtatgaacttttcatctctggctgccctttgcttgaggaattcttactacgtaatgatgaaattgaaattcccccggtttggaatgcgctagtttcgagtccttccatcaaacgactaaccatcgttcaccattttcccaattaccgtgaggcacacgatggttgttggttccggacaccaaatctcgtgtaccttgactattctagctatgtcccggattggtatgaggttgatttaggttcccttgtagaagctggtggttatggtgactgtgatagtgtttatgatgaggaggaatatccagatgnnnnnnnnnnnnnnnnnnnnnnnnnnnnnnnnnnnnnnnnnnnnnnnnttaaaacccttcacttgtctcctgattctctcgaggttagtttcccctacttgttattgtttcaatttgaagtgcattctagcttgcaaagtcttcttattgtgtgatatttaaaatccaggtgtttcatttctgctgtaaatccatgcccgtgttcaacaacctccttaatttatctattgagagtaacaaggataaaggttggcaagtaatgccacttctcctcaagagttgtccaaatctacacaccttagtcatcaaggtatgatataaaccttgctgagattcttttctgttgttagtgttgccccattaatttattcatgtcaaattggtctctggtttcagggtcttgtccacagagtaacaactatgttagttttaactatgttatgtggctccttgtaagtcaccatggagggtttctagagagcagcatcaccaaacaaagataaaggcaattagatcaatactatatggttccttgtacaggtaaagagcaattagaccaatttcatgtacatagtaatgtaaaagacacaagaagattcgaaatacaaagagcaatctataagagtcaacacgactgaccaatggttctacttatactaagtttcttttccaagtaaagagtcaacacggcttgaccaattgtgacagctatacaaagagccagttttacctccaatgattctagatatactcaatttttttccaactaaagttgtcaacacaacaaagtagtatttcagggcttgaacgataccaatagtgaaagctatacatgggttgtgtttcatctagcttcagtttcactctttgcagctaaactcctgcaattatggatctcgatagattcataagcatgctcaaaatcaacatattatatacacttgttgtctttttttttttttgttgttattgttgttataccttctatctggcagcaaaagtatgtctttggttttcttttttttctcggaagcatcgactacaccagcttgagaattccttctgctacgttttcatctctgcaatggaaaagcagaagaaaatcatatcaactgtgatctcaaaactctgaaaggcaagcttgtaatatagtttaccctgtggatagaagattcacattggcccaatgaccacaagtcccccctctggcactatggtgtagtacaacatgcaccagtatgtgagagtcatcaaacatttcctc

SEQ ID NO: 165314 - DNA, 967 bp, Arabidopsis thaliana landsberg
ttcgtgggatctcgttttttttttgttcagcttcgcttgaatatgccttcagacaatccacagaacggaggactcaaaggagatttcaaagaacgcttcagtatccaatgtaaaaactggctcgctcctcccaatcccaaagaagaagaaaaacaagacactcccgtcgtcttaactcctgtaaaaatacatcttgctgcaggagttttgaagaagagggaagaagggccggcagaaattgaggaggatcgtgtggaaaccaactctgaacttccgggccagacaatccacgggttcgataacgagatcaagtcattgaagaatttcttgttggaccaaaaggtttgcaaggagttcaagagtcttgtgattgtcggagaatatggtgttgggaagacagcattatgcaagacgatcttcaatgataaagatgtgaagaatgtttatgccccgaggatttgggtttctatgcagcctagcaatgatggagaagataaaaagatatctatcgtgaagaggatcttgaagggtcttggagctaaaggtttgctgctcaaaactatccatgatgaggcggtagaagaagctgcaaagaatctagaacgtccgaacaatcagggagctggagagattgatagagagacagctccagagaaggagctcgctgctctgctctatgcacttcacttgaatctgaggtggaagaagtatctgattgtgttcgatgatgtgcgagaagaagacaactggaacgagattcttcaggaagacgaggagaaactcaagaaggagaacaaatggggaaagtatctttcagatggattcccgaaagggtctggtggaagagtcatatacacgaccagggatgagaaaaaaactctggcgaagaagctagttgcagaagaacatgagatacatcgtctttggcctctgacggatactgagagtgtctggatgatatatgaag

SEQ ID NO: 165315 - DNA, 1034 bp, Arabidopsis thaliana landsberg
  unsure (1)..(1034): unsure at all n locations
ccgctggacccgaaccaggagaccctttctcttcgagaggcccgaagccagaagaggaaggccaccagtccaacacccaagaggatgagttggaccaagagatcaggaatatggagatgcttcatcagcaagtacaaaagaagaaggaaaaaatggctcggctagctgacctacaaaggcagattgacgaagccactgaagaagtacgtcatcttactcaagatgagcaaaaccgaagccccaacacagagagcttcaccaagagggcttcttcaatgaggatgattggtatgaaaatttccatcatggaaattttgcttttgacgatgcttctcctctgccagcagaactgcaggctacaccttggccctcgtcttacaagccacctcagctccccatgtatgacggacactcagatccgaagcagtttctgatgagctacaaagctaccatatcttcatatggtggcaatactacagtcatggcgaaatccttcgtcatggcagtaaaaaatgtcgcacaaaccttgtactcatatcatggcagaagctaaaagacatgctgatcaacagcttccaatggttttagacaaagccagtcactactcaggctttgttctagtgcacgcaagaccatgaagaataccttcaggcgtatgtccaaaggttcttgcgtctgagggcacaagcgcccacagtgcccaatgaaattgtcattgaggccatgatcaaagggcttgggccaggacctatggctcaatacttcgctaggaaaccccctcagactctggagaagctccttcatannnnnnnnnnnnnnnnnnnggctgataatgattttcgccaaagaaaggaagaagcctataggttttctgaaatgactaggggcttcaaaggaagaattcaccctagacatgttagatcaatccataactccagctagagtgatgacagaggaagccagctgcaaaggccacaacatagctcacaatcattcggacaatagcaaaactctntcaggctaccagccccaag

SEQ ID NO: 165316 - DNA, 368 bp, Arabidopsis thaliana landsberg
ttggccatgaataaacgttacggtcacctcataagtctattgttcgtgttttctcttgttatgttccccttcataacaatatcacagacgccatgtccgtacccttgtaacccgttgccaatagccggtactggctccactcaaccggccggttattatcctcaaccgaccggttactatcctcctccatcgtcgagtaatgtaccgaattacccttctccaccttattacggaggtaatcccagcgggggatataacggtcctccaccgccggaccctatcttgccttatttcccgttctactacagaaaacctcctcatcagacggatcagtcatcatcttccatgaaatcaactgtcaagatcgt

SEQ ID NO: 165317 - DNA, 2430 bp, Arabidopsis thaliana landsberg; identical to SEQ ID NO: 3855

SEQ ID NO: 165318 - DNA, 5114 bp, Arabidopsis thaliana landsberg
tagtctgtctaacaatattggccacggacggtccacgtgagcggatgattacttgtttgtcaaatttatgcatgcatggtaatgtttgggatgctattgggaagagagaagggatacaaatcctcataccgtaccttggtttgtctagcgaacaacatcaagaactgtctgttgagttcttagctatcttgaccgataatgtcgaagaaagtagatgggctgttacttctgcaggtgggattcctccattattgcagatattagagactggtgtatctcagaaagcaaaggacgatgcggtccgtgtaattttgaacctatgttgtcacagcgaagaaatccgcctctgcgttgagaaagcaggagctattcctgcacttttgggtcttttaaagaacggtggaccaaaatcgcaagagagctcagcaaatacgcttttgaaactgattaaaacagctgatccaagtgttatcgagcaagtacaggctttgtttcttggagatgctcctaaatcaaagactcatttgattagagttctaggccatgttcttgcatcggcttctttggaagaatttgtcaccaagggttctgcagcgaataatggattgaggtcgcttgtccagagacttgcctcatcaaacgagaagatgaaagagaacgcagcttctgtcttggctgatctattcagttcaagaaaagacctttgtggtggtcttggatttgatgaggatgacaatccgtgcacaaagcttttaagcggaaacactcacgctgttgcaacgcagttagcgcatgccttgggctctctatctaatccaacaaagaaaaaaactgcaacaaagaaattatccggtccagaagtcgaagtgatcaaaccattgataaagtcagcaaaaacaaaccccatcgagtcaacagagaatcccatgtccactcttgcgaaccttctttcagacccaaatgttgcagctgaagcattaaacgatgacgttgtttctgctttgaccagagtactgagagagggaacactgcaaggtaaaagaaatgcttcacatgctcttcatcaattactcaagcattttcaagtcagtgatgtatttaaaggaaatgagcagtgtcgatttgctgtttctgaactcattgatctcttaaacgcaactgacctgaacaacagcgctttcatcgacgtcttagaagtactctctttactagccaaagctaaatatggtgctaacttgtcacataaccctttttctgcattcggtgaagttccttcaaatttagactctcttgtccgcggtttagctgaaggtcatcctttggtgcaagataaagcaatagagattttgtctcgtttctgcaagacacaatttatcttgttaggtcgacttttggtgacacaatcaaaatcaatttcttcattttttaacagaacaatcaactcatcaagtcctgaaatcaaagttggaggagcgatcttgcttgtgtgcgcagcaaagaacgacattacattatgggcggaagcggttgaacaatcagggtatttgaaaaccttagtaaacactcttcttgatatgtcaaagcagaactctaaatctgcttcatatggaattgaaattcaaagaccaagatcttttattacaagcaatttgtgcttaaggatggatgactctgaaatggttgatccagttactatcttgggaagcaccgcctctatgtggttactctccattatttgctcttctcatccttcgaacagacttgttgtcatggaaggcaatggacttgatattattgcagaaaatcttcaaagaacaagtctaacacacaggtcaataagtatacttacttgctctctttagctttttcttctaaatcctgcaagtgttggttttgctgacttaatatctttaatttttgtaggagaattcctctgattccgaggaaaaatggatcgctatgtcatttttagctgttatgtctcaggaaccaaaggttgtctcatctccagcaacagaaaatattttgcaaacgctagcacctttcatgcaatctgagcagatgattgatggatattttactgcacaagtgttagcagcgttagttcgtcataagaatgataaaataatttcagaaatcatgaattcagatatcgtagaaactacgataaacttggtagggtgtgaagaatcagacacaaggagtctttgtgccttagcagaagagctatctctggtacaaaatccttatgaggccacattagaggtactctttgaaaatgaaagagtaagaagcggttcatttaccaaaaaatgtattcccttgctcgtgaatctcttgaagccatatgcagataaagttggaggcattccagtggctattcgacttcttcgtcgtattgcagacaatgacgatttaagtaaattacttatcgctgaagctggagctctagatgctttagcaaagtacctttctttgagccctcaagattcaacagagattaccgtttctgaactgttagaatcactctttcgcagcccggaaatcacacgacataaaacagctataagttccatgaagcagctcataggaattcttcatcttgcttctagaagtactcgctacaatgctgcaagggtcctctgtgaactgtttagctctgagcacatcagagattctgaattagcatggaaagcactttctcctcttattgaaatgttgaatacaacgttagagagtgagagagtagctgctctaacagctttagtgaagctaactatgggaacaaatccaaggccagatattcttactagtcttgaaggaaacccattggacaacatctacaaaattttgtctttagatagttcttcgcttgaatcaaagacaagtgctgcaaggatatgccgctttctatttaccaatgaaggtttgagaacaagcacatctgccgcatgttgcattgtatcccttatatcacttatccgaacaggaaaaagtacagctatagaagccggaatgtttgcactagacagactcttggatatcaaaagatttgtagaggttgcagaagaacatgattgtgtgaacctgttctacggatatgtggcttccgaaaactatctgatcagtgaggctgcaatttcttgtcttacgaaaatggctaaagacaatactccccggaaaatggatctgattaaaatggggataatcgagaaatgtattagccaactctccaaatcgccgccaagttctttgtgttctgtaatcgcagatcttttcagagttttgacgaacgttggtgttatagctcgaagccaagacgctataaaaatggtacaaccgctccttttgattttgcttagacaagacttggattttcaaggtcaactcggtggtttacaagctatagcaaacatcttggagaagccaatggttcttgaatcattgaaaattgcatcttccacaatcattatgcctttgataccactgcttgagtccgagtcaattgcggtcaaaaatgcaaccacaatactactgacctctctactcgaaatgcaacgtttccaagaagagataacaaccaaaaatctcattgctcctctagcgaaactggtagggatcagagtaagaaacttacaagagatagcattgatgggtttagagagatcctcagttacatggccaaaagaggtagcagataccggaggaattcaagagctctccaaggttatcatcgacgaagatcctcagcttcctgtatatctatgggaatcagcagctttcattctctgcaacattctcagaatcaacccagaacactattactttacggtgactataccagttctgtcaaaaatgttgttctccacagctgaaagcacagtgatcttagccatcgacgcattgatcatccgtgagaatcaagactcgtcaagcgttcaagaaatggcagaatccagtgcactcgacgcattactagatctactaagatcacaccactgcgaagaactctcagcaagattactcgaattaatactacgcaatccaaaggttagagagacaaagatatgtcagtttgtacttacccctctatcagagtacatactagacccagacacaatatcagaatccgcaaaaattctcatagcaatggctctaggtgacatctctcaacacgaaggactcgctaaagccacggactcgcccgtggcatgtcgtgcgttaatcagcttgcttgaagatgaaccgagcgaggaaatgcaaatggttgtgatgcgtgctttggaaaactttgcaatgcatagtagaacaagtcgtaaagctatggctgaagctggtggagtatattgggttcaggaaatgcttagatctagtaatccacaagtttctacacaagcagctctaattatcaaatctctcttctctaatcatacacttcaagaatacgtctctggtgaaatcatcaaatctctaacaagtaagtttcaattccgaatttaaaatttatgatcggattgagaatcaaacactcactgatttcaatgcagatgcgatggagagagagttttggacaacgacggcgataaacgtagaaatagtgagaacgctaaacacgattctcacaacgtttccaaaactccgttcgtcggaagcagctaccgcttgtatccctcacttaatcggagctttgaaatccggcgagcaagaagcgagagattcggcgatggacacgatctacacgttgcgacaatcgtggacaacaatgccgacggagacggctagatctcaagcggttttagcggcggatgcgattccggttctccaattgatggtgaaatcaaaattgaaatctccagctccatcgagcttccatgagagaggtaacagtctcttgaattgtttgccgggaagtctcacggtggcgattaaacgcggtgataatctgaaacgttcaaatgcgttttgcagattaatcatcgacaattgtcccaccaagaaaaccaaggtattgtaatttcggtttaaccggttcaatccggttaatttctcttcaatccagttctaaaaaaattcggtgcaatttcagtttgatttttgctattactaatccgtat

SEQ ID NO: 165319 - DNA, 3563 bp, Arabidopsis thaliana landsberg
taggaggagacaaagatttggtcccataaacacttggggagacatgaagtacctcttaaggttgaggtatgtccttgaccattatcatagagacttacaaaaatattttagaatgttgtctcagggaacaaagaccgtcgatgagtactttgaggagtttgagaagctcatgaacgccttggagttagaggaatctgacgaagctctcatggctcaattcatagacggattacaagagaggattcagcgaaaggtggagagagcccaatataatggactccatgagttgctacacctagcggtacaagtcgaacagcaaatcaggcgtaaggcatccttaagcaaccgatccagaaacaacacgccttggaatgcaagcaacaaccgagccatggacaaaagcaaggccgtagagagtgatcataggttcaagaacaagtctaatgaggcacctaaaacctataggcccaaactaggtaagttccctagtactaatcaatctcgttctcgttacattacttgtttcaaatgtcaaggtagaggacacatggcgagagaatgtctgaaccaaagggtgatgatcctcactcctagtggtgactatgagtcacaagatgagcaagaggattctgatgagcatgaggacgttgagtatccggatgtaggagaacttcttgtgattcgcaggacattgagtgtgttcgttaacctcgaatgattattgatggaggttcatgtactaatgttgctagcaagtacatggtagacaggttaggacttcagaaaacaaagcacccgaggccatacaagcttaggtggctcaatgacgatactgaactgaaactcgcttaacaagtgaccgtatcattcagcgtgggaaagtaccacgatcaagtcgtttgtgacgtagtgccaatgagagttggacatcttctccttggacgaccatggcagtttgatcgagctacatgtcacaatgggcgcaccaaccattactctttcacctttaatgaccgtaagtacaaccttgcccctcttagtccctttgaagttcatgacttacaaattcacatgaacaaggagcacgaggtaagaagttctagtctttatttaagctctaaagatgtttgtaaaaccatgagtgccaagggcaccgtgctactaatggttttcaaagaatgtcttagtacagggataggtgatcctgagctatccgctgaagtacaagctgtactagattggtacaaagacttattcccggaggagattccacccggactaccacctatttgtggcatagaacagcagattgatcttgtaccaggctctgctttacctaacaagcccgcctacaggatgaatccggaggagtctaaggagcttgaaaagcaagtgagtgacctatagacaaagggtacatcagagagagcctcagcccgtgtgcagtacatgtcctagtggtcccaaagaaggatggcacgtggagaatgtgtgtagactgccgtgcaatcaacaatatcaccatcaagtaccgacacccaattccgagactatacgacatgttggatgagcttagtggtgccatcatattttccaaagttgacttgaggagtggctatcaccaggtccgaatgagagaaggagacgagtggaagacagccttcaagaccaagcaaggtctctacgagtgccttgtaatgccgttcgggctaaccaacgcaccaagcaccttcatgcgcctaatgaaccaggttctaaggttttttattggtaaatttgttgttgtttactttgacgacatacttatttacagtaagagttattctgatcacattcaacacttagagttaattctcaaaacgcttcggaaggaaggcctatatactaacctgaagaagtgcacattttgttctgacaagtgtatgttcttaggttttgtagtgagtaaacagggactacaagtagatgaggagaagatcaagccaatccgtgaatggcctactccaacatctattgcacacgtccgtagttttcatggactagcgagtttctacagaaggttcgttagagactttagtacagtggttgcgccaatgactgttgtgatcaaaaagaacgtgcctttctcatggggagaagctcaggataagtctttcaacacgttgaaggagaggctcggccaagcaccggtcttaaccttaccagattttgaagtaatgttcgaagtagagtgtgatgcttcaagattgggaattagagctgtactacatcagataaagaggccgtggctttctttagtgagaaactaagtggagcagcattgaattacccaacatacgacaaggagctttatgctctggtttgagctcttgagacttggcaacattacttgttgtccaaggaattcatcattcataccgatcacgagactctcaagcatcttaagggtcagacttggcttaagaggagacatgccaagttgttggagtttgtagagacgttcccatatgtgattaagtacaagaaaggaaaggagaatgtggtagcagacgctttgtctaggagacatgcccttatagctactatggaggctaaagtgatgggttttgagcatatcaaagagttgtacaaagacgaccctgagttaggagaatgctaccgagagcatggtaaagccctttacaagacattctacttacaagatggagattctattcaaagacaagcggttgtgcatccctcaaggttcaatgcgatagttgatacttagtgaagcgcaaggtgcaggtttgatgggacactttggtgtagacaagactttggccatggtaatggagcatttcttttggccccacctcaacaaagatgttgagaggttttgtgcccgttgcattgtttgtcacaaagccaaatccaggtcacatcctcatggtctctatttaccattacctattcctaacgcctcttgggtagatgtttctatggactttgttttaggattcccaaagattaaacacaaggattcaatctttgttgttgtggaccggttctctaagatgacacacttcatcccgtgtgacaagaccaatgacgcgactcaaaccgcagagttgttcttcaaggaagtggtacgcctccatgggattccaaggaccatcgtttctgatcgtgacaccaagttcttgagtcacttttggaggactatttggagaaagttaggtaccaagcttctattctcaacaacttgtcatcctcaaacggatggacaaaccgaagtggtaatccgaactctctcaactttacttagagctactcttggtaaaaatatgagcacatggcttgattacattccttttatcgaatttgcttataatcgtgatgttcactccggtacaaaactatctccttttgagatagtctatggaattaaccccttgtctccattggatttagtacctttgcctgagaaatgacagttttgccaagatggtttgagacgtggagaaatcatcaagaagatacatgataagacgaaatcaaacttagaagagaaggccgccgac

SEQ ID NO: 165320 - DNA, 3856 bp, Arabidopsis thaliana landsberg
gaaggttagagttcattcaatataaaccttgtgagctgactttgatccttgcagataggtcttctagaaaaccgttcggcatgctgaaagacctaccagtcatgattaatggcgtagaagtgcctacagacttcgtggtgctggatatggaagtagagcataaggatcccttaatactgggaagaccctttttagcgtcagcgggagcagtgatagatgtcagggaagggaaaataagtctcaaccttggaaagcatatcaagttgcagtttggcatcaacaaaactccacaagggtcaaccgaagatggaagaacctctggaaatgatagagcgatctcaggagaaggatatgagactgaaagagtgaaagaacttagaaagaagtctgataagcataatgaaactatagagaagctggcccacaccattgaggaacttaggagtaagcagaatcagatgcagaaggaagctcaacctaaaggcgggattaacactatcccgagaaaagaattcacttcaagatggtctccaaagacagattaccctcaagaagagaaggaagcctattttgaagaaaggggaattgagtattctgctgcagacctctccagggaggacgctgagtatgatgatggtatcggagaggattatgctgaccctctctacagttcattttcttcttgataagtgtgaggagtcaagctagagacttaaaacaagctcacttgggaggaagttccatgactatccttgtaaataatttttactttcttgttatttttgatttgttttggttgtgtttgtggttctcaggaagaaaggagtaaagtgaaggtagagttaaaattcaaaacttttactctactgatgtcctagagatcgagtatattggtcgtgtttgagtgatgtttaaaaacgtaaaaaaatttaaatcatcattttactcgaccaacagaagctacagaatgttacaaagagttcatcaagtttacagaagattgcgggatttcctggggatttttctagtgaacagagattatagagaagagacaaggagacaacgagggacccactgctgcagccatgtctcccacgctccccacaaagtgataacgaaatctatctcttcttctccactccactcgacctccccttatcccttcactcgatcccatcgccttctctcttcaaaaacgcgacctccccatctctcttcctcccacactcgaccaactccaaacaactcgacctcaccaattgctgcgacactcgatttcacatcaccgtctcctccgtccaagcctcatcattcgccctgaaggaatcaccaccgcagctcatctccaatccacttgctactcgaccgtcgctcatcaccattgtcatcctcacaaccttcactcgacctctccactaccacaaccactcgaccgcttcacaccgccgtcttctcttcttccgtgagctccactttactcgatccccaatcaccatcttcttcatcgcttaatcactcgacttcttctcacatcatcccttcaccaagccgccttcaccacttctacatcaccacaagaccaaggtgccgtcgttctcccatcgctcaagttcattggccactcgacttccccaagttcactcgattcaactccaatgctcgttgttttcaccactcaagcttcacggcttcactcggctgtcaataaccactcgaccacaagcccgttttcatttcacagttcactcgactcctcctcttcaagctcaccactcgaccaagcaaaatcactcgatcaaccgaaaaaaaatctatttcaaaacagacggtttactctattaaatcactcgaccggttcacttgattggtttgtgtttttggtttgctattactaacgtattaacgtttatttttgagttttgtccgttttcaggtttcatcatgagtaactacagcggagaatcctctatggaccctgattacaatgtagatgaagctgagtcctgatccgctagactgagagagcaacatgtttaccagagcttcagggatgaattcgaacgctctgcagcccgacgtaatcagagaagagctgaaatcaccagaggaaagagggcgatgtcaagtagatatgagctgattgatgaggatatcgagactgagtatgagccagagtcatggtgcagggagacgaagctgctgaacaaacccgacgaggttacagtggaggagtatatcaggttctttaagatgaatgatttctggggaacgcggtatccgtgctatgagactttagcccagctggggttactggaggacgtgcagcatctgttccagaagtgtcatctgcagacacccatgtcttacccttaccctgcctataaggaggatacaattgagtttctttccacgctgcaagtggaggggtatgaagcactcacagactttgagctggatgccatgggattaggcttcttgacgttcttagtgaatgaacagcggtatcagctttcgatcaagaagttagaagaactgtttggtttccctagtggaaagggaaccaaacccagatttgacagagaggagcttaaggatttgtgggccacgatagggaacaatctaccgctaaactcagcgcggtctaagagcaaccaaatccaaagtcctgtgatccgctactttcagcgatcagtcgccaacgtcttttactccagggagtctacatgcaccgtgtctaacacagacatggagatgatagattatgcgcttacagggattctccgccggacgaagggaagaatgtcttgagaggtgatctcaacaacgcaccaccagtaatgcctctgttgatgcatctgtgtggatacaggaagtgggcgttgacaaacgggaagaagaaggtgagaggagcactatgggtgggtggcgttgtgacgccaattctggaagcttgtggagtcccgctcaaggaaccagggttagccccgaggatgatggacttggatcatttgcgcagatgtgagttcttggagtttgacatggctggcgactttcaccgctacaggttcgagcattcatcgattaaaatcgccaacattcttctcccctgcattgatgctactaggattctcgagggcagaaacattgacttcaagcctgcgcttgaagaactttatttcgagggtagtccgccaactgaggagatcagtcataccgaaggagctacaacagaagatattgatgagacggatgatatagatgaggcggagtttgacacgagcatgtatcatttcagtgagcatataccttctgcgagggaaagcacaagtttgagcgaagctcacaggaacaacagcaagctgcagaagtggtgcatgaaacaggacaagttactcgcctcagggctatcaagtttatcaagaacaagctcagctgctcctcttccactaaagctaaaccgcagggacatctccctcaggacatgctttgaggagatatgacgcgtctgagccaagtcggcgcaggcctgagcccagagagcaggagattctgcatgtccctgcgaggcattcatcattcaagcctcgtgaatctgggaggaaaaggaggaccacactcactcgatctagtagtaggagcagacgacttctgcagtctggtagtttacgcgaccacggtgctggccgcagcagaagaagagaggtcgagtatcatcagagcggtgctggccgccatagaactgatgaggtcgagtacccacctgctggagctgatacggaacaaggcggttcgtttatggcctgtgagcaatcacatgcagccattgacgaccaactacgttcattcttcgactgag

SEQ ID NO: 165321 - DNA, 940 bp, Arabidopsis thaliana landsberg
ctcttctcgcgactcaggctcggattcatatgaaaagtcgtctcttgtagtagctgccgattttcatactaagttctctgagccgagaaatttgtagctatgcttctggcttgatctatctctctgatatgaggatctcagtgaatgatgaagatgtagtgcgtgcgatatgtaaccctatcacgggaaagtatacggtcttacctaaactgagaaggtatgtaaagtcgtatagctatttagggtttgatccgattgacaagcaattcaaggtattgttcatggcttatccatctggtcctgatgatcataaaattctgactttgagaactagaagaatgaggtggaggaagatccattgtcccttaactcatgatcctttttctgaagggatatgcatcaatggggttttatattacttagctatccaaattgatgaacccttggttaacaaaaggtcttttgtgatagtttgctttgatgttagatttgaaaaattcacgttcattgacgtagattgcttttatcatttgataaattataagggaaaattaggtgggattgattggaaatatggtaacgctaatggaagtcgtacctttgagttgagtatgtgggttcttgaggatgtcgagaaacatgaatggtcgaaatatgactgcacttttcttgagcatgaagtcatgttctacaatatttctcttgccgttgggatgactgctacatgtgaaattgttttgccggagaagcttgcatctaactcgttttatgtcttctacttcaatcccgaaagagaaactctccaaagagttgaaatccaaggattggaggatcattgtagagtttacactattacagaccatgtcgaggatcttaatgttaacgatgcaaagcaactcaagtcaggcccatttatcactacgaaaaagcctaaagcaca

SEQ ID NO: 165322 - DNA, 1304 bp, Arabidopsis thaliana landsberg
catgttgtaaagttggacattcttgtaaaagagttttaacaattctgaggttgacggtgggctagtgaagaccagttcagttaaggaagatgacggaagagggaataagtcgaaacgtttatgtggatcagaagatagtatatcgaaggccgggttgaaagaatttttgctgtcctccgaagatgaagaatttgttgcagaacttgaaactgtagaaagagttataggttgtgaacgaggtcctcttgttagtgaaattttatctgaagatcttgatgatgaagatctagtggatgaaggaagcgaagatcttacttgggatgagattatagaagtaaaaccccaatcttatgatgtggagttttggagcccattattggatgaggacatgggtggctcaaatgcattggatataatatgtgtcggggaagaagatgctgatgttagaatgggatttgcgtcaccaacagtagacacataattggtggccagtgtggaaggtgcaggttcgaacatggaaattgatgatttgataacgtcttcgattaagcttccaactgatttacttgcaaacagcagtggaacgggaaaagttgttaacaatagaacaggtgattgtaatacaaatgaaactgcaagagaaaataggaagctgtcggatttggacgatgaagagtttgatattcctcctctgtttgatgacacggagtatgaagctgccataatgccggatatagatagggctgacggtgaagatgtatataaaggaaaagtttatgctagcaagtcggattagctatatatgctattaggcatatgtttcacttcaaacaaacacgcacaaaacttgattcatttgttttaaactgtgccgatgagaagtgtgattggcgggtaacagctcatgaaatgcctgagagtggatattatgagatacgcaaagctaaactagaccatacttgttctgtgaaaactcggaaaatgtacaagaagaaggcaacttcaagggtgatagcagctgtgtataaagcacaatatagtgagcctattaaaggacctgtcccgatggatttgcaaaagctgattcttgaagatttaagagtgtctgcatcatatagcaagtgttatagggctagggaaaaggcagtagttgatgtgttaggggaagatgatgatagcttcaccaaattagctgaatatatggagcttataaagatgacaaacctaggtaatatgacaaacctaggtagtatgaaagaccttgtgacagatattaggaaaatggtatggacgttttcttgata

SEQ ID NO: 165323 - DNA, 1691 bp, Arabidopsis thaliana landsberg
atggattctcccgagtcgaagctcatatcacttgctactcagctcatctctctagacaactcttcggatttggagctcgtatcatgtaatattattcaaataatatctctcgttagctcaatggatttggattcgcagccgaagcccgagacgaagctcatgtcactcatagctcaaacaatctctcttttcaactccatggatttggattccctcccaaagttgttgtcggacctcatgtcattcacttcttacaaattaattcttcttgactctagagattcaaattcggaactagaaacggattctgattcggagcaggaccagggttcggagggtagttcactcgttgtaaaaacatggatcctcctcatatcgctcatccaacatatatttttctggtcttctctatgaattcaaagtggaagaagcctatttcattatgtcctcaagtgcaagtcagattgaacgaaggaaagtttcttgcaaatccaaaagtccggttgagcacgcgtgacaagtgggaatgtctccctgtaaactgggagaaattcatgttatcgggagaagaagagacaacccatttccgctgcggaggttgtaatggtgataatcataaggaaaataaaaaggctccggtggagatcaaacattttcttcattcgaaacattctctccggcttgccttgatgaaggggcgagaaaccagaaaatgctattgatgtgatgaagatctcaaaaaaatattttattattgctcaccttgcgattttgctatgaacattgtttgtgtggataaaccaccagtcttgtttatggactgtccgaagtggcatgaacatactcttgctttgtttccaagaaaggcttcgttaacttgcgacctatgtgccttgacacattcaaactgtcctttttacatatgtccccagtgtgactttgtggatcaaagctgtatcagcttaccccgtgtcataaacatatctcgccaccaccatcgtctcttcttttgaccaaggagattggtcttgtggtgtttgtcgcagaaagatcgacattgattacgggagttattcttgcaaaaaggacggttgtttctatgtggctcattcgaaatgtgccatacaaaaaaatgtgtgggatggaaaggaacttgcgggagagccagaagaaatagaagaagaagagcttgcaccgtttgtgaagataagcgatggagtcatacaacatttccttcatcaacaacactatttgaaatttgatgagaacacatgcaaagattacagcgagaataggcagtgtcaagcatgcattatgccaatctattatggtaaattctactcatgtatgcaatgtgagttcattctacacgaaacatatgcaaaactttctcgcaaactatatcacccgatacatccacatatgctcactttgttgggaggatatgatggtgttgtggactttcttgtggataattgttcagtttgttcttggttgtgcaaagttggtttcttctatgagtgtggtaaagaaggatgtgattttcagctacatgtgcagtgcgccacaatttccgtgccattagtcaatggaggtcatatgcatcctttattcataacatccaaaccaggagagcaacggagaatttgttcgatttgcaaagattttaattattgtcgcacaaatgaaac

SEQ ID NO: 165324 - DNA, 4075 bp, Arabidopsis thaliana landsberg
gatttctggaatgagaaactacaagatggttttcttcaaagaatacgttacgcaatgaaaccagatgaagcctatggacttattttctcttgggacaatgtcgtggtaataattgtttgacaccatctttatgttagcaagttaagttagatgaagtttcttgtagcttatatatattacctacaaaagcttcttcttctagtggggcttataaatattagtgttttcgtttgtttagatgatggctcccctgttattggtaaatctcaaaagttgttggatagaattgcgtggtccatgcatactagttttgggtctattttaggcgctagggcttggcggatttggcaaaagttgtagaataattgcttctttagaatgatgcctgcgtgttagctggtagatctcaagaggtctatagtggaattgcatggtccatgcctattaattttggattcaagagtcgtattttctcaatgttccacttatggtttaatctttgtaggctgatactcgaagtcttaagttggaagcttggaagcagctcgctgcagaagaaggtaagctttattgcgctgctctcctgctcctaaaggttttacccaaatatagtctagtttctttctgcatacgtgtttgtagagatagagatatcttgcaatacctgctcatatatgtttagtgcggcccatgcacccttttaaggaatgttgggagagtgtccagagatatcaatgaactcaaacgttacattaccttctttgaggcctcaattgtttgtttgacgtttcatcttacactgagatgttaacccacttgagcctaagctgatcctcaaaacacattaaccgtatcaaggacgttgccaaatctgtagcatccacggccacagtgcacgtcgttgccctcagcttcaaggcggctcctacaactcgcagcaatcaacaccagtctcaccatttacgccgtggcagccacgagcaaatgctgttatggcgtcgccatacaatgctaacaattggttactcgatagtggtgcgactcatcacatcacttctgatttaaccaatctatctctccatcaaccttacacgggaggtgaagatgtcactattgctgacggttcgggtttgtcaatttctcatactggttcagctttactttcaacaccattacgctctcttgccttgactgatgttttatatgtgcctaatatccacaaaaaccttatctcggtttaccgcatgtgtaacgctaacaaggtgtccgtggaattctttcctgcacattttcaggtgaaggatctcaaaacaggggtccaattgctccaaggcaggactaaagacgagctgtatgagtggccggtgaatccccctaaaccgtcatccttcctcactaccattacaccaaaaacagacctcacttcatggcattcacgtcttggccacccatctttatctactttaaaagctgttgttgctcaattttcccttcctgtttctcattctttaccaaaacaattcaattgttctgattgccttttgaataagacacacaaacttcctttccatacaaattccattctctctactcaaccacttgaatacctatacactgatctttggacatcaccaatagtgtccattgacaactttaaatattatctcgttattgtcgatcactatacgagatactcatggttctatccactcaagcagaagtctgatgttaaaaacgttttcatggccttcaaagcgttggttgaaaataaatttcaacgcaaaatcattcatctctactcggacaacggtggcgagttcattgccctacgctcttttctctccaccaatggcatcactcatttaacaacaccaccacacacgcccgagcacaacggtatatccgaacgaaagcatcgtcacatagttgagactggcctcaccctccttggccaagcctctatgccaaagtcgtattggagctatgcattcaccactgccatatacctcatcaatagaatgccaagcgaagtcattggtggcacatctccatataagcggctctttgaaaaactccgaattatctgaaactccgtgtgtttggttgtctctgcttcccgtggctccgaccgtataccacacacaagctggatgatcgttctgctccatgtgtgttcctcggctattcgctaacacagagtgcgtatctctgcttgaatagaaccactggccgtgtctacacatcccgacacgtccagtttgtcgagaatgcctatccgtttgccaatcccaaactagatcaaatcacaatctttgaagaaacagtcccacaaatcatcaataatcaacctgcagccattccactcccgtcgccaccgctcatacagcttccgtcgtcatcaaccccgaccggagatcctcacccaccgtcgttgccctcaacgccattgaatccgacatcaccaatcacgacatcgtcgaccaatcgtgaatcttgcacaacgtcacatgaagcaaattcacctacaagtccaacaagcctaaattcacctacaattccaacaggcccaaattcacctacaattccaacaggcccaaattcacctactaccacctccaaaagcccacctacgtccaccactagcccatctcactcaagtcagcccaacaacactccaccaacctcaccatcgtcttcttcctctgttccgaatccaactccctctccctcgccatcaccacccccaccactccaaaatcaacactccatgcgaacccgagccaaaaataacataaccaaacctatcaaaaagctaaccctagccgcctctctcaaagccaaatcaaaaatcccatccactgtggctaaagctcttcgtgatccaaactggagaaatgctatgtccgaagaatttaatgctgttcttcgtaatggcacatatgagctagtcccgtcagaaccacaccaaaatattgttggtagtcgctggatttttacaattaaatataatcctgatggctctattgataggtacaaagcacgtttcgttgcaaagggcttcaatcaacaacaaggcgttgattacacagagacattcagtcccgttgtcaaatccacgacggttcggacggtccttgacattgcggttaaccgttcatgggatataagacaacttgatatcaacaacgctttcttgcaaggtcgcctcacggacgatgtttacgttgcacaaccaccaggattcatagatccagacagacccaaccatgtgtgtcacctcaaaaaggcgctctatggtctcaaacaggctccgcgcgcctggtatcaagaattgcgtgggtttctcctcacatgtggcttcaagaactccgttgctgacacgtctctatttgttcgtcaacacaacaaagactacatctacatactagtgtatgttgatgattttctcatcacaggaagtaattccaaccttatcaatcaatttattaaatgcctggctgatcgcttctctttgaaagatttgggtcagctgagttattttcttggaatagaggccacaagaacaaaagtaggcctacacctgatgcaacgaagatatgttctcgacctactcaccaaaaccaacatgctggacgccaaaccggtgtctactccgatgtccacaactcccaagctgactctaacatctggcactcccattgacaacccgggcgaatatcgacaaatacttggcagcctacagtatctcggattcacacgaccagacattgcctttgcggtcaaccgtctctcacaattcatgcacaaaccaacagatcttcattggcaggctatgaaacgcgttcttcgttatctagctgggacaccatccgctggtatttttcttcgtgccaaaacccctttaacacttcatggttactccgatgcagactgggccggtgacaatgaggattatgtttccacaaatgcatacatcatataccttggcggcaatcccatttcatggacatccaagaaacaacgtggtgttgcgcgatcctccacagaagctgaataccgcgccgtcgccaatgct

SEQ ID NO: 165325 - DNA, 2043 bp, Arabidopsis thaliana landsberg
taaagaagaaaaagttaaaggcccaagacaaagaaaagggaagaggcccagcaatgtgagacacaagaactttctgaacattttaaaccaaacaaaacaattctgaacatgcaaaatggcttggcaggtaatcacaattaggtcacggggaagcctacagagaaatctacttcgaatcccaaaatttctcaccacgtgtctttttcttacaaaattcgtctccaagaacgtttagaaacaaatcacaagatttaaaacaaatagtataagggaaaaaagtggagtcacgagaaagagatagggttagaaagcagtagaaacacacatgtgctattcttcgtttcgttcgttatcacatctttggctctctgcttcacttgtccaagattgggaacatgaagtctatatttgtacttactaaactttttgttatacaaattccatgcataaacaaaatcacaacttcagatattttttaggggaaatgtagtatatcttacataattctggtgtttaatcagtaattaagtattttaaaattagtttttagtttttacatatgattagtgattggttgttcaatccatgaatttcattatcgttagaccgttgaaaagttttataaaaaaaacaagagtatatttagacaacaattttattaatggcttctactcttctagtttgcaaaaaaatcagtgacatgagaaatatattttctagattaaaaagtatttggaaattggactatatatagtggacccctatcatttgttcataatgagcttttagtctgcaaaataaatcatctacctgagcttcattacaatcatttctgttttcagaaaatggcaacaaaacttaacaccattgttttctccattgttgtgttacatcttcttctgtctgcccatatgtatgtaagtgtttcaacactcttattcctctattgttcacattcatcaactttatcttatacgtcctgaataaaacacagcctatatacttggaatctcctgctccacaaccacaaccaccaccgtcgcaaccacaactgccgcatcacaataactctcaagtgagtttctccggttcatcacttctcaaaaaaaagagtttcatcgaatctacaaaacctttttaacatcctttgcatcttcttgttgattttgacagtacggtactactcaaggcagtcttcaaccccaaggtaaacccactgactagcctagtttttaatgaatgtttgtgctgaatgcgaaactaaatccgctattccacctttattagagtgcgggccaaggtgtggagatagatgctcgaatacacaatacaagaagccgtgtttgttcttctgcaacaaatgttgtaccaagtgcttgtgtgtgcccccaggtacttatggcaataagcaagtatgtccttgctacaacaactggaagaccaagagcggtggaccaaaatgcccttagtttctcctcttaattactttagcatatataaactccatgtaatttgttaatctacctatcataatttatatatgtattggactcttccataatcacatcagttctttgtgattatgacgttaatcatttcacagtttacagctttaagacatttactagccgtgaatcaactacttaagagttgtgatgtaagctcatcacattgttcgtgaagaatcatacagttgcttcttgagatcaagaacttcgagtgcttttgatgctaacttctcctttagcttagcagatgcctcctcgaacttcctgttcataagttatgattcttgcacagactgcttgtaccgtagactgattgcatctaagcgtgcttgcgtacccctaagtctcatttttagctttgccttctccttgttttctgcagctgcatcctgcaatcatatccagcaaaaatatgaaaactggttatacccgggaagttaaaacatatcgcacacaatcaacaatggctctcgttgaaactgcagtttttcttgcattgattcttttggaggaaaggatcaatctcaatcaatga

SEQ ID NO: 165326 - DNA, 320 bp, Arabidopsis thaliana landsberg
aaggcaataaggactgttcctttgcggacaagatattgacaacaaacctttgattggagctagcaaatcccgctgcaaaccaagccgagaaacaagccaaacccaaaactttcttttcgggaaagagagcaccgccacaaccgtaacccataacctcttctccccaaccaagcaagaagagagatatcgaaactaaccattatttccccaaagctattccgagaacctcgccaaaagccatcacctcatgacatccgggaaagaggaagccaaagacggaggtggttgatggaagctcgggtcagacaaacaatcaaaaa

SEQ ID NO: 165327 - DNA, 479 bp, Arabidopsis thaliana landsberg
ctactttccgacaagtgatatccaacactggaggtgatacgtcatcatctcactacattgctgcaagtgaggctcttccaccttcggacgctggcccttgtcctctttgcggcgtcaccagttgctacgggtgcgcattcccacagcatgaagagattaagcaggagaagaagcataaaggagtgaggaagaagccatcaggtaaataaattttgttccaatgaatatgttatgttccaacatctttgagtttgttccatcggtttataactttactaagttattatcaggaaaatggtcggcggaaatatgggatccgagtacaagaacaaggaggtggcttggaacgtttccgacggcagagatggcagcggatgcttacgatgaggcagcggctgcgcttgtcggaaaaagatcagcgagacgtggctcaaagaagggagaaggaagcattcaccaagaagtcggcggcggagatg

SEQ ID NO: 165328 - DNA, 506 bp, Arabidopsis thaliana landsberg
gtcgttcatccgggtgttgggagaggctggaccggcggaagacgggctggcgctgattcgccaggattgtcctgcagtggccctggtcgacgtgcacatgcccggcatgagtggcatgtagttgcccatgcgggtgggccggtctggcctgcccaggcatatcctcatcctcaccgtggttgacgacgcgcgttttccgcggcgcctgctgcaagcgggtgcccttggttatctgtccaaggcctgtcccgccaccgaactggtggcagccgtgcgttgcgtcgcccggggggaccgctacctcgcgaccgagatggccaagcgcatggccttgtcgtcgctggatgacacggcctctccgttggatgccgtgtcgggacgtgaacttgaagttgccatgatgttggtgcgtggttattccctcaacgtagagaccaaacagctttgcctgagcccgaagacggtatccacctacaagcagcggctgcggaaaagctaggtagtat

SEQ ID NO: 165329 - DNA, 1256 bp, Arabidopsis thaliana landsberg
  unsure (1)..(1256): unsure at all n locations
gagttttgatctcacccatcgctagactctctctcccaaaccctaatntcacttcctctcgcttccacacttcttcttctctgcctcagtctcaaatcgaaggttccatttcgaggtaatcctccatcttcccggaatctacgttttgcgatgatatcattgataaattaaatgtttttgtttgtgggtttatcttactctcatgcaaagtttcgatttttattcgaatccagaagttctcttctgcaagacctgagcatcatccatcctgtgattgcgattgcttccactagtcaaggtacttctttctctttatctgtgatgattcatcaacttggtcacgtcttctaatggagagcatttctcttgaatcaaagtgtaggtcgattagcatctgtttccatgtgtacacaatactcaacttcagtcccaacacgttcacttagaaggagaatcagcaatagaaagaaatcgagtacaaaaccaatccctaatgaatcaaagtttcaagatacgatatcaaagcttccaccaagattcacccctgaagaactctctgatgctataactcttgaagaagacctgtttttgtgtttccatctctttaactgggcatcacaacagccaagattcaaccacgggaattgctcttaccatatcgcgataaggaaactcggagctgcgaaaacgtacacagaaatggatgatattgtgaaccaggtactctctgttcgtcatattggtaacgagactctttacaattcgatcatcgtctatttcacgaaagtcgggaagctgatacgcgcagtgaatatatttagacacatggtgactagtaagaacttggaatgtagaccaacgattagaacgtatcatattctcttcaaagccttgttgggtagaggtaacaactcttacacaagccatatgtatatggagacagtaagacctttgtttcgacaaatggtggatagtggttttgaaccagatgtatttgctttgaactgtttggttaaaggttataacgtgctctcgcttcacgtcaatgatgcacttaggatatttcatcagatgagtgtggtatacgattgtgaaccgaattcgtttacttatgattatctaatacatggattatgtgctcaaggtatgaccattagtgctagagaattgcttagtgagatgaaaggaaaaggcttggttcctaatgggaaatcttatactctcgattatgcttttgcgcttagcggtagattata

SEQ ID NO: 165330 - DNA, 775 bp, Arabidopsis thaliana landsberg; identical to SEQ ID NO: 6260

SEQ ID NO: 165331 - DNA, 504 bp, Arabidopsis thaliana landsberg
attttaataaactgtgtttgtgcattattgcttctcagtgttgattttaatttctttgaacagggtatgactgaaattgaaggggaaagatgtggaatttgcatggatataattattgatagaggcgttcttgattgctgtcagcactggtaaaagcttgttttcgcttttcattgtctttaaatattgcaaagttgctatgggtgtttgttaaggagcagtctggtaatttgtgtctatgtctgttaaatttcaggttctgctttgaatgcattgataattggtctacgattatgaacctctgccctctatgtcagagagagtttcagttgattacatgtgtccctgtaagatgtctcatatttgttttttgttttgttttatctgaacatttgtcatgatttttgttagttggacttttgagtttaggaatgatgagtttttgttttgatcccccccgtgtttgcttcaggtgttggcagctagatcaaatgtggctttggt

SEQ ID NO: 165332 - DNA, 1685 bp, Arabidopsis thaliana landsberg
agggagaaggagaagaaagatatcacaaaaaatttccaaatccccattatcgaaaccatgagttccgtgggagtattttgaaaggaggaaattgatggaaaaccatttttggtatacacattaacacaaacagacaacccaaactcctccaatgaatcactggccatggattctggtggccataaactccctcttcaacctcttttttcataacctagttcacgtatcaattttcataagcgcaatcacattgatggtcatgagactcaagagttttatccattcaattgttcccctcacttccccagcaaaagaaccagtactgatcaagaaggcgaatctttccttgattgggataacccttatatctgtaagcttcctgtagtccttctcttttggtgcaacactgaacaacctgatccagaagattttcggtgtggtgcatgcgggcgtccaacgctcagtgcaacctattatgcatgccttatatgtgaaaaaatgttccacaaagaatgcgtagagtctccattcgagatcatacatccttcccacccttttcactctcttcgacttaccagttctccacagagtcaaaactgcatttgttgtcaccattatttcaacgacattttttatcactgttctacatgcaagctcattatgcatccgatctgtgcgatgaggtcaataccctttgctgtagaccacccaaaaagccattcccaccctctcaccttttaccctgcacaagcttctttagtttcccatttttgtgcctcgattaagaagtttgatcccacatatatttgtatccaatgtgtcttcgcaatccataaagattgtcggggtttcccgcatgtcatcaggatatctcgccaccaccaccgtatatcttttacctcttctcttctatctggaaccttttcatgcggagtctgcagagaacaagttgacaacaattatggtgcgtatgcttgcaataaatgtgatggttattttgttcattcaaaatgtgcaatagatccaaaggtgtgggatggaaaagaactcgaaggagtaccagaagaaaatgataagatagatgatggtgagccgttcaagaggatagctgatggaataatactccacccttttcatagtcaccatctgcaacttgagatctttagagcttatgacgaaaatacgtattgtcgagggtgtgcgcttccgatctatgaaggtcagttctattcatgcatggaatgcgacttcatcctccatgaacattgtgcaaatgctccatgcatgaagcgacatcccttacatccacatccacttacactagttgttgccaccaggggacctggtaatgaggaaggtacatttcaatgtgacgcatgtcatcgtaaaggtactggcttcttctatgagcatcatactgatcaagaaaacatcttcatgctagacatacattgtgcctctattttcgaaccctttcaatatcaaggccatgaacatccattattcctaccttcagaaccaaataaatggggaagatgtcagatgtgcacatacgaatacgttgatttaaatttaaattgcttggaatgcgattatattttatgtttccattgtgctaccttgccataaaaagtaaggtataagcatgacagtcattttctcaagatttgtaatggggaggaggc

SEQ ID NO: 165333 - DNA, 422 bp, Arabidopsis thaliana landsberg
acattttgtttagtttattttgatctaattttgttttaagattttgataaagataagcgtcggtgataccaataaagagcccatcataagtagatgacgagcaatggcttgctaattggattctctattctttccttactctatcagaattcatccttcaatctctcctaaagtggtaagtggctagtggtaacaatcatatcaaacctgtctcatttcttgttatgtttttgttatggtaatgatattaaaatggatatcgaatatttataggataccgatatggtacacggcgaagctagtgtttgtggcatggttggttttaccacaatttagaggagctgcttttatatacaacaaagtcgtgagggaacagttcaagaagtacggcatcctcaaacctaaggtcaacaaattcatcc

SEQ ID NO: 165334 - DNA, 2596 bp, Arabidopsis thaliana landsberg
  unsure (1)..(2596): unsure at all n locations
ttgtaggtttatgcatccgggggttcaagctggataattgatagcgggtgcacaaaccacatgataggggagaagaagatgttctcctcatatgagaaaaaccaagatccccaacgagctatcacattcggggatggaaatcaaggtttggtcaaaggattgggtaaaattgctatatcacctgaccatactatttccaatgtttttcttgtagattctttagattacaatttgctttccgtatcccaattatgtcaaatgggctacaactgtctatttactgatgtaggtgttactgtctttagaagaaatgatgattcaatagcatttaagggagtgttagagggtcagctatacttggtagattttgatagagctgaactcgacacttgcttagttgctaagactaacttgggttggctctggcaccgccgactagcccatgttggaatgaagaatctttataagcttctaaagggagaacacattttaggactaacaaatgttaattttgtgaaagacaggatttgtagcgcatgccaagccgggaagcaagttgggacttatcatccacacaagaacatcatgacgaccgacaggccactggagctcctacacatggacctattcggcccgatcgcttacataagcatcggcgggagtaagtattgtctagttattgtggatgattattctcgcttcacttgggtgttctttttgcaggaaaaatctcatacccaagagaccttaaagggattcttgagatgggctcaaaatgagttcggcttaaggatcaagaaaattagaagcgacaacggaacggagttcaagaactctcaaattgaaggctttcttgaggatgagggcatcaagcatgagttctcttctccctacannnnnnnnnnnnnnnnnnnnnnggaagaatagaactctactagatatggcaattaccatgcttgatgagtacaagacaccggaccggttttgggccgaggcggtcaacaccgcttgctacgccatcaactggttatatctacaccgaatcctcaagaacacatcttatgaattcctcactggtaaaaagcccaatgtttcatattttagagtctttggtagcaaatgctttattcttgttaaaagaggtagaaaatctaaatttgctcctaaggctgtagaaggctttttacttggttatgactcaaacacaagggcatatagagtctttaacaagtccactggactagttgaagtttcttgtgacattgtgtttgatgagactaacggctctcaagtagagcaagttgatcttgatgagctagatgatgaagaggctccatgcatcgcgctaaggaacatgtccattggggatgtgtgtcctaaggaatccgaagagcctccaaatgcacaagatcaaccgtcctcctccacgcaagcatccccaccgactcaaaatgaggatgaagctcaagttggtgaagtagaagatcaagcaaatgagtcacctcaagatgacggcaatgatcaagggggagatgcaaatgatcaagacaaggaggatgaagaaccaaggccgccacacccaagagtccaccaagcaattcaacgagatcaccccgtcgacaccatcctcggcgacattcataagggggtaactactagatctcgtgttgcacatttttgtgaacattactcttttgtttcctctattgagccacacaggatagaggaagcacttcaagattcggattgggtggtggcgatgcaagaggagctcaacaacttcactagaaatgaggtatggcatttagttccacgtcctaaccaaaatgttgtaggaaccaaatgggtcttccgcaacaagcaagacgagcatggtgtggtgacaaggaacaaagctcgacttgtggccaagggatactcccaagttgaaggtttggatttcggtgaaacctatgcacccgtagctaggcttgagtcaattcgcatattattgccctatgctacttaccatggctttaagctttatcaaatggacgtgaaaagtgccttcctcaatggaccaatcaaggaagaggtctatgttgagcaacctcccggctttgaagacagtgagtaccctaaccatgtctataagctctctaaggcgctttatgggctcaagcaagccccaagagcatggtatgaatgccttagagatttccttattgataatggcttcaaagtcggcaaggccgatcctactttattcactaaaactcttgacaatgatttgtttgtatgccaaatttatgttgatgatatcatatttgggtctactaacgaatctacatgtgaagaatttagtaggatcatgacacagaaattcgagatgtcgatgatgggggagttaaagtattttctaggatttcaagtcaagcaactccaagtgggcactttcattagccaaacaaagtacactcaagacattgtgactaagtttggaatgaaggatgccaagcccatcaagacacccatgggaactaatgggcatctcgacctcgacacgggaggtaaatccgtcgatcaaaagttataccggtcgatgattggttcattg

SEQ ID NO: 165335 - DNA, 741 bp, Arabidopsis thaliana landsberg
acagaagatgtggtcctcatgtagtgcttggctcaacacctccaaagatcgtgctgtatccaatgaggaaaaaacaacaacatcctagcaccacatagcaacctactttttcgcaagtcccaagctaacagagatggaaaagagagacctttaatgctgtaaaaagagatgggaaaagatcaatgagggttgttgcaagtttgtaggaagctatgtggctgtaaccaaagagaaaaccagtgggcagaacgataatgatgtggtgaacttggctcactagatcttctacaatgattacaatacaaagttcacccttgagcacaattggggagaggttaggtttgatcagaagtggtgcgtccaatatgctacatacggtaaagagaagcgacaaaaatgtgatgaacactcttccccatcctatgtgcaacatggccttgaagaggatcaacctcgccccttggggtaaaggcagccaaaggcaaagtgaaacccaaagccaaaactaatttggaaggtgatgaaaacaagactatgacagagatgcaaaatatttggtctaattaaggagaaagatttagctttcaaagagaagctacttaatggtaacaagaagctactcatgttaaagagaagctaagtgaagagaagttactagataggctactaaccaaaactgagcttctatctgacatcgagttggctcttaagcacaagttaataactgatatgttgtcctaa

SEQ ID NO: 165336 - DNA, 311 bp, Arabidopsis thaliana landsberg
taataccaaacatattggcgggaaaatatgattttacggttttgacggaaaaatacgattttacggttttggcgggaaaatataattttgcattttcgccgagaatacacgattttacggttttgacgataaaatacgattttgcaattttagcgggaaaacatgagtttacagttttggcgggaaaaaatgattttacggatttgtgaaaacatgattttattgttttggcggaaaaacatgattttacggttttgacgaggaaaacatgattttgcggttttggcgggaaaaacatattaatacggttt

SEQ ID NO: 165337 - DNA, 569 bp, Arabidopsis thaliana landsberg
gttacaaagagtgtttgaaaaaccacgcggctaatctcggcggccatgctctcgacggttgcggcgagtttatgccgagtcccacggctacttccaccgatccttcttctctccgttgcgctgcttgtggctgccaccgtaacttccaccgccgtgacccttccgagaatctcaacttcctcaccgcgccttcgatttcttctccctccggcactgagtcgccgccgtctcgtcacgtgtcttctcctgttccttgctcttactacacctcagctcctccacatcacgtgattctctctctcagctccggtttccctggaccgtcagatcaagatccaacggtggttaggtcagagaacagttcaagaggagcaatgaggaaacgaacaagaaccaaattcacgccggagcagaagatcaagatgagagccttcgcagagaaagctggttggaaaatcaacggatgtgatgaaaagtcggtgagagagttttgtaacgaagttgggattgagagaggagttcttaaagtgtggatgcataacaacaagtactcacttctcaatggcaag

SEQ ID NO: 165338 - DNA, 2162 bp, Arabidopsis thaliana landsberg
cgagagcaagggaatggattctccttgtaaagcttgtgcttttcactagtatatggcagcttgcttcagctcttggttcaatgtcttcaattgcaatttcttatggagaaggtggttctgtattctgtggtctaaagtctgatgggtctcatcttgtggtttgctacggatcgaactcagcaatcctctatgggactcctggtcatctccagttcatcggtttaacgggtggagatgggtttatgtgtgggcttctgatgctatctcatcagccttattgttggggaaacagtgcatttattcaaatgggagttcctcaaccaatgaccaaaggagctgagtatttagaagttagtgctggtgattaccatctttgtggtttgaggaagccaatagtgggaagaagaaagaacagcaacattatttcctcttctcttgttgattgttggggttacaatatgacaagaaactttgtctttgataagcagttacattcgctttcggctggttcggagttcaactgcgcgctgtcctctaaagataagtcggttttctgttggggagatgagaatagtagtcaagtaatcagtttaatcccaaaggaaaaaaagtttcagaaaattgcagctggtggataccatgtttgtggcattcttgacgggttggaatcgcgagtgctatgttggggaaagagcttagagttcgaagaggaggttacagggacttctacagaagaaaagattcttgatttaccaccaaaagagccactcttagcagtggtaggtgggaagttttatgcttgtggaatcaaacgctatgatcatagtgcggtctgttggggttttttcgtgaacaggagtacacctgctcctacaggtatcggcttttatgatcttgcagcggggaattacttcacttgcggagttctcacagggacttctatgtcacctgtttgttggggtcttggtttccctgcttctatccctttagctgtctcaccaggactctgtatagacactccttgtccaccaggaactcatgaactcagtaaccaagaaaactcgccttgcaaatttactggctctcacatttgcttgccctgtagcaccagttgccctcctggaatgtatcagaaaagcgtatgcacagagagatctgatcaagtttgtgtttacaactgctccagttgttcctcacatgattgctcctcaaactgctcttcttcggctaccagtggaggcaaggaaaaaggaaagttttggtcactgcagctacctattgcaactgcagagattggatttgctctatttttggcaccggttgtctcgataacagcggctttatacattaggtacagattgaggaattgtaggtgctcagaaaatgatacaaggtcttctaaagattcagcctttacgaaagataatggcaaaatccgtccggatcttgatgagctgcaaaagcgcagaagggctagagttttcacttatgaggaacttgaaaaagccgctgatggattcaaagaagaatcaatagtggggaaagggagtttctcatgtgtgtacaaaggagtactgagagatggaaccactgttgcagtgaagagagcgataatgtcatcagacaaacagaagaattcaaatgagtttcgcacggagcttgatctgttatcaagactcaaccatgctcatcttcttagccttcttggatactgtgaagaatgtggagaaaggcttttagtttatgagtttatggcacacggctcactgcacaaccatcttcatggaaagaacaaggccttgaaagaacaactagattgggtcaaaagagtaacgattgctgtccaagctgctagaggaatcgaatacttgcatggttacgcttgccctcccgtgattcaccgggatattaaatcatcaaacattcttatagatgaagaacacaatgctcgagtagctgattttggtctctccttacttggtcctgtcgatagcggctctcctttggcagaactaccagcaggaactctcggttaccttgatcccgagtactatcgacttcactatctcacaaccaaatccgatgtctacagctttggagtcctgcttctcgagatcctaagcggaagaaaagccattgacatgcactacgaagaagggaac

SEQ ID NO: 165339 - DNA, 2228 bp, Arabidopsis thaliana landsberg
  unsure (1)..(2228): unsure at all n locations
atgacatggtctttttcacaatatactcattaactgagaggccgagatttgacttatttgctttatacagcctgcacagtgtggaagacccctctaaagactgaactggggacagcaacaatgggaatctgaccatcctcatgacagtacctggaaagagtctcagaagcttcaagttcagtacgcagcttgaccagtctttcagtcatatagccataggggttgaactagtgtccatcttcccattgtgattaacgttctgatttagcatgcaccttcgaattaagtgaatctattaccatgtgaccaagccattgcattactaatataagcatatcacatttcccttttctccgtgccaactgaatttgaattattttccctcaacttaatcacatgttttcctcacggccaaaagtactctcagtgttacatgattaccacaacaaatgatttaaactttgaacttttgaagttatcgagcaacatggcaaatcctggtcctatatgacataacatgagttcctctgcctattgtaaaattaggaaacacaaaaccaanatgattatatctggtattatagtgtggtgtatacatatactcacacaagatatgctcttaagatgataaatgtctaatcttccaagtcccaatatgaaaacgttgatattaatttcccctcaaccccgggagcttcaaattaaattagcagccttagtgtgaaattaaaagatagctaatgaattgcatttcagactttcacctccccactcaagtagctataactccttacagtttcaaatctcttcacttccccaattttgttgtgtataaaaacctcttctccacttcactctttccaccacaaactttctaaaactaatcaacaatggcaacccaaattcttctctgtttcttcctcttcttctcggtgactctctcttcatcgggtcacccaaaaaacttcagtgttgagctgatccaccgtgactctcccctttccccaatctacaacccacaaatcaccgtcactgatcgcctcaacgctgctttcctccgctcagtctctcgttcccgccgcttcaaccaccaactatcccaaaccgatctccaatccggtttaatcggagcagacggcgagtttttcatgagtatcaccatcggtactccaccaataaaggtttttgcgatcgctgacacaggaagtgacctaacttgggtccaatgtaagccttgtcaacaatgttacaaagaaaacggtccaatcttcgacaagaagaaatcctctacttataagagcgagccttgtgactcacgtaactgccaggccttgtccagtacggaacggggatgcgatgaatccaacaatatatgcaagtaccgttactcttacggtgatcagtcgttcagcaaaggagacgttgccacggaaactgtctctattgactctgcttcagggtcccctgtttcttttcctggtactgtcttcggttgtggctacaataacggtggtaccttcgacgagactggttctgggattatcggtctaggtggtggtcatttatcactaatctcccagctcggttcgtcgatttcgaagaaattttcttattgcttgtctcacaagtcagctaccacgaatggcacaagcgtcataaacctaggcactaactcgattccttcaagtctaagcaaagactccggcgtggtatcaactccgttggtcgataaagagcctcttacttactactacttgacgcttgaagccatctccgtcgggaagaaaaagattccttacaccggaagctcgtataacccaaacgacgacggaatactctcggagacatctggaaacatcatcatcgactctggaacgacactgaccctcctcgaagctggtttctttgacaaatttagctcggcggtggaggaatcagtgaccggagccaagcgcgtgagtgatccacaagggcttttgtctcactgtttcaaatccggaagtgcagagatcggtttgccggagataacggtgcatttcacgggtgcagatgtgaggctgagtccgatcaacgcattcgtgaaactgagtgaagacatggtttgcttgagtatggttccgaccaccgaggttgccatctatgggaactttgctcagatggatttcctagttgggtatgacttggagacgaggacggtgtcgtttcaacacatggattgctctgcgaat

SEQ ID NO: 165340 - DNA, 218 bp, Arabidopsis thaliana landsberg
  unsure (1)..(218): unsure at all n locations
aagccatacaaaccatcttacgccgcgagaactaccccaacccttacgaggcattgaaagatctgactcggggcaaacatgccatcgataaaaaagccatccattcatttatcgaccgcttacaggtaagcnnnnnnnnnnnnnnnnnnnnnnnnnnnnnnnnnnnnnnnnnnnnnnnnnnnnnnnatatggatttctgatccagaaatacctaatca

SEQ ID NO: 165341 - DNA, 520 bp, Arabidopsis thaliana landsberg
  unsure (1)..(520): unsure at all n locations
atgagtacatcatccaaatgtctacactctatcacacaacctatcaacacacaggttaaatttttcattattttaaacaatgtagtgttcattcattccacaaagtatatgtaacttctctaacattccggaaccaattctcgcactaattgttagccacgtttcagaagaaggaattgaggctctgaaaaactggattaaatctggtcatnnnnnnnnnnnnnnnnnnnnnnctgtcgagacactatcccgagttcgtttagataaaagccctgacttcatcaacatgtctttgcccgactctgttcacttctcattctactcaaaatgtcttgcaaaacgaaacccttatgctatgtatctccagagcttgaggctaggtttctgttctctcgacctgataggcgccatttcattattgaatgattgaaaagatgtcattcctatagccaaacttctttacattgctctaaaccgctgcgcaggtaatgaagtattagacgctttttatactttcaaa

SEQ ID NO: 165342 - DNA, 556 bp, Arabidopsis thaliana landsberg; identical to SEQ ID NO: 54233

SEQ ID NO: 165343 - DNA, 2883 bp, Arabidopsis thaliana landsberg
acatacattgcaatctgcaggcattgtaagaagcgacttagcggctcaagcgcgagcgggacttcgcatttgaggaaccatttgattagatgtaggaggagaactaatggtaacaacaacggtgttgctcagtatttcgttaaggggaagaagaaagagttagctaatgagcggataaaggatgaagaagtgcttagtgtagtgaatgttagatatgaacatgagaaagaagaacatgaagatgttaatgttgtgagtatgggtttggatcacaggcggtgtcgattcgatttagccaggatgattatcttacatggttatccgttgagtatggttgaagatgttggattcagaatgtttattggaaatttacagcctttgtttgagcttgttgcttttgaaagagttgaatctgattgtatggagatttatgcgaaagagaagcataagattttcgaagcgttggataagttacctgggaagattagtattagtgttgatgtgtggagtggttcgggtgattctgatgagttcttgtgtttggcagcgcattatattgatgaaggatgggaattgaaaaagagagttttgaacttctttatggttgatccatctcatagtggtgagatgcttgctgaagttataatgacgtgtttgatggagtgggatattgaccggaagttgttttctatggcgtcgagtcatgctcctccgtttagtgagaacgtagctagtaaaatcagagaccggttatcgcagaataagttcctttactgttacggccaattgtttgatgtgagctgtggagttaatgtcattaacgagatggttcaagattccctggaagcttgttgtgacacaataaacattattcgagagagtattagatatgttaaaagctcagaatctattcaagatagattcaaccagtggatagttgaaacgggagctgtaagtgaaaggaacctatgcatcgatgacccaatgagatgggactcaacatgtaccatgctggagaatgctttagagcaaaagagcgcgttttcgctcatgaatgaacatgatcctgattccgtgttatgtccatctgatttggaatgggagagattaggaacaattgttgagttcttgaaagtctttgttgaagtgataaatgcattcacaaagagcagttgtttacccgccaatatgtacttcccagaggtatgcgacatacacctccggttaattgagtggagcaagaacccggatgatttcattagctctctagttgtaaacatgagaaagaaatttgacgatttctgggataaaaactacctggttctagccatcgctaccatattagacccgcggttcaaaatgaagctggttgaatactattaccctctgttttatggtactagtgcttcagagctcattgaagatatttctgagtgcatcaaactgctgtacgatgagcattctgtaggatcgctattagcgtcgtcaaatcaagctcttgactggcagaatcatcatcatcggtcaaacggtgttgcccatgggaaagagcctgacgatagactcacagaattcgataggtacattaacgaaacaactactacaccgggtcaagactctaaatcagatctagaaaagtatctagaagagccactttttccccggaattcagatttcgacatcctgaactggtggaaagttcacacacctaagtacccaattctctccatgatggcacgtaacgtgttagcagttccaatgttgaatgtatcatcagaagaagacgcctttgaaacttgtcaaaggagacgggttagtgaaacatggcgttcgcttagaccgagtaccgtgcaagccttgatgtgtgcacaagattggatccaaagcgaactagaaagctcttgaaactctcgattcatcttattttgatctgagtgttgtttttctatagattagatctcagctccagcttgtttgtttattgtctgtacctctccacaacattcatatttatatctacctagctagggcttttgctgtgtaacatgatcatcatttctctgtacaaagttggcttcaatagaatttggtgatagcggtttcagttacttggaccagaatctttgcacacaaaaaattacggattttaaaagacaatggagagtttaacaaacagaaatagacgtaaggaatatgaaattacaaaaagtggttaagaatagaagcaaaagagacgaagagctagtgtgtggaattgcagctttagttcttttggtacttacaaaaaataatctggagtcttgcgagtggtttcgggttcgacttgacgtggagctggatcaaactgaaggaaattctggtccatgttctcaccgatctctagaatcgcagccatgttgccacaacggtagcaatagtttggggcactaaatacagtcacaacgttcttttcttggcaccaattaaaaccttccatgacaagttgatgtgctcttgaaatcagagagagtccattggtgtggttaaactgagtagcgatatcttgtccgaaagtgtagcctgcaccacgaggagatattccccaaccgcatcggtcatctggatcagaccataagagatcacacattggtccttcatgtggaacctagaggcaacacaaacatcttagtctcgttatgtaaacatcaagtaaggtgcatccttttgttggtttggattctggaactaacctcttgaattcgatctaaagatcggatgttgtcaagtgtatctaaagaaggtgaaagtcctccatgtaaacagaaaacctacagaaaaaaagagttctgtagtcaagtccaaaacagcagaaacagagaagagattgtctaaggtagtgaaaaa

SEQ ID NO: 165344 - DNA, 1538 bp, Arabidopsis thaliana landsberg
attctccgccacgcccagcccaagatattattcatacaccgaaactttgagcccttggctcgagaaatcctccatctactatcatgtgacgacttacaactaaacttgctggtcatatttattgacgagtacaattccgctaaaagggtttcatccgaggagttagactacgagagtctcattcagatgggagagcctacgtctccgttggttgaaaatatgttccgtatacaaaatgagcaagatcccatctccctaaactacacgtcaggtaccacggctgacccaaaaggtgtggtgattagccatcgaggagcatatttgacctcgttaggtgtaattattggttgggaaatgagtacctgccctgtctacctttggatttttgcctatgtttcattgcaatggatggacgtttacatgggcaacagcagcgcgcgggggcaccaatgtgtgtatgagccacgtgagtgccccggagatctatgagaacatagaaatgcatagtgtgacacatatgtgttgtgttcctacggtcttcaacattctcctacaaggaaatccgcttgacatgtcacataggtctggaccggtccatctgatgaccggaggttcacctctccccgctgctcttgtcaagaaagttcagcggttagggtttcaagttctgcatgtctatggcctgacggaggccactggtccagctctcttttgtgagtggcaagacgagtggaacaggtttatacttatatatacagtattatatttcacatttcgttaacatttaccaaaaagtaattgaacttattgaaatggatattttttctcaaaacaaattaatagtgatgatttttttttcacttacaacatttacaatattattaagattgatatgacaaaaactattactcaattgaaacagattaacagagaatcaacaaatggagctgaaagcaaggcaagggctaggcatattaagcgtagctgaagttgatgtgaagtacaacgaaactcaagagagtgtcccacacgatgggaagacaatgggagaaattgtcatgaaaggaaacaacataatgaaagggtatctaaagaattccaaagctacatttgaagcgtttaaacacggatggctcaacactggagacgtaggtgtaatccatcctgatggacacatcgagatcaaagatcggtccaaagatataataatatcgggtggcgaaaatatcagcagtgttgaagtcgagaatattctttacaagcacccaagagtgtttgaggttgccgtcgtggccatgcctcaccgtgtgtggggtgaaaccccgtgtgcattcattgtgttacaaaagggcgagactaataaagaagatgatgaatataaatttgtggccagagagaaagaattgattgactattgccgtgagaatctgccacattttatgtgtccgagaaaggtggtatttttggaagaactgcccaaaaatggaaatggaaagatccttaagcctaacctaagagccatcactaaaggtttggtt

SEQ ID NO: 165345 - DNA, 1032 bp, Arabidopsis thaliana landsberg
atggtcaacaatcagattcctggtaacacagttgacggagagggaaacccgatccctccaaaccagacagacgttcctgaagccgccgctctcgcggccctagcagaactaagaagtatgatggctcaacttcagaaaaaggtgaatgatcaagaacaagcaaatcgatctttggcacaacaactcgaagcagctacctcccaaggacagatcaggactacccgtttcggcgcgaggcatcttcaggatcgacgaacagcagcagatctcaacccaaaaaggctcgtgttccacacgcctagcaatactacaaggcccatccgccgaaccgcaccggaaattggaagagatcgaaccgaaccggcaatcttgggaaatcgagaaacgaatcgagcaaagggaaacgatccgcagctccctcctccctgagcagaaattgccaaggctgatcagatcgaggtctcagatgataaagattcggaagagaacgttaggtgggctgaggaatacgccagagaacaggaaataagcgccatcaagctctccctagccaaggcagaaaacgagatgaagctcgtaagatcacagatacacaacgcagtcttctccgtttcaaacatttgaccgcattctagaagactcccacaacatgccattcactcgcaagacctctaacacaaaaatttctgtggcccgagccaagttcaagccggaggagagagacggtggtctctgttatctgttcgtcgaacacttgaaaggacaggctttagattggttctcgagacttgaaggaaattctgttgatagtttccagcaactttcgacactttttctcaagcaatactcaatgcttattgatctgggcacatatgatgccgatctttggtcgctatctcagcaaccaaacgagccgctcagggactaactgaaaaccaagatttgctttatctggtatctgatatcttgtgggcgactagtcgtccttcaacattgacaaaaacgaagcttggttagtgtggattgacaacc

SEQ ID NO: 165346 - DNA, 538 bp, Arabidopsis thaliana landsberg
atgggtttgttgccattggtgaagaaattaggtttcatcatctttcttcttgtttcagcttcagcgtttgctctctgttctgcaggtttgtttcttacttttttttctctctctctctatctacatatttatattcctttgtttgcagcttttctctgcaacttcatgtgcctcctactgagatcagtcttttagaaagtaagataataacattaagagcttgtgctctccacatgtgtgttaatgacgactaaaggagaaaattaacgacatagtatgttacgttagtgttatttggattgattaatcttggatataaagaatagacaagcttaagtccctcttttttttttttttttgtaggccgatcatccattttaatctatagccaagaagatgatcatcccgaggtattcgttttaactccaaaaaaagttgccaactaccgtgcgttgtatatctttacttagtaaaaaaccgaacaaattgataatcaagaacgtagttatatgatttcaagaacaatttttgtacgttg

SEQ ID NO: 165347 - DNA, 1010 bp, Arabidopsis thaliana landsberg
aggatgtctaattggatattacatatgccacgaatttggagaatttcttctcgggttttaggtgtttttctctcaaaggatcgattccaatttttcttcagatctgacgaagatttagaagaaattatgaaaattggagtttggacagaagataaatcgcggtgtcggcatggatagatggattgagaatcctccaattgattatctgaattttcttccaatctggggtcgagtgaggaatatttcggtgaactattatactgaggacacaattaaagagatcacgagctgtattggggaagtgaaggaggtggtgatggactctgaaaaatcacagtttcaggactatgttcgtgttcgggttttgtttcatgtcgccaatccacttcgtaacaataaagaggtacaacttccatctggtgaagttgtcacaatttcttttgagtatgaacggattagaaagagatgtttcttgtgtcaaagattaactcatgataaaaatagatgcccatccaaagtctcggattccatcaaacatgatgtgagatcattacaagagaaaggcaaacagaagaagatgtttttaccgaggctggctgagtttccctttcagtcaattgctcccaaaggaagggtagatgctttgccagcaaatcctctatcagctactgttgcaattgatagtcatccagagaatactttgttagctgagatgctagatttggacattagtactggatttaccacatgtgttggtgaggctagttcctccacttcagggtttaaacatcatataatgcaggatttcactccttttcagttcaggaaagaaaaactagttaatgagctgtctctgaagaataaggttattcagtctcctgcctctcctcattttgaaaaggtgttcaaaaggaaaagaaaaccctcagacattacagaagctcaaagtttcaagagagacaagaatacggtggttccaagtgaaccaccgttggatcagtaaggcgtcc

SEQ ID NO: 165348 - DNA, 2036 bp, Arabidopsis thaliana landsberg
gtcgtgtttcctgtggtgatatatgaggttttacttcagtttgcacatgtgtttgaagaacccaagggcttacctcctgtcaggggccgtgaacactctatcttgctggcagatgacgttactgcagttactgtgcgtccctatcgctatctgcatgcccaaaaggctgtcatggagacataagtttctgagatactacaggcgggtatcatcaggcctagtcatagtctttttctagtcttgtgctcttggtcaagaagaaggacaactctggcggttttgtgttgattatcggacactcaataaagctaacattcccgataaatttccatttcagtcattgaccaactgttggatgacttgtatggagaagtgatattttcaaagtttgatctgagggcaggctaccatcagataaggatgctggaactggacagaagacggctttccgcactattaatgggcactatgaattcttggtcatgccttttggcttgtcgaacgcgcctgctacctttcaaggaccaatgagtgaaatctttcgtccgtatttgcgcaagtttgtcctggtgtttttgacgacattttggtttacagtaaagatctcaagtctcatgcaaaacatttactgatcgtcatgcgtttacttgaagaacatcagttgtttgccaatcgtaagaagtgttctttcgctcaatcacaagtggaatatttggggcacatcatttctgcaaatggggtttctactgatccatccaagaccactacgatgtctagatggcatgtgcctcgcacaatcaagaagttgaggggattttgggggttgacaggctattatagacgctttgttcaacgttatggggctataacacgaccattgactgagttgctgcgtaaggactgttttgagtggagtttagcggcttaggaagcgtttgacttattgaagaaggcaatgacttctgcgccggttctttcgtcaccaaatttacaaaagtatttgtggtggaggcggatgcgtcaggttttggtttgggagcagtgttgatgtaagacaagaaacctatatcattcttgagtcatggtctcacagctagggaacaactcaagccagcttatgagagagaattgatgggtattatcttgggaattcagaaatggaaacattacttgtttggtatcagatttgtggttcatactgattagaagagtctcaagtttttgctggaatagcgtgacgtttctatggattaccagaaatggcttatcaaactattgccatatgatttcgagattctgtacaagccaggcatcgacaataaagtagctgatgggttttctaggatctcacatgcggctcttgcagtctcacagatggatttgtttgcattaatggttccttcagtgttacagttgcaagatatatataaagacattgatgaaagtgatgagttaaagaagttgctgtcagaggattcacagagtttggctcacaagggatatactatcaaagaaaggaagttatggtataagaacagagtggttttactttctgattctaagtttatacccttgatcttggaggtttttcatactagtcaactggggggtcattctggagtatagaagacagttaagaggattcaactatcttttcattggagtggcttggtcaagcatgtgcagaagtatgtatcagaatgtgcagtttgtcagacgcataagacctcagcgttgtctgctgctggcctttttcagcctatgcctattccaagtaaagtttgggaggatattaatatggattttgtggaagggttgccggcttcgcaagggttcaatgctattctggttgttgtggatcgtctcagtaagtatggtcattttgtgggattgcgtcatccttttactgctatagatgttgctactaaatttgttcatgagattgtgcgattccatgggtttcctgagtccattgtctctgacagaaacaagattttcttgagcaaattctgggctgattgttttaagcaagtggg

SEQ ID NO: 165349 - DNA, 155 bp, Arabidopsis thaliana landsberg
atgaaaattaaaaaaaaaaacagaagaaaagtcgatctacatcgacaagagaacccaagagccagccaatgcgggtgatgtgaactagtcgctgccggactagagccaaccaacaccactactggagccggtgatgtcggacagcatatccgaaa

SEQ ID NO: 165350 - DNA, 1312 bp, Arabidopsis thaliana landsberg
tgtattgcgagtctaagctgctcttcgtcgacttcttttactccgatctcgctgtcaaagcgatctcgatgttgctcaatccgccgattctcgtcctaatcgccaatgaagaggaggaagaaggaggagctgaagtaacggagcgttcaaaattctgttacttgtacagcgatctaatcattagagggaatccggattttaaatggatccgacccggaagtgaatgggacccgattgtggtcaactacacatcaggtacgacgtcgtctcctaaaggagtggttcattgccacaggggtatattcgtcatgacgcttgattccctaaccgattgggccgtaccgaaaaccccggtttacttatggaccttaccgatattccacgccaacggttggacctatccatggggaatcgccgcagtcggaggaactaacgtctgtgtgcgtaaactccacgcgccgtcaatataccgtctaatccgtgatcacggcgtgactcacatgtgcggcgcaccaatagtgcttcagattctatcggcgagtcaagaatctgatcagcctcttaagagccccgtcaatttcttaaccgccggttcttctccgccagctacggtgcttctccgcgccgagtctctaggtttcaacgtcagtcacggttacggattaacggagatagccggtgtgatcgtctcctgcgcgtggaagccaaactggaatcgattaccggcgagtgatcaagcgcaattgaaatcacggcaaggagtgagaaccgtcggatttagcgaaatcgatgtagtggatccagaatcaggtcgaatcgtgaaccatgagacggagaaacagttggggaaatagtgttgagagggagttcaatcatgctcggatacttaaaaaatccgatcggaactcaaaattcgtttaaaaacgggtggttcttcaccggagacctcagtgtgattcacggggatggttacttagagattaaagatagatcgaaagatgtgattatttcaggaggagagaatgtgagtagtgtggaagtggaggcggtgttgtacacgaatccggcggtgaatgaagcggcggtggtggctagacctgacgagttttggggagagacgccgtgtgcttttgttagtttaaaacccgggttgacccggaaaccaacggataaggagattatagagtattgcaaatataaaatgccacgttacatggctcctaaaacggtctcgtttcttgaagagttaccaaagacttccactgggaagattataaagtcattgcttaaagagattgccaaaaacatgtaa

SEQ ID NO: 165351 - DNA, 1008 bp, Arabidopsis thaliana landsberg
ctttggattatcaaaaggacgaaagagttgtggattgacttacatgcaaaagccaggtgagctagagaggttactgagaagctgtgtgaagttagcatttggagcatcagaacattgtgttccgatttcaggaaacactacgaacggaactgaaacagagacatgaaccatggctaagaatgcaaccccccccaaaacacaagacatcgtcaaacctttctccattgtaaaccgccaaaagtacaaaagctgcgattggcgtttatgtttatatgtttatgatattttgtgtctccaagaacatttgagatgggaatatataaagggaatagaaagagcgtcatgtggttggaagttgtggccaattaagagttaacaaataattagatgaaaaaatggacgatgctgattggtttttacattctcagtatgaaatggactgtgctgattagttgagatattgcattaacgtttttggtagcattttgcattaacgctctgcttcctagttcttcctctaatgacatctcccgcgttgcctcttttagtacgtgtgtgtatctatgtattttttaacatattactaaggacatttcatattacaattacttataaatccaatcatattgtatttgaatatgtttaacaacaaatttattgtcatgtttttaatactaaaataacattgtaaataggatggatcgaatgtaactatgatgccgtccaaagcaggatggatattacgggacgacaaaggcattttatcttggttcaggtcaagctaagggagtgaagacttgaaatgctcaggaaggtgaatttttaagctctcatcatggcaatgccgaactgtcggagtcatatggtggttacacaagagtcatttttgaaggagacaagaaaggagttgtggacttagtaaatggtaaatgtctatattttggagcctacatttggatcagagaagtacaagtttggaagagaagatttcaggagatctgtttgaat

SEQ ID NO: 165352 - DNA, 1004 bp, Arabidopsis thaliana landsberg
tggagtgaagtacatagccgaggcggcggcctatgctgacatgatggcgaaggagggccatgtaattatttataactgtctccttctaatttatatcttttcgctagttgtgactttctgttttgcttttggtaggcgatagctgccacaaacaagctggttgctctctatgagcagcgtctaagccaggtcccctcgacgaatgagcttgaagaaggaaaggccctcatccgggagctgacgtcaagtgtgaaggctggtcaggatcgcgaagtctcgtttcaggtacacctcggttttgacttgtttataaataattcgtcgatgatttgatgattctgacctgattgttatttcaggcggagatcgagaggctgaaaatggagctgtccacttcaaaagacctcgagaaaggttttggtgagacgatcgggttcatggagacggagatcggggggttgcaagccgacaagcagacgacgaggagccagatccatcgcttggagtagaagagggaagagctctccaaaaaggtggtggacctgacttcgattgcacaaggggagaagaaggcggttcacgatgctaaggttgagctggctgctgcgtattcgaagctgctggctgggatcaaggagaagtgggtcgccaaaaaggagtacacaatactggaggggcaagcggctgaggtggagtcgaacttggctttgatcgacaagatcacaaaggctgctattgatttgaccgtggagagacctcggctgcaagcggagctggatgacctagaggcgcattgcaaatcgaagaaggtatcagacttcactctaagcaagttggatatcctgcaggttttggagatttcggtggtatgtccgatggacgtcgacgagcaagggatgccaatcggcttggatgagtttgggagcaacaaagatacgtttccgagaggtctcgtggagggttctggtattgtctttgctacgccagccgggaaactgaaggag

SEQ ID NO: 165353 - DNA, 2596 bp, Arabidopsis thaliana landsberg
atgtcgggaaataagtacgcaaagtgtgttgacgtaagcgagggagatatgttgactgaagttgtatcgaaagttggaacaacgtttggactagacaggaggaccaaatttcagctgagtttttggttctaaggaggagacactgtttacacgcagcagaagatgtcgcctgtctctgttgacagtgaaagctcgttgaagaaattcaaaaagataaagcaagaaaaaggaggtttgaacatgtatctatctatagacgatgtcgacgtggctgagattacgtcccctgaaataaggggacacaaagacaatagtgttgtagaggtagaagtggcatgatacatgggcgggcgaatgggtgatggtaatagcacgcatgcaattccattgacttatgaggaagacggcttcttagataaaataaatgtgtgtgaaggaactttgaagaggaaggctggtttactagagttgggctgcgcaaagcggggatgagaaaaagaagtggatgtagaattggcaacagagagaagatgatgggcatcagacttagaggacgaattgttaagggaggtatcagattcagatgattatgattttgataatatgagggatatgattgatacagattacccgccggattgggatccttggaaggattggaggaacaacacattgacaagttttgaccgtcagccggggacacaaatgtgtggaacaactttgggggatgagtcatctaggcccaataatatgggagacgatatattcagctctgtcgggggacaaagccgggttgaccttgtcgaagtagaagttgttgagatggaatgggcgatgagagtgcagaaatgtcgattcagctggggcaaagtataatgagagctgaattaccggatacgcaagcgacaacattggaagaatcgttagacaaggactgtccaagatgtttggacaacgtgcatggacaaagcctgcaaggggtaggtatagtggacgttgaggttacaacaatcccagacgttgatgcacaaggtgatagtgagaatggaattgaggataatgatgaagaaaatacgacaatgtctatataattggggcagagggcagtcccaaatatgaggacagattcaatgacagagacgttggatacgtgtgatttggaccctgaatctggagaatatgtaagaccagtggacgttgtagtgacatcgttggcagcaagtgcatctgaagaggaaggacaaagtgatgtagaggttggtaatacaacagtgggggaaatgataatacagcaagggcactggcagaggacatgtcgagaagattaacagacggagagactatatttactgaattagcaggggacgagatgttgatgtgtagagatgccgttccgttcaaggacaacgcagccggggttgcttccgacaaagctaatatgaatcttaggaagggtggcgatgcaatatatatcgggtgggtattcaacaacaaagtcgagttgcataaaacattaactatgtactctatgaaaaggctattcaatttccgtataaaagcgtccgacaagacacgagtcattgcggtgtgcgatgataaaaagtgtgattggagggtatatgcaacgtttcacgagaattctgaaaaggtggaaattcggacggcgactctaaagcatacttgtgatgtcgaggcgcggtctaagtatgggatgaaagcaacacgatcgatgttaggtgagttgcttaagacaaaatatacgcatggtaagaagggaccaagggcctgtgaactaccagaaatagtattggctgaactaccatacatgaaggcttggtacgcaaaagaaatagcaatgaaaaaagctcgtcgtagtgaggaagaaggttataagtttttcgcagacatgtctccacctgttgaggacaactaatctaggtacgttgtccacagtccatacggattatacggaggaagggaatattcgtttcaagtatcttttttttttgcgtttgggcttcgattgttgggtaccagtatttgcggaaagttattgtgatagatggtgcacagaccaaagggaaatacaaaagctgcttagttgctgcaagtggacaagatgaaaattaccaaatattcccattagcgtttggtattatagacaatgaaaacatagcaggttggcagtggtttttcgaatagttgtcacagtttatccctgatgaggaagatctagttttcgtctctgacaggcatgcggccatttatgttgggcttaggacagttcactctcttgcgaagcatgcgtgttgcacagtacatttgttcaggaacgttgtccataatttccagtgtgagggacttgtaaaaatggtctccatgtcagcgagatcttatactgtgggagatttacgatattggtttgaagaaatacataagagaaacattcaatgtgccaagtatttagtagagataaagctatctcacaggacactggcgtacttcccgggtatgcgatacattgtgatgagaagcaatatctcggagtccctaaatgctgcaattcaaaaagccatagatttcccggtagtgacca

SEQ ID NO: 165354 - DNA, 4132 bp, Arabidopsis thaliana landsberg
aaccttctaccacccgacacacttaccgagagggctcggtgggccagaagccaccggagccgccatgaatacagcgttttggaactgtcggggcttaaaagggtccctgctagttcgacgcctcgaagggattaagaaatcttattccccgcacttactctttttgattgagacaaagaatcaggatgacgttgttcgggatgtggcagctcagttggattatgataatgtgaagtgtgtgtcgcctttgggcataggcagtggtttaactttgatgtggaagaagtctgtatcagttaatttcttttcgtttgatgcaagactcattgattgtaagataagtaataaagaaacttctttttatttctcttgtgcctatggccattcgatcagaaagttaagacatattctatgggaaagaattgagagaatcacaatacatagacaagggccttggttaatgtgtggggacttcaatgaaatactcgatgccagtgaaaaaaggggtggtcgtgttcgtcaaaattggagttttgtggattttcgaaatatggttaacacatgcaaagtatcagatcttccattcacaggaaacaatatgacttgggttggcaaaaggaaaactcattatgtggaatgctggcttgatagagcaatggccaatgatcaatggaaagcaagtgtccctgcttctgaggttgagtacttggagatgatagagtcggatcatagaccggctataatcaaaatccgaagaactaccgaacgtggattacgtcctttccaatttgacacacgactctctaaaattgcagagttcgaagacgttgttcaaacaagttggaaccaatttgttgagagttatgatgagtcagtttatggaaggattaagtgttgtcggagggatatctctgagtggaaacgaaatcattgcacaaactctgctataagaataaaaaaactgattcaagctatcgatacggcccactccgacgaccaaacaacaatggctcatatccatggtttacgcaaagatcttttacaagcttacagggatgaagaaaccttttggaaattgaaaagccgaaaccagtggttaaatgaaggtgatcgcaactccaaattcttccatgcggtgacaaagaacagggtggctaggaatagactcacgtcgattcttagaacaaatggggaagtgataagaggtaatgtggagattgcaaaagaagcagtcggatatttcggggatcttttttcaagtacatattcggacccatcgattgttctgaataagatcaacacgatggtgactgaacccatgaatgcagacctattagctgatattaatgaggaggagattcgagcagcacttttttcgatcggttctactcgtgctcccggaccggacgggttcaatgctgccttttaccaacgttattggcatattgtgggacctacaatcattaaagaagtaaagcttttcttcacggccgggaaaatgccagaacaatgcaccccccccaatctatgcctcataccgaagattgcaatcccccaaactatgaaagattttcgaccaatcagcctatgcaacgtcacatataagattatctcaaagatcttatcaaagcggctcaaaaatatactcccacacattatctcggagaatcaggctgcgttcacgcctggacgtctcattactgacaatgtactcatagctcatgaaatacttcactctctacgggttagaaagcggtgtgccaattcatacatggctgtcaaaacagatatcagtaaagcctatgacaggattgaatgggggtttcttgaaggtgtgcttaaaaagaaaggctttgctcaacaatggataacatggatcatggaatgcgtgcgctcggtatccttctcagtccttattaatggtagtccgtatggtcagttcgaggctacgcgaggcctaaggcaaggagacccgttatctccacaattattcatattatgtgccgatgtcttgagctctttgatgacacaagccacacatgagaataaaattagtggcatccgtatcagtaatggcggcccctcagtctcacaccttctttttgcggatgactcgctgtttttccttaaggcggactttaaaaatagcttaaacctcctagctatttttaaggagtatgaatatgcttcgggtcaaatgatcaatttggacaagtcgtctattacttttggtaatcgggtatatcaacagaccagggataatataatgcgcactctgaatattcctaatacaggcgggggagggaagtacctgggcttaccagaacaatttggccgaaaaaagaaagaaatgcttcaatacatccaacagaaagtccaaaagactatagatggatggcaaacgcaaatcttgtcggatgcgggtaaggagacacttatcaaggctgtcgcctatgcaatgccggtatattctatgaactgctttcaatttcccaaagaattatgtcagagattgtagatattgcgagattctggtggggtcaacgaaagaaaaaaagaaaatgtcatggatcgcgtggataaaatggtcataccgaaacgggcggggaggcttgggatttagagatcttcatttgtttaaccaagccttactagccaaccaggtatggaagattctaaaccgaccgcatagtctcatatatcgcatgctaaaagcaagatacttccgggatggaactttcctctctgccactagaggatcgcaaccgtcttacggttggacttctttactcttcggtcgggagctgttgcaacatagactccaaatcagtattggaaacggccagtccacaaatatgggtctagacccatggctcccaacgaatcccccgcgtgccccgatgatgcgacctatgacaggacccatccatgaaggttcaggacttaattgatcctctctccaatcactgggatgagacgaagatacggcaaatgatagaaccagaagatcatcatttgatccacaagatctatttacctcagcttcctaaaccggattctttcatttggagcccaaataaagatggtagatatacagtgaagtcggggtattggactgcactcaatttggccgctgaagatacgtcacctacacctcccctatcaacttctccggatattgcaactgcaatatggaaactcaacataacaccaaagttaaaacattttctctggcgatatgcatctcgggctattggtattgccgaaaatctacgacggcggaacataaacgtggacttgtactgctcctggtgctgcacagagctaaaaacaaatgatcataccttattctcatgctctcaagtcaaaatgatgtggagagttgcaagaattccgacttctcaactttgtgaccaaggaacccccctcgaaaacaatctctgattcctcttccgaattcacaatgacacaatggccgatcaagttacaagactgcccttctgattaatgtggcgaatatggaagagcataaatgatttggtatttaaccgtaaaaggactgacttctccacaacagtggaacttgttctcactaggaatggctggacaatattccactaaaagaacataatcaagggagtcctccatcagctacagattcgtcacatcaaatggggtcgaacagcaagggattagctaaaatgtaactacgatgcatctcatcacttggtagataaagtgtatggatttgaatggattatccgcaattctgaaggaacggttcttgaatgtggtatggggaaatttcaaggtcgaatgacccagagtaggctgaatgttcaacacttacgggaacaattaatacaagccacttgggctttcggttacaccaatgtggagtttgaaggagataacataaacatcaaccgactcatcaacaaagtcttcaactccccgatcacaaagttgtgtccctaactttacgtcaataaagttaactttcaaacacaaggagcaaaacgcatgtgaggatttattagctaagaaggccatcacgtctattactcaatggactatgtttcatacgggtccatatttcctttctcgtcttttacacatggatattacataa

SEQ ID NO: 165355 - DNA, 1251 bp, Arabidopsis thaliana landsberg
atgaatagagaaaaaaactctgcttccatccctaatgatctcattcctgaaatactctcgagattgcctgcaaagtcaaccgggaggtttcgctgcgtgtcgaagctgtgggggtccatgctttgccgttcatatttcacggaattgttcttagcaaggtcctcggctcgtccacgtctcttaattgggatcctccaagacggtgactggtttttcttctcgtgtcctcagcctcaaagcccatatgataactcttctattgttttagcagcagattttcatatgaagttcggtagagccccaagctacgattacaaacgttgtagatatgctccggtcttctctatttcatgcgtatgcatttctcaagtgaggataaggatggaaagcgtgtgatatgtatccctatcacgagaaagtttgagatcttacctaatctgagacgaataacgcaaagacgctttactgagttgttagggtttgatccgattggtaatgaatggaaggtattgtccatcaataatagaggtacctatcatgataacgttcattatattctgacattaggaactgaaaacgtgagatggaggaagatccaaggtcccttcaaccatgatgttcggggtgcagggatatgcattagtggggttttgtattacttagcttacaagagtgatgctcggatatatgttataggttgctttgatgttaggtccgagacattcaagtctatagttctgaactgctcatatcaagcctctactacattggtaaactataagggtaaattaggtgtgattaatttgacgcatgccaatgaacatggatttccccttcagttacgtatgacggttctagaggattttgagaaacaggaatggtcgacatatgtctacactttgatggctgagaatatagtcgttaagtatgtttccgtggttgggatgactgctacaggtgaaattgttttggtgaaaacaaatgcatgcaaaccgttttatgtgttctactttaatacagtcaatccttaggtttcgttgcctgcaaagtcaatccttaggttctacactttgatggctgagaatatagtcgtttatgtgttctactttaatatgtcttattcctgacatactcttgagattggctgcaaagtcattccttaagtttcgttgcgtgtcgaaactattgggagtgagggaggtccattatttcgtcgtcaatattttcccccagttggttccaccaccaagg

SEQ ID NO: 165356 - DNA, 1975 bp, Arabidopsis thaliana landsberg
gccagaagattgggttttagtaaatacaagccctgcggtatctttctgttattagctgatagatcagtcagaatatctcacggagttctcgaagaccttcctgttaaaatcggatcaatagacatccctactgattttgtaattttggagatggatgaggagccaaaagaccccttgatcataggaaaaccattcctagctactgcaggagcattcatcgacgtcaagaagggaaaaatcgacctaaacctggggaagagatgaaaataaccttcgacattaacaaagctatgaagaaaccgacaatcaatagacaagtctttcggatcgaagaaatggattgattggctgacgaattactggaagaacttacagaagaggatcacctggcaagtgccttaaccaacgatggagaagaagggtacctacacctagaaacccaagggtacaaagagtaccttgacgcccacataccaatggaaggaccacaagagtttgaggaattgatcgttccctcaaaagaagcaagatcaggatgcaccatgagcctaatcgctgaaaaaacaaactctactgagatgctcgaccatggaggggagaataaagctcagatgactgttcaaaactcaaagctccaaaggttgaccttaagcctctccaaaaggtctgaggtacgcgtttttcggtccaaatgatatttatcccgttattattaataatggactaagtgatgaacaagtgaaccagttgctaaatgagcttagaaagtataggagggcaattgggtattcattagctgatattaaaagaatttcacctagtttatgtactcataggaaccatcttgaaaatgaatcatatactagtgatgaaccacagaggagattaaatccaaatttgaaagatgtggttaaaaaggagattcttaaattacttaatgatgatatcatctacccaatttctgatagtacatgggtctctcatgttcactgtgttcctaagaaggaaggaatgattgtagttaaaaacgatttagatgagcttattcccactagaactataacaggacacataatgtgcattgattacaggaaactatatgatgcaactagaaaggaccattttcctttgccattcattgatcaaatgttagaaaggctagctaaccatgtgtattactgttttcttgatggctatagtggtttctttcaaattgcaattcaccctaatgatcaagaaaaaaccactttcatctgtccctatggaacctttgcttataagagaatgccttttggtttatgtaatgctcctgggactttctaaagaagcatgacttcgatattctcggattttattgaggagataatggaggtatacatggacgattttttagtctatgaatcctctttctcctcatgtttgttaaatttgtagagggttctagaaaggtgtgaggaaaccaatttagtactcaactaggagaaatgtcacttcatggtttaggaaggaattgcaggcataagatttctggtagagaaattgaagtcgacaaggcaaaaaacgatgtcatgattcagttgcaaccccctaagaccgttaaggatatcagaagctttctaggccacgtaggattttagaggaggttcatacaagatttttcaaagattgctcgacccctcactagattgttgtgcaaggaaactgagttcaactttgatgaagattgtcttaaagcttttcatttgataaaggaagcattggtgtctacccctatcgttcaagcacccaactgggaccatccatttgagatcatgtgtaatgcatccgattatgcagttgggggctgtcctaggccaaaagattcatggtaaacttcacgtcatctactacgccagtagaacaatggacgaagctcaaacaagatatgcaaccacagaaaaggagattagctgtggtttttgcctttgagaactct

SEQ ID NO: 165357 - DNA, 184 bp, Arabidopsis thaliana landsberg
tcttataggtatgaagatggctgctgaaggacaaccacaattgtgcgaaacgaaaagcttaaactacagggggttgtgcttgaaatggaggagttgcaagcgagtatgtattagcgaaggtttccctgatggtcgatgcaaaggattcttcaacaacaaatgtgtttgcaggaagccttgtgct

SEQ ID NO: 165358 - DNA, 250 bp, Arabidopsis thaliana landsberg
tcgttgttttgtggatggatcatggaaagaaagcgataagttttcaggtacatgatggttttgtacatcagcaaccggagagccaccaaacatgggagctgctaatctacgaagaagtctatctccattacataccgaagtcgaagctctactatgggcgatgaagtgtatgattggtgccgacagccaagatgtagcattttttacggactgttcagatctggtgaagatggtgtcttctccaaccgaa

SEQ ID NO: 165359 - DNA, 1627 bp, Arabidopsis thaliana landsberg
ttccttccacaattggcaaaaatgtctatgctttcaaatctcttccccgacaacgcaatcagtctcactccttacgcttacgcagtactcattctcacagctaccttctcgattctatggtacatcttcaaacgctcgccgcaaccgcctctaccacctggaccgcgagggctacctatagtcggaaaccttcccttccttgacccggatcttcacacctacttcacaaaactcgctcaaagtcatggtccaatcttcaaactcaatcttggctcaaaactaactgtcgtggtaaactctccatcgctggctagcgagatccttaaagatcaagatatcaatttctcaaaccatgacgtccctctcacggcccgagccgttacttatggtggtctggaccttgtatggttaccatacggtgccgaatggagaatgcttagaaaagtttgtgctgccaagctttttagccgcaaaactttggattccttttatgagcttcgacgcaaagaaatccgagaaagaacgagatgtttgtaccagaaaggtctagaaaaatcaccggtgaatgttggagagcagttgtttttgacgatgatgaatctaatgatgaatatgttatggggagggtcagtgaaagcagaggatatggagagtgttggaacagagtttaaaggagtgatttctgagataactaggcttttgggtgtgcctaatgtttctgattttttcccgatgctagctagattcgatcttcaagggcttgttaagaagatgcatttgtatgctcgagatctcgatgcgatactcgatcgagccatcgagcagatgcaacggctaagaagtagggatggtgatgatggtgaatgtaaagattttttacaacacttgatgaagttaagggaccaagaagctgactcggacgtccctattacaatgaaccatgtcaaagccgtactcatggtaatgaaattaaatggtttcaatttttatacttaagaatataattatcggagaatagcatatctgttgaaattgacaaaaagtatatatcggaaatgaaaattttgaaatactaatagacaaacacttaaattatatgaaaagtcggaatgataatttcacaattatatttttcattagtattgcagaataatatttgaaattcatgataaggcattagtttttcgattggtaaaatcatgcaaaaataagtttttagtcatttcgccattatgtagattaccaatcagcattagtcgctttagcatttagatgttatttgtaagatgtttatttgctcatgacttaatcaatgtgtgaaggatatggtagttggtggtacagagtcatcaaccaacacgatagagtttgtgatggctgaactaataagtaacccagagttgatgagaagagcgcaacaagagctagatgaagttgtgggcaaagacaacattgttgaagaatcacatatcactagccttccttacatattagccgttttgaaagaaacacttagactttatccaaccattcctttgctagtccctcaccgtccgtctgaaaccgcgctggtcggcggctacaccatcccaaaaaacactaagatcttcatcaatgttgggtctat

SEQ ID NO: 165360 - DNA, 5941 bp, Arabidopsis thaliana landsberg
  unsure (1)..(5941): unsure at all n locations
cgccattccgagcgaacaattggatggaagtcgtagatgaaaaggaattgtttgttaagagaaataagcaagcaaaaccagcagtgacttttgcacccaagaagttcgaacctcgggagaaccgaggaccaaggaagtttggttcacaaccattcaacaataacgttcgaaagcagtttcagggaaaaggaaggtcaaatacttgggttcgagatgaaagcttgtattgtgatatacatagagtcaccggacatctgaccaaagattgtagtgttcttaaaaggcatcttgtagaactatgggcaagtggagatctttcgaaattcaacatggaggatttcgttaaacaataccatgagtcaaaggataattccgaggctcaaaactctaagtgaccaagaccggcttgcgaagaagaaccaagaagttcaaaaggtaaaatcaacgtaattcttggaggttccaaactttgccgtgattccatcagcgcaataagaaaacatagacggaatgttccccttaagtcaagtttaagtgaagaggtagattttcaaggcgcttcaatatcattcgaagaaaaggaaacacagcacctcgaaagacctcacgatgatgctctagtaattacgctggatgtagctaatttcgaggtttcaagaatcctcatcgatactggtagttcggtagatctaatttttcttagcactttggaaaggatggggataagcagggcagatgtggtaggaccgccatcccctttagtagctttcacaagtaaatcagcaatgtctctcggaacaatcaagctaccagttttggcgggaaagatgtcgaagattgtagattttttcgtctttgataaaccagcagcttataacatcatccttggaacttcgtggatctacctaatgaaagcggtcccctctacggatcatcactgcctcaaattcccaactccaaacggagtggaaacaattcggggagaccaagaagcctcgagaaacttgttatttagctagccaccgattgaaaatccaatagcaattaactaagcccgcaaagaaaggagtagtcccgaggtttcctagcgggcaaaaagtggacgatgttgtggtcgaagtaattctagaagcagataaaccggatcggaacgtgcggattggagctactttatccggcgaaataaaagaagctttaatcgagctgttaaggcggaacaagaaatcatttgcctggtcggtagcagatatgcccggcatagatccaaatataatttgtcacgatttgaatgtagacccannnnnnnnnnnnnnnnnnnaaaagagaagaaaactcggagtggagagagcaaaagcagtaaatgacgaagtggaaaaacttctgaaaattggatctataagggaggtacaatatccagattggttagcaaacaccattgtagtcaaacagaagaatggaaaggatagagtgtgcattgactttacagatcctcaacaaagcttgtccaaaagatagcttcccactcccacacatagatcgtctcgtggagtcaaccaccgggaatgaattgctgactttcatggatgctttttcaggatataatcagataatgatgaatcctgaaaatcaaaagaaaacgtcattcatcaaggataggggcatctattgttataaggtaatgcctttcagtttaaagaacgcaggagcaacttatcaatgacttgttaacaaaatgttcaacgcatacctcggagagacaatggaagtctacatcgatgatatactagttaagtctctgaagaaggaagaccatgttaaacatctagaggaatgcttcgtgattcttaaccaatatctaatgaagctaaattcggcgaagtgtacgtttggagtctcatccagggaagaattcctttgttatattgttacaaaacgaggaattgaagcaaatccgaaccaaattaatgcctttctcaacatgccgtctccaagaaatttcaaggaagtgcagcggttgaccggtcaaattgcggcattaaatcgttttatttcaagatcgnnnnnnnnnnnnnnnnnnttttatcaaattttaaagggaaacaaagaatttctttgggacgagaagtgtgaagaagctttcggacagtttaaagcatatctgaccactccacctatattgtccaaaccagaggcggatgagaagctctatctatacgtcttggtctcgggccatgcagttagcgggctcttgatccgagaagaccggggagagcagaaaaaaatttactacataagcaaatccatgacagatccggagaccatgtataccatgatggaaaagcttgcacttgcagtagtaacttcagcttggaagcttcgctcgtattttcaatctcatccaatcgaagtgttatcaaatcaaccgctctgaacaattctccatagcccgaaccaatccgggaggttggcgaagtgggcggtagagttaagtgagtatgatatagagtacaagagccgagtcgccatgaaggctcaagttttggctgactttttaacagaattgccggtattgggcacacaaaagcaaccagagaatcaaatttggaagttacatgtagatggatcttcgtcggaaacaaggatccggagtggggatcaaattggagtcacccacctcggaggtctttgagcagtcattccctttattattcactgcttctaacaatgaagcagaatacgaggccttaattgtagggctcaggttggcacaaggagttggagctgacgaagtggttgcttattgtgattcgcagctggttgttatcagttcaatggagattatgaaggtaaagattcaaggatggaagcatatcttgaagtagttaaagatttggctaagaatatcaaaaaattctaattcattcgcatgcaaagaggagagaatacttttgcgggtgcacttgcagccctagcatcaacatcagatcctgaagtaaaaagagtatttttggtagaatgcatttcagagcgagcattaaggaggaaaaagaaaccttcgtcaatacaaggtctcgagctgcggcacgggatcgtggtgaacccgagatcgaactgctacctgttaagagaagaaaatcaaagaaggtagaagtacataaacccgctacgccaaaagaaagtaacatcgaagaacccgccaatacaatagaagacacggttccagaaaagattatagaagctgaaactgacccgttggtccaagtggatatccttgaaccaaacgagcaccccgaaccggaaacacggatatttcatgaaaccacgaaattcctgctaaagattggggggctgattggagggagccaatacagcattacatcgtgacaggcgagctcccaaagaataaatggcaagctaggaaaatgagaatcgttagcgcgaaattttatctattgaaggatgctttgtatagacgaggtgtcagatccttatctactatgcatttgtggacccgaagtcgagatcgttatgaacgaagtgcactaaggtttatgtggcactcattcttcaggaagggctatggctttcaagattaaaagaatggggtattattggcctactatgatcacggattgtgttaagtacgcccagcggtgtaaacgttgccaactccacgcacctctcatccatcaacctacatagttattctcttctatttctgccccatacccgtttatgagatggtcgatggatatcattggacaagtcaacccgaggtgtacaatatctcttgattttaactaattacttttcaaagtggattgagatcgaagcatacgtaaacatcaatgactcagcggtaaaaacctttgtttggaaaaatatcatatgtcgacacggcgtcccgtacgagatagttagtgacaacggagcacagtttatctcacatgagtttgaggctttctgttcggattggagaattaaagttagttactctactccgcgatatccacaaggaaatggtcaagccgaaaccgcgaacaagacaattctaagcaatcttaaaaagcgtttaaatcatttgaaaggaggatggtatgatgagcttcaacctgttttatgggcgtatcgcacgactcctagacgatcgaccggagaaaccccattctcgctggtatacggaatggagacagttgttccagccgaactcaaggtgcctggacttcgtcgaacagaagctgctttaaatgaagatgaaaattcagcgatgctagacgcctcgttagacatcatcaacgagaggcgagatcaagccttaatgcgaattcagaattattaacaggcagcagctcgatattacaattcaaaaatcaaaagcagaccattctttgtgggtgactacgttctaaagcgtgtgtttgataacaagaaggaagaaggagcaggcaagctcggcattgattgggaaggtccctacattgttaccgaaatggtctggaatggtgtttacagattaaaggccgatagaagacaggccagtccaacgtccttggaaagtggtgaacttaaagaaattttatggttaaagtaacacgtgtttttttacatgaactacggtgtggcttgctcccaaaatgcgtacgtaggcagctcggaaacgagtttagctattaataaataaaaaaaaatttatttaaaaaaaaaggagttcgactctacgaacgaacaaggcaaagaagttcggctgtgcgaacgtacaaagataagaaacaaaattatatttattcaaaagcggtaaagtaaaaacgtcaaagtctcaacatgcgagcacttcgaactaggaaactcttgttgtcttgcaaaacacttgaactccttggccggcgaggtcaagaatgggcatcataaagtccgggatgcgaccaaactcggagattctgagttcaatccaatccctgggatgggagttaagggtatgaagctcccttgatatcacagtgacccttcgtagcatctgattgatcttctttcaaagtttcttattttctgaagaacacttctcgtgttgagccgcgagagctttgatgaaggccatcgcgatttcatggtctcttctgaaaggtccttgatcagcgcacatggagcgcggatttgggatctgaagaaaccacaaggtggagaacgtcctctgtccggcacgtttggaatgtcttcgtcaatcattccgactctagagaagtttggcatggatccaacatcaaagattgagtgacatgactgcaagaagagaaaagagttagatgaaaataaagggaaattagggtgaccatttataggggtcttcatagcccttcaaggatgtgatcccatttgaggtcggagtgattcgcggaacattcacgccgtccagtccgccctgcattcatagcatagctccgaaataaatatttcgaaatcaagagaaataggaaagcttccttaaataaaaatgggtcgaagccataataagtccaaacaaaataaaaaaagagagagagaaagtatttgagtttgggggacattgtaaggaccgcgtcccgggacagggtctcacaaacatttaaggaagaggctcaggaacagcctccttcatcgccagttcagggtttgaagtggatgcttcgttcttgacttctgcctcgaagtcattcttcacccgcttccaggggttgctgtcctcctcctcctcctcgtcctcgctctcggatgggatcacctcgataggagcattcacgggaccagaaacctgacctcgagcacgaagatacatccggatcatggttgggatcttagccacgcaggtgaagttccttcactcccactgaaaggagtcactttccattgctctcaccttcttttccacacaagagattcgggcctcgagcgtctaccttttgaggcc

SEQ ID NO: 165361 - DNA, 876 bp, Arabidopsis thaliana landsberg
agtggacacgaatgtaggtagcaaggaagatagtaaagatttaaggcacgatagatcagtggaggttaaagcaaataaggaagaatccatgaagatagagcgtgacgaagttcaaagaatcgacaaaggttcatcaaaacaagtgatagattctgcttatagcatggatatagatgttcaaaagggaagtggagagtcagtgaaatacaagaaagtcgaaaagaaggaaggaaataaagaagagaatcaagatgcaatcaatactagctcaaagcaagaaggaaaagataagaagaagaagaagaaagagtctaaaaatagcaatatgaagaaaaaagaagaagataaaaaagagtacgtaaacaatgaattgaagaaacaagaagataataaaaaagagacgacaaagtccgaaaacagtaaattaaaggaagaaaataaagataacaaagagaagaaagagtctgaagatagtgcatcaaagaatagagagaagaaagaatacgaggagaaaaaatcgaagacaaaagaagaggcgaaaaaggagaagaaaaaatctcaagataagaaaagagaggaaaaagactctgaagaacgtaaatctaagaaggaaaaagaagaatctagagaccttaaagctaagaaaaaggaagaagaaacaaaggagaagaaagaatcagaaaaccataaatcgaagaagaaagaagataaaaaagagcatgaggacaataaatcgatgaagaaggaagaagataaaaaagaaaagaagaaacatgaagagagtaaatcaaggaaaaaagaagaggataagacagacatggagaaacttgaagatcaaaactcgaaccaaaagaaagaaagacaagatgagaagaa

SEQ ID NO: 165362 - DNA, 505 bp, Arabidopsis thaliana landsberg
  unsure (1)..(505): unsure at all n locations
cacgctcgacgtgacccttttganaattcatcatggcgttttcgaggaagtctccagcaagggtatcggcaaacttggcggcgatgacatcgacgcggccatcgccggcgtgttggccgagcgcttcgcggccaagaccggtttcgatattctcaattcaccctataagcaacagttcatgctcgccgtcgaacgggccaagatcgacctttccacggagcaaacggcgacggcgcgcaaggcggagttggtgccggaacgtcatttgagtctggaagaggagattagccgcggcgacttcgagcgcgtcatcatgccgttggtcgtcaaatcgggcacggccatcgacgaagcgatgaagttggccaaactgcggccgcgcgacgtggatcgcatcttgttggtcggcggcaccannnnnnnnnnnnnnnnnnnnnnnnnnnnnnncgagaagttagccggcaaaaaaccggagaaattcgatcgcgtcgatccgatgacctgc

SEQ ID NO: 165363 - DNA, 511 bp, Arabidopsis thaliana landsberg
  unsure (1)..(511): unsure at all n locations
atggtgtccatgagagaaaacggaagaagctcggctttggagttgtctgcaaaggagaagagaaagcttgcttcttacgcacatagtttgggtgacaaacttaaatctcaacttgtagnnnnnnnnnnnnnnnnnnnnnnnnnnnnnnnnnnnnnnnnnnnnnnnnnnnnnnnnnnnnnnnnnnnnnnnnnntaaactttattgtcacaatctctccaagatttgggtttaggtagtggaatggtggttacattggaatagttgctgtctgatcaatgaaatgtatttgaagttcaatcctgagacttgacttaatcttgatcgattcaatgaataggtgaaaatacacagaacatgccctggagagctagaggacatgattctacgtttggaggaagccactggttcagtatcagtcgggcaaattgcgcggaccgtgaaactttatcgtcctagtcccaccaaattgaaaggcgacgagggcaaaaaacggaatgaagagtagcaacag

SEQ ID NO: 165364 - DNA, 920 bp, Arabidopsis thaliana landsberg
atggcttgttcttacatattaacaccaaacccaaccaaactcaatctctcctttgcaccctccgatctcgacgctccttcgccgtcatcctccgttagtttcaccaacactaaaccaagacgccgtaaactctctgcaaactccgtctccgacacaccaaatctactgaatttcccaaactacccttctccaaaccccataattcccgaaaaagacacttcccgttggaaccctctccaacgcgccgcctccgccgcactcgacttcgccgaaaccgcattgttaagacgcgaacgttctaaacctctccctaaaacagttgatcctcgccatcagatctccggtaactacgctccggtaccggagaaatccgttaaatcatctctctccgttgatggaaaaatccctgactgcattgacggtgtttacctccgtaacggcgctaatccactcttcgagccagtttctggtcatcacctattcgacggtgacggtatggttcacgccgttaaaatcactaacggagacgcgagttactcgtgccggtttacggaaaccgagagattggttcaagagaaacaactcggttctccgattttccctaaagctataggtgagctacatggtcactctggaatcgcacggttgatgctattttacgcacgtggtttattcggtttattaaatcacaaaaacggaaccggagttgctaacgccggtttggtttacttccacgaccggttattagctatgtctgaagatgatctaccttaccaagttcgtgtcactgacaatggcgatttagagaccatcggaagattcgatttcgacggacaactaagctccgccatgatcgctcacccgaagattgatccggtaacgaaggagctatttgcgttgagctacgacgtcgttaagaa

SEQ ID NO: 165365 - DNA, 822 bp, Arabidopsis thaliana landsberg
aagaagcccttttcgtgattctgggtctcaagagattgaaagaagacgacgagaagctggacaagtttataaaaacccatgttttcagattgttgaaattagacatgttagctgttatcggtgagcttgaacgacaagaagagactgcgttagccatcaaggtgcgttctttacgtgacaatttcttctgggtctttcagcttatgtctcgcttcagcttatctttagtttgatctcatgtgctcatgaagtgttcgacgaaatgcctgaacggagctaacattagggtagttatattgtttaagttttagaccatcctttatagatcatatacgtatattcttatggttttgtgtcgtttttgttgtgttgttgatgattggtttcttcaacttatagatgtttgaggtgatccagaaacaagaatggtaccaacctgatgtgtttatgtacaaggaccttatagtatccttagcaaagagtaaaagaatggatgaagcaatggcgttgtgggagaaaatgaagaaagaaaacctctttcctgattctcagacttatactgaggttatcagaggatttcttcgagacggatgtccagctgatgctatgaatgtgtatgaagacatgttgaaatctccagatccgccggaagagttgccgtttagggttttgttgaaggggcttctgccgcatccgcttcttagaaacaaagtgaagaaggatttcaaagagttgttccctgagaaacatgcttatgatccaccagaagagatatttggtagatgctgaggtttgtatgcacataactttactcttctatct

SEQ ID NO: 165366 - DNA, 412 bp, Arabidopsis thaliana landsberg
gtgtctggcttgggacttatccgacggcggagatggctgctgccgcctatgacgtggcggcgttagtcttaaaggtggagacactctcttgaacttcccagattccctgggatcttaccccgttcccctttcctcttccgcagctcatatcagatgcgctgcagccacggctgctgccgctaggggtgcggctggagcggccgtaaaggtaggtgaaaagaaggaagagaaagtttgtgatacggcgggatcttcaactacggtgtttgtggatgaagaagagctattaaacatgcctagtttgctagcggagatggccaaagggatgatggtggctccgccatggatgggatctcctccgttagatgattcgccggagaattctgatggagagagcttgtggagctattga

SEQ ID NO: 165367 - DNA, 1194 bp, Arabidopsis thaliana landsberg; identical to SEQ ID NO: 7560

SEQ ID NO: 165368 - DNA, 686 bp, Arabidopsis thaliana landsberg
ctccattgtttagtgttggaagaaaaaactcaagcaacctgttgatgttgcactcgtgttcattggcagagaggtaagagtttatgtatcattatgagttgactattcaatttatctaaatcaactggcgttaagagcatctttcttgctaatatttagatgtcatgaacattggctactgtgatttctactgctcctttacttagtactctcttctgtttacagttattgtcttcagatgtttcttcaaatcagaactcggatcctgtccttgttaacacattgaaggtaagtttagttttatatttatagtgtgaaaatcgttgatgtgttacatattgtaaggtttgctttcaaatgtggattgttacataacttgaagaagtgtgtgtattgttgtctttatcgaaaatgtttgtagtacttgtaaagttgtaataattgagaacgttgaagaaagacccagagttttaccagtattaactcttccgaggtttaaactcttttttcaccttctcccatcatgttatttactttgaccattactgttttttgctggtcattaaatcatgcaggcacacatacatacaccaatatgcatattaggatgaaccccacgagaaatgtatttaatgttgcagagtcttaatagtgaagacccatatgtcttgcaagttgcgacccat

SEQ ID NO: 165369 - DNA, 595 bp, Arabidopsis thaliana landsberg
cttggacttttctctcacttttggtctcttggatatgaatctcctactattttttcttctctccaccgtttcagttttcgccgttgtctctggcacggtggaggagacggcccgtgatgttattgatgcattggctcatgccccttttgaagaatggtcatcggttttcatagaaaccaatgaccggatccgcgccgaggttatcccatctaccctcttcatcccaaactcttccgccaacgggagcgatgatagacataagttggcttcataccacattgttcctcagaggcttgagtttgcggatcttctcttgaagccaagtagatcgagactaccgactcttctcaacggctcctccattctggtaaccaacaattatgctacttctttttctatggacggcgttctcatcatcgaacttgacatctacgtggattccttcatagccatccatcgtattgcatatccgcttgattacacaacttacggcggcggctctaagcttatatcgaaatgaccgctcttcacctttatgcttgttacggttgtgtggttcatttaatcatagtgatatgaatagattgtgctcatt

SEQ ID NO: 165370 - DNA, 3262 bp, Arabidopsis thaliana landsberg
ctcttcactgtttcggttctccaaaaagctaaagagtttaaaacccttacttcgaaacttggcaaaagagagacttggaaacttggttaagaagacaagagaagcctatgacactttgtgcaagaagcaagagtcaaccctaaataatcctactcctaacgcaatgaaagaagaagtcgaggctcatgacagatgggaacatgttgcaggactagaagaaaaatttctcaagaaaaaatcaaagttacattggttggatgggggagataagaacaataaggcgttccacagagcggtggtcactagagaggctcagaactcaattagcgaaattcaatgccaagatggtagtgtgacagcaaaaggggatgagattaaagcatatgcagagcggtttttcagagagttcttacaacttattcccaacgagtatgagggagtaactatggctgatcttcaggatttactaccctttagatgctcagaaacagaacacgagttgttaactcgtgtggttactgctgaagagataaagaaagtgttattttctatgccaaatgacaagtctccggggccggatggattcacttcagaatttttcaaagccacttgggagattcttggtaatgaatttatcttggctatacaatctttcttcgcaaaaggctttttaccaaagggtatcaacactacaattttagctctcattcccaagaaaaaggaggctaaagagatgaaagattatcgtcccatctcttgctgcaatgtgatctataaggtgatatccaagataattgccaatcgactcaagctggtgccccccaaattcatagcaggaaaccagtcagcttttgtcaaggataggttactaatcgagaatgtgttgttagcaacagagttagtcaaagattaccataaggactcaatctaaagccgttgcgctctaaagattgatatatccaaagcgtttgactcggtccagtggtccttcctaacaaatgcccttcaagctatgaactttcccacggtttttatacgctggattactctctgtattagtacagcttctttctcggttcaagttaatggagagttagtgggttattttcagagtaaaagagggttaaggcagggctgttctctatcgccatatctctttgtaatgagtatggacgttctctccaagctgctagaccaagctgctactgaaaagaaatttggttaccacccgagatgtaaaaaactaggcctcactcatctcagtttcgccgatgatctcatggttctctctgacagcaaggtacgttctatagatggcattgtggaagtttttgacgtttttgcaaagttttcaggtctcaaaatcagtatggagaagtccacaatctatctagcaggggtaccggaggaattatatcatgagattcaaaacagatatcaattcgatgttggtcatcttccagtgcgttatttggggcttcctctcgtcaccaagcgccttaacgcagcagattatagcccactacttgaacatataaagaagaaaattggatcttggactgcacggtatctctcttatgcgggtcgtttgaatttgataacgtcggttatatggagtatatgcaatttttggcttggagctttccgtctgcctagagaatgcataagggagatcgataaaatctgctctgctttcctctggtcaggaccggatctgaatcctcggaaaacacgggtatgttgggaagttgtttgtaaaccaaagcaggaaggtggtcttggtttgcgatctttaaaagagatgaatgaagtcagttgcttaaaactgatatggaggattgtctctcatgctaactctctatgggttcgctgggttgagaagtatttactcaaacaagctaccttctggtcagttagaaccacaaccaatttgggttcttggatgtggaggaagctgctaaagtatagagataccgcaaagcatttctgcagggctgaggttcaaaacggagaacgagtgtccttttggtatgagaactggtctaatctaggcatcttacatgacatattaggagaccggggacgcactgatttggggatcacctcacgcatgacggtgagtgatgcatgggttggccgtcaacaacgtcgacatcggacggtcgctctaaaccagattgaagaggcgctaaggtcacagtaccaaaaccgcgtggcggccgatgacagaatcctttggagaggacgaaacaatgagttgaggccaaaattttccacgagagacacatggaaccagcttcgcacaacttcagctacggttacgtggcacacgggaatatggttcgctcatgccacaccgaagtattctttctgcacatggctagcggtgcaaaacaaactcactaccggcgataggatgctcaaatggaacaggggactgtcatcaacttgtgttctctgtaacaacactatggaaacacggaaccatctttttttctcctgctgctactctgcagaaatttggagcaatctagcaaacaatatctatcaggcgaagttctcaacaagttggtcctctttagtaacctctctcagtacttcttggcgggacagtacaaagagttttctagcacgttatatcttccaagcagccattcacaccatatggcatgagagaaatggtagaagacatggggaacgtccaaatacagcagctcaattaatccgatggcttgacaagcaaataagaaatcaaatatcaaccatcaccgcaagtggagactatcgatatgagaaggctctccagttatggtttcaatcaagatcttaagctttcaaatctctttataacttttctttctactctctaagtataagttgcacttgatgtacaaatgtttgtttactttttgaatctaatttaacattaaatttaaaaaaaaaaaaaaagaaatggtatggcgtcgagggggattacaatgttttagtgatggatttgcttggtggaagccttgaagatatcttttgtcattgcaacaagaaatttagtttgaagacagttctcatgctagctgatcaaatggtaatatgctttggatttaattcattgtcgctgttaatggtgttttggatttaaccaacctgtttattaaacattgtgtcagattaatcggctcgagtttatccattctaagtcgtttcttcatcgcgatataaaaacggataattttcttatgggtttgggaaggctggcaaatcaggt

SEQ ID NO: 165371 - DNA, 404 bp, Arabidopsis thaliana landsberg
tgttgctgcccaatgccaccgtggccgaagtgatcaccatgcccacgcccgaggcggtcgagggcgcgccggactggctgctcggccggattgcctggcgtggctggcgcgtgccgctggtggccttcaccaagcttgccggcgcgaaggaaggcgatgccgaactggccgtgcgcgtggccgtgctcaaggcgctgggcggcaacccgcgcatgccgttcgtggccgtggtcacccagggcttcccgcgcctgaccacgctgaacgcagagctgatcatccccacccacgacggcaatcccttgccggcgggcgtcaaggcgcaggtgctggtgcgcgacgacgtggcggtgatcccggacctggaaggcatcgaggccgaactggtccagttgctgggcgtg

SEQ ID NO: 165372 - DNA, 1168 bp, Arabidopsis thaliana landsberg
caataaaaaaggaaacttgggctaggatctgcttggaatcattcagtttttgatattattggttgtgatgttggagatgcgattactccgggtatggacaatctactggaaaggtttgtcctttaccccatcaatctgattggtctgatgatccattatgagttttaggaccaactctcaaaaatctttctttctcttaaatgattgattgtagccgagtgagcataacacgtatgctgatatcgaagctgtttataagtgtcttgaagaaacctttggctctaagcaggaaggtgtcatcctctacggccaatctgtaggcagcggcccgactttagatcttgcttcccggttacctaacctacgagccgtggttcttcatagtgctattgcttccggacttagagtcatgtaccctgttaaacgaacttactggttcgacatcttcaaggtattacatacatcattcttagatggatcattttcgattgtcttgctttcctctatctttttcacagtgtccacttttaacaatatttgcagaatatcgacaaaatccctcttgtgaattgcccggttctcgtcattcacgtgagttccatattcattttactctcttttcctttttttcagttcgaaaactgagtgtatataactctttgtggttcttctcttgtggcagggaacttgtgatgaagttgttgactgttctcatggaaaacaactatgggaactctctaaagagaaatatgaaccgctttggctcgaaggcggtaaccactgtgatctagaacactatcctgaatacattaaacaccttaagaagttcatcacaaccgtagagagagatctctcctcgagggcgagcacggcccaattagagaaacagagcagcgatttggaaatgccgaggcagagcgtagatagaagagagaagccgaggcaaagcgttgataaaagggagaaagagaaacctccaaagggtccttcaaagaagagtaagctgagaatcacgttcgagcagcacttagatcggactaggagaagcgttgacttccacgtaaaggcaaggaagagcgttgaccatcatcagcatcatcagaatcatcatcagattgagagaggaaggaagagtgttgatagattggatagagtacggtctgagtaa

SEQ ID NO: 165373 - DNA, 495 bp, Arabidopsis thaliana landsberg
ctttaaacaccaggtacctttcagaaccctaatcatgatactttcacaaaactatatgtatatttacataaatatatttaatcggcatgacattttgtgattaattagttctttttgttgggtttataggttgtgaatttacaagcagaacttgagattctaaagcaacaagcagcacaaagcatgatttttgctgattcaccaacatcagaaaaccctaatagttactatggagacactactaaggctccttatcatcatgatcatcaaaatatttatcatcatcatgatcagacccatttggtttaccaaactggaagttctgggacggttcaacacggggatgccacagagagtagttaccacaacgaaacctcctcaggcatgggggaattctccatctactctgacttggaacaacacctgaacactttcaatcaggatcatctcaaagagcttcaatcagcaaattttggctacatctccttctcgtga

SEQ ID NO: 165374 - DNA, 546 bp, Arabidopsis thaliana landsberg
tttagtcggtgaggtttttatgcgtttgtgtggttccttgttttgtgtcgtgcgtcttagtgttcattagttttgtcattttcaatatcaattttatatatatgactctgatttatgttaattaatctatgtatatttttcgagacttggtgggagcgatctatgatgttggagaattgattaacacaagacctaagcaaaacaacgtcgatgatttgacgctaacattcaaaataagtgacaatgagtaagtttccttctttgatagtttaattcgaattatctaaattatactattctcataatatttttgattttatgtttagaaaccgtgttttggaatgtctagctactaagaagcaagctcttgactttgatcataattatcgtcgatatggtggtggagttattgtcgctgttcttggttggtggaagattgaccgttattttgatggtccaaagaacatacgtgtttgcaccgcaggcccgatatcaaccgtctttccagatcctgatattcccgagtctaacgagatccatgagatg

SEQ ID NO: 165375 - DNA, 556 bp, Arabidopsis thaliana landsberg; identical to SEQ ID NO: 15875

SEQ ID NO: 165376 - DNA, 1162 bp, Arabidopsis thaliana landsberg
gcaaaaggcaagaaccttttgattggagctaatttcgcctctgcagcctctggttattacgatggcacagccaagctctacgttagtaccatagctcttatttcgtcctctaacagcaaaattaaactttagtagataaaaacgtcttcttacttattttcattgttggttatgaagagtgcaatatcgttgccgcaacagctagaacattacaaagactacattagtcgaatccaagaaatcgcaacctcaaacaacaattcaaacgccagtgccataatctccaatggcatctatatcgtcagcgcagggagcagcgacttcatacaaaactactatatcaaccctctcctctacagagaccaatcacctgatgagttctctgatctccttatcctctcctactccagttttattcaggttattttttctccatttttcgtttgtttgtttaaataatgcttaaatgagaaatccgatagaatgatttgagcaatatcataaacttagatggtgtaatcggaataagacagtcaaaatgttgatcaaattatggtggcgggaatggtaatattgttgagatagttaaagtgtaattttgttctgtttttgttttgttttggggattctgtagaatttatattcgttaggagcaagaaggatcggagtgactacacttccgcccctcggttgtttaccggcggccataactgtagtgggtccacatgagggtggatgctcggagaagcttaacaacgacgcaatctccttcaacaacaaactcaatacgacgtcacaggatctcaagagaaacctcattggactcaatttagtcgtctttgatatctatcagcctctctatgatcttgccaccaggccatcagaatttggtatttatacatacatgtcaaagcatataaaacaattcttactaacatcctactaataagtgtgtatttaactttcaggatttgcagaggcaagaagagcttgttgtggaacagggttactagagacatcaatactgtgcaacccaaaatcagtaggaacatgtaacaatgcaactgagtatgtcttttgggacggatttcatccaacggaagctgctaacaagattctcgctgacaatctcttggtctctggcatctctctcatctcctga

SEQ ID NO: 165377 - DNA, 1323 bp, Arabidopsis thaliana landsberg
  unsure (1)..(1323): unsure at all n locations
gaatcaagaataggcctcgagcagaaatccaattcccactctttgatgctatccgcatcggattcaggatccagatagctcagctctgaagttggatcatcttcttctacttcattagctacctcttgttcttttgtaatcgacagtgagctctcaggtaacgatctagagacgaaacggcagcgtttcatcagagtttcggaggagaagagatgatgggttttgatgggtttagtaaaagaagagggtttagggattctcggaagtgatggtgtctggattcgccttgtgttaaagcctaacgtcgccattgaaaaggagtaggctttaggaagaaagcagaggaagaagaaaaagaaatgatttatccttttcggttactccttcctcatccacaaagatatttcaataataaaataagttttttttttgtttggctccttattttttggtggtcacttatataaataaaaaaaacttcaaacccaaaacaaagcttaaatttgaagaaacaagtttttgtgatcatgatgaaaaatggtattgagctattagtgagacgagtttcagcgatacctcaacactctatttcttctagcttccattttcttcctcaattttgcacttcttcttgtgcatcgcccagttccaagctattcatcgnaggttaagagtattgtaacaaagtacccacatttacatatgtagatgataatgaatgatttttgatacccgtaagtatgcaggattgtcctggtctgtggatgagcaatctctcaaagacgctttctcttcctttggagaggttgcagaaggtatttgtcatttctaaactcttccaggtgttcgatgaaaagcctgaacgagtctttggttatgacttttggttatctaatcgtttgtaggatgtgttaatatgagtttataggatttgggttgaagagctcttactctctcacatgaagtgcttgagttgcaatttcatttagattctttaatgtgtcaaatataaatgtgttctcagttaggattgcgtatgacaaaggaagtgggagatcaagaggatttggttttgttgattttgcagaagaaggtgatgctctatctgcaaaagacgccatggatggaaaggtaaaaccaaaaaaagaaaagaatttgtgttgctatcattatgaatggtttctgaagagattctctctgttacagggattattgggtcgaccgttgagaataagttttgcccttgaaagagtgcgtggtggtcctgtggttgttccacgtcttgggaaatcgaagagagaaagagaaagagtcttcaagtga

SEQ ID NO: 165378 - DNA, 517 bp, Arabidopsis thaliana landsberg
  unsure (1)..(517): unsure at all n locations
aaccattgccctgaggaccctaccctgctgaatattcgctatcctggtccatacgcccgaattgctgaagaactgcataacttaggcgcaaaacgatcgccaaaaccgtctgcgttatgcttttgtggtatatgataaaaacgccaaccgttatgccggcagcagcagttttggcagcattagccggcacgactgcaggctcgagatcggctggacctggattggcnnnnnnnnnnnnnnnnnnggtctcaaccggcacatgaaactggtgatgctgcaattcctgtttgagaccctcggcctcgaacgcgtggagctgcgcaccgatgagcgcaacaaggcctcgcgaacggccattaccggaattggcgctaaatttgaaggcattttgcgcagccacctgttaatgcccgatggacacaggcgttcttcggcttattacagcatcctgaagcacgaatggccttatatcaaaacaagtattttcaagcggtaagaccatggtaaaacagcagat

SEQ ID NO: 165379 - DNA, 702 bp, Arabidopsis thaliana landsberg; identical to SEQ ID NO: 42405

SEQ ID NO: 165380 - DNA, 415 bp, Arabidopsis thaliana landsberg
aggcgctcagcgtggtggtggacgccctgttggacaccttctgttcggttgtcaggtcgcgggcatcgaggcacggggattcatcctggccgccccggtggccttgcggctcggagcgggattcgtcccggtccgcaagaagggcaagctgcccgcggtcacgttcgaggagtcgtaccagctcgaatacggcagcgccaccattgaggttcatcaggacgcgttcgcgccgggggatcgggtgctgatcgtggacgacgtgctcgccaccggcggcacggtccgggccacggccaacctcgttaccaagaccggcgcggatgtcgcgggcatcgcggtcctgatggaactgtcgttcctgaacggacgcgccccgctggagggcatcggggtccgttcccttcttacggtctga

SEQ ID NO: 165381 - DNA, 1399 bp, Arabidopsis thaliana landsberg
ttatgagatcgttaaagaaggcccttcacacaaatctttatttcaatcgactgtgatactggatggtgtcagatatacttctttgcctggattcttcaatcgtaaggctgcagagcaatcagctgccgaggttgctctccgggaattagcaaaatccagtgagctaagccaatgtgtttcacaacctgttgtaagcacctcatctttcttatttcgctcgtgattattgttaagttcactgcaaaactattgaacctagcctaggggtttagcagcgaattgtagctttgccatctcagcagtagtccttatgcttagtttgagcgttgaaggtttaaagggaagctcatggttagtttcagagttgaaggtttaaaggggagctgtgagaatacgttagggggcattctgtatttgtctaggctcttggttggacaatgatcgagattcaagagtttaaagaatccactcattaataaagtgtcttctgtcttatcggatttatgtgtattgccaacttctagagggaagattcttaggctgtttctgtaagttattgctcttgtctaactttgaatggcttattaatgcagcacgaaacgggactatgcaagaacctacttcaagaatacgctcaaaagatgaattacgcgattccattgtatcagtgccagaaggtcgaaactcttgggagagttacacaattcacatgtactgtagagattggaggcataaagtacacaggagcttcaacaagtatctaaaaaagatgctgagattagcgctgggagaactgctcttttagcgatccagtcagacactaaaaacaaccttgccaactacaacactcagcttactgtactttcttgtgagaagaagacaatacaggcagctatcccacttaaagaaaccgtcaagactcttaaagccaggaaggctcagttcaaaaagaaagctcagaaaggaaaacgcacagtagctaaaaatcctgaagatattatcatccctcctcaacctactgatcattgtcaaaacgatcagtcagagaaaattgagacaacgccaaatctggaaccttcttcatgcatgaacgggttaaaggaggcagcatttgggagtgtggagacagagaaaattgagacaacgccaaatctggaaccttcttcatgcatgaacgggttaaaggaggcagcatttgggagtgtggagacagagaaaattgagccaacgccaaatttccaaccttcttcatgcataaacgggttaaaggaggcagcatttgggagtgtggagacagagaaaattgagacaacgccaaatctggaatcttcttcatgcatgagcgggttaaaggaggcagcatttgggagtgtggagacagaagcaagccacgcataac

SEQ ID NO: 165382 - DNA, 637 bp, Arabidopsis thaliana landsberg; identical to SEQ ID NO: 20512

SEQ ID NO: 165383 - DNA, 1208 bp, Arabidopsis thaliana landsberg
acagtggttgagcgcggagtccaacatttagatgtggagtctcttatggatcgttctggccgagattacatgactgagctgaattataacagcaacacattggtgtctttgaagcttgcaaacgtagggattatggatttggatcccccgcttggtgtttctcttccttgtctcaagagcatgcatcttgcagacatttcgtacgatgatggagaaactcatcgcaggttgtcctgttcttgaagactttgccttaattctgcctgatgatgagcgccacaaagctatgccttctctgcgtgtgaggtctcagactttaaagagctttctgttcgcgtttgagtttaataccactggtaaagcttttgcagttgagattgatgctccagcactcaagtgtatgactttcagtgatagtcaatctgataagattgtgttgaagaatctgaattctctttccatggtcgatatcaatagtgactttcatcttaagtatgggaaaactttgggtccaagaaagagaaacgttatccgcgattttctcattggtatctctagtgtgagacatatgatcatctctaagcttactctagaggtaatatatattcacttccatgcatacttctagcattcaaatatagtttaatgatcttccttgatgtaaatttgtttctttctttcgtgtaggtcctctttcgatattccaaattgggacggaaatttcccaaatttgataacttgactcgtttggaagctacactctctagatccatgttagaactatttccatcctttcttgagagcttcccgaacctgaaacacttaatcttggtaaaaaaacttaaatgattttggcgtaacaacattgtggctcttgtggatgtttataattgaatacctagctttacttttgttggtgttttcaggaaactgaatgtccagtggaggtgatggagaagtttgaactcgtaaatgtgcctcggtgtttcgtatcgactcttgaacatgttgagataaaaggattgtttgactggggggaacaggatatgaaaatagcgagttactttctcgaaaactcagcagtcctcaagaaactgattctgagtttcatgggttgtcctcaacattattcggaatcagatatctacgaggaacttaataaactcacaaaacgttctccgagatgtcaaattatcattagatgctga

SEQ ID NO: 165384 - DNA, 3239 bp, Arabidopsis thaliana landsberg
  unsure (1)..(3239): unsure at all n locations
atgaaagttttaacctggaactgtcaagggctcggaaataaggcaacaatcggttatcttcgggatttgtggaaacaacatcggcccgattttttatttcttatggaaactaaacaatcttctttatatatggaaaaatttgttggtcattttggttataaaaatttgaaaacggttgatcctatcggttgtagtggtggtttagctctttattataataatgattttaatgtttcaattatttttcaaaacaatcggttaattgatattgaagctatttacaaaggtaaaaccattaatcttatctttgtttatggagatccggttcaaaaaaacagagaacaagtttgggagcggttaacgcggattggtgtatcgcggtatactccttggtttttgataggcgattttattgaattaaaagaaaacaatgaaaaaagaggtggtaaattaagacatgcatcttcttttataccttttaagttaatgatagaagattgtggactcttggaatttcctcatctcggggattggttatcttagcggggatggagggataaaaatccaataaggtgtcggttggatagagctttagctaatgaagattggcatgaattatttagtaattctttcatcgaagaaaaccctttttaaaacccaaaatggtagcttcagatcacgcaccggtgatagccacgattgcggaaaagaaaccacgtgggaagcggaattttcggtttgataaaagatggattggtaaagaggggttactagaggcaatttctaaaggctggaatcttgatactagtttaggagaaagaaattttgtagacaaattgtctaattgcagacgggctatttcaaaatggcggaaaaaattacccccttacggacggaagacaatagaggatattaaatctgaattaagtgcggggcccccaaacaaagggatgactcgagaacacgggaggagattacagatttaacattacggttaaaggaggcttatcaagatgaagaacaatactggtatcaaaaaagtcggagtctttggatgacgttaggggataataactcgaaatattttcatgctttgaccaagcagagacaggctaggaatcggattaccgggttacatgatgagaatggtaagtggtctgtagaggataaagagattcaacatatagcggtgtctcattttgagaagttgtttactacgactaagcctcaggactttgaggaatccttggcagaggttcaaacattgatatcggattaaaccaatgaatttcttacgggacccacaacagaaagtgaggtgcgtgcggtattatttataatgcatccgaagaaggcaccaggcctgatggtatgaccgctttattctttcaaaaagcctggaatactataaaaacggatttattagttcttgtaaactctttttttcaaaatggagtttttgataaacggttgaatacaactaatatatgtttgattccaaaaacggagagaccgactcggatgatggagttacgtcctattagtctttgtaatgttgggtataaaattatttcaaaaattctttgccaaagattaaagacagtcctaccaaatcttgtttcggaaactcaatctgcatttgtagaaggacgtctgatttcggataacgtccttattgctcaggaaatgtttcatgggttaagatctaacccatcttgtaaaggaaaattcatggctattaaaaccgatatgagtaaagcgtatgatagggttgaatgaaactttgttaaggaattattaaggaaaatgggtttttgcgaaaaatggatatcatggataatgtggtgtcttacttcagttcagtatagagtccttcttaatggacaacctaaaggactaataataccataacgggaattaagacaaggagatccgctttctccttacttattcatactttgcacagaggtgctaataccgaacatccggaaggcaaaacaaggaaaattgatcacaagtatcaaagtagcaacatcgattccttcagtttctcacttgttatttacggatgatagtcttttcttttgtaaagctgataaagaccgttgcggaataatattgggtatcctaaaataatatgaagcggtttcgggacaaatgataaattttgcgaaatcatcgattcagcaggcataaagtagacgaagctataaaggcagaaataaaatcaaccttggctatacataatatcggaggtatgggatcctattttgggctacctgagagtttagggggctctaagacaaannnnnnnnnnnnnnnnnnnnnnnnnttatagactagattaaatgggtggtcggttaaattcttatcgaaaggagggaaaaaagtgatgattaaattggtagccttggcataaccaacttatgtgatgtcttgctttaggcttccgtaaaaaattacttcgaaactaacaagtgcggtcgcaagattttggtggagtttaactggggaatctagaggtatgcactagatggcttggaataaactgtgtagtagtaaatcggaaggtgtcttaggttttagggatgtagatgattttaattcagctttattagaaaaacagttatggtgtctaattttattctcggactctctttttgcatacgtttttaaagggagacattttaggaaatccaatccgttggaaaatattaaattatattctccatcttatggatgaagaagtattgtttctgctcgatctctggttaacaaaggacttattaaaagagtcggttttggggcgtccatttcagtttaggaggatccgtggattccaactcaattcccgagaccagcaaaaagtaatggctcagttattgatccatgcctaaaagttcaaagtcttattgacactcgaacaaatttctggaagattgacttattaaatgagctttttgtcccagaagatgtttcacaaataagtgctcggcacttgggagcgacaactacggagaatactcttggttggcacttatcaagagtccacgatcatattcatgttaaatctgatatatcaacgagcgaggcgagtaactttggatgaggacgtttccttaagtgggccagtcatcaacgccttaaacgttttcatttggaaagtgcagtgtccgagcatcatgtgtcattttttgaaaaacacgctaccggcttgtgagccggaaacaaacaatttc

SEQ ID NO: 165385 - DNA, 721 bp, Arabidopsis thaliana landsberg
gtttaaacttgcccaatgcatttcacacgaggatatttgtttcatccaaaaaatcatggcgctggactaaaaacatgtaactattgggtatgtgttaaaggagaaaattacgcggattcatctgatgaagcggatttctacggtaccttaactgatattatagaactcgagtatgatggcatcgtcaatttgaaaatcacactttttaagtgtaagtggtatgaccctgtgattggtagaggcactcggcgaagccatggtggtgttgtagacgttctatcatttaagaaatacaataaatacgagccatttattctaggtacgtaattaagaatacataaggttctttataaattattaaataattttgtatatttattaatgtataatttgagtatacagcatcccacgcagatcaagtttgttatattccgtatccatatacgaagaaaccaaagaacatttggctcaatgttttaaaagttaatccgaggggaacatttctggagaatatgaaaacaatgatccaactcttttgcaaacataaaatgatgatgatgttttgctcactacaattgaagatcttgtacttgaaaatccagtatccaacttaaacccaataatccttgattacgatgtcggggatgctgaacaagaagacgaagtccgatgtaatttatcgtcttcggacgaagatgaagtagaagatgaagatgtataa

SEQ ID NO: 165386 - DNA, 3197 bp, Arabidopsis thaliana landsberg
gcgtcgtcgtcgtcttcaatggcgctgaaatagtaccaacagatcatatcagaccttctcgaggactctaatggcggattagtaatcctttcctccggtctctccctcgctaaattaatcgcttctctcctcatccttcactctccgtcgcaaggaactctacttctcctcctctcccccgccgctcaatctctaaaatccagagtcatccattacatctcctctcttgattctcctactccaactgaaatcaccgcagatcttccagcgaatcagcgttactcactttacacctccggttctcctttcttcatcacgccgcggattctcatcgtcgatctgttgactcaacggattccagtttctgcactcgccggaatcttcatccttaatgctcattcaatttccgaaacctccactgaagcattcattatacgaattgtcaaatccctaaatggctctgcttatatacgcgctttttccgatagaccgcaagctatggtttccggtttcgccaagactgaacgcaccatgcgtgctctcttcctccgtaaaatccatctatggccaaggtttcagttggatgtgtctcaggaattggagcgagaaccacctgaggttgtggatattagggtttcgatgtcgaattacatggtgggaatacagaaagctatcattgaagtaatggatgcttgtctcaaggagatgaagaagactaataaagttgatgttgatgatttgactgtagagagtggtttgtttaagtcctttgatgagattgtgaggaggcagcttgatcctatttggcatactttggggaaaaggacaaaacagcttgtttctgatttgaagactttaaggaagttgcttgattatcttgttaggtaataatagctctgtctctcttctctgtagatcagtaatgttcttatgcaaaaccttcaagttggtatttctgtgtaggtatgatgctgtgagttttctcaagttcttggatacactaagggtatcagagagctatcggtctgtttggttatttgcagagtccagctataaaatatttgattttgcaaagaaacgagtgtatcgtctcgtgaaggcaagtgatgtcaagtcaaaagaacatgttaagaataagagtggtaaaaagagaaattcgaagggcgaaactgactctgtagaagcaggtaactaattcttgatctataatggttgtattttgcatctagtgacatgtgtgttataagcattcgaaaaatttcctgataattggacttgaatcagttggtggggagacagcaacaaatgtggctactggcgttgttgttgaagaagttctggaagaggcaccaaaatggaaagtcttacgtgtgagtgactgagtgagtttcagtttcaatgccgtttctctgttactgttctttcagtgatggaagttggtttagctagtgaccatatatattttctttgttttttgaccttttgatttggccgccacactctatgattgaccaacatgttttcatggattagccatacgtcacattaaacctaatggtatgcctgtgtttaatacaggaaattttagaagagacacaagaagaaagactaaaacaggctttttctgaggaagacaatagtgacaacaatggaatagttcttgtggcttgcaaagatgaacggtcctgcatgcagcttgaagattgcatcacaaacaatccacagaaggtccagccagataactacgttttgtcagttttacatcattcattaacaaccgatatgaaccctgtcactactaaccataactttagaagccaacatccaatttcagatcttctctggcccacgcaattcttcttattttacctacacttgtgcaggtaatgcgggaagaatgggaaatgtacctgctgagcaaaatcgagctccgcagtatgcagacaccacaaaagaagaaacaaaagactcccaagggttttgggattcttgatggagttgttccggtaacaacaatacagaactcggaaggtagcagtgttggcagacaagagcatgaggctcttatggctgctgcgtcttctattcgcaagctaggaaagacaacagatatggcttctggaaataacaacccagagcctcatgttgataaggcttcatgtaccaaaggaaaagcgaaaaaggatttaacaagtctccagagatctttaagaagttgcaataagaaaacggcaaacagtaaacctgaaatcttaccaggcccagagaatgaagaaaaagctaatgaagctagcacgtcagcccctcaagaagccaatgctgttcgccccagcggtgctaaaaagctaccgcctgtgcatttttatgccttagaaagcgatcaacctatactagatatcttgaaaccctctgtgatcattgtctaccatcctgacatgggttttgtcagagaacttgaggtgtacaaagcagagaaccctctcagaaagctgaaagtttattttattttctatgatgagtccacagaagtgcagaagtttgaagcaagcatacgtcgagaaaatgaagcatttgaatcattgatcaggcaaaagtcttcgatgattattcccgttgatcaggtttgaaactcaattcccaacatttcaaatgaaacgaagcctgtgtgacttttgtttcctgctttaaagtttacagttttgatttgaaagtacattagaacaactcaattagtggtagcgttgctaaaacaagttaatattattaaactgaatcagaccaagtagatgaaacgattaaccagaatttacgttatcttctggattccagtttctttttcctgctttcttctcatccatcctgtgctataaacttggaattaggacgggctctgcatggggtcgaattcttctacagagtttccagcttcaagtacacaaaactcattaacccgaaaagcaggcggaagaaaggaagtggagaaagagacacaggttcgtatctcaagaacgatatttttccccaagattaactagatttggtaaagacttcactttatggaaatgtgtttttcaccaggttatagttgacatgagggagttcatgagcagcctgccaaatgttattcaccagaaaggcatgaagataataccagttacactagaggtcggcgactatatcctatctccttcaatacg

SEQ ID NO: 165387 - DNA, 1460 bp, Arabidopsis thaliana landsberg
gtcgggacacacctggggtacaactctacgaccatggttggtgcggcttatggatatagttggaggaatcttcgacgtattggcaccattgagatcttctcgtctcttaggcttaatagcttcgtatctatccgtcaagatgagatccgacggctcataatttgtctagcgaaaaactctcaacatgtaagtacgtacgattttaacatatttaatcactgtctcgtcgtctcgattggtaaaactttttataaaatacgttgggctacaaagtataacatagttactctagatttttagataccaataaaaatatgtgaacctttaaatttaaccatttggttaaacaattgcaatttcaggggtttgtgaaagtggagatgaaaccattgtttatgtgtttaactatcaacaacatcattagaatggtggccggaaaaagattctacggtgatggaacagagaacgacaacgaggctaaacacgtgagacagctaattgccgaggtagttgttagcggcggcgcagggaacgcagcagactacttccctatccttcgttacgtaacgaactatgagaaacatgttaagaagttagcaggtcgtgttgatgagtttttgcaaagtctagttaacgagaaacgtgtggagaaagtaaaaggtaacacaatgatcgatcatttactttgtctgcaagaaacccaacccgagtactacacggacaacattatcaaaggaatcatgctcgtgagtaacattttaagttcattagtcgattgtcacatttggtataaaataataattagttttgttttatgcttgtatgcgtccaatgtgttgaagtctcttatactagcggggactgatacatccgcagtaacattggaatggacattgtcagctttgttgaaccatccacagatactaagcaaggcgagagatgaaatcgataataaggttggcctcaacaggcttgtagaggaatcagacctctcacatcttccttatcttcaaaacattgtgtccgagtcgttgcgcttataccctgcgagtcccttgttggttcctcacgtagcatcagaagactgtaaagtagggggttaccatatgccacgtggaacgatgctattgactaatgcatgggcaatacatagggatcctaagatatgggatgatccaacgagcttcaaaccagagaggttcgagaaagaaggggaggctcagaagctattggggtttgggctaggaagaagggcgtgtcctgggtccggtctggctcaacggctagcgagcttgactatcgggtctttgattcaatgttttgagtgggagaggataggagaagaagaggtggatatgactgaaggtggaggaggagtcataatgcccaaagctataccgttggtagccatgtgcaaagcacgccccgttgttggtaagatcctcaacgagtccgcttga

SEQ ID NO: 165388 - DNA, 552 bp, Arabidopsis thaliana landsberg
  unsure (1)..(552): unsure at all n locations
acacagtttatgtctctggacaaattggtgcgtggaatccgctcttagcatctgatgtatggctggcttgtctcgagtcacggacctccgcaagctgttgaagcagccggctgtgtgggcagtgcacatatctgatatgatatgggatatgacttagccaatgcgagtcgtgcaagatgccgaagcggcagatccttgacaaatcgatacttatggtgctgcctttgatgccgctgtaggcctcgtgccaggcaccaaaaactttgcttcggannnnnnnnnnnnnnnnnnnnaacaagtcatgaagaacatgggcgcaattctggaggctgcaggctgctcatacaggacgtcgtgaagactactattctgctcgcagacatgaacgactttgctgcggtcaactcaatctacgggtcctactttactgagcaaccgccagccagggccactttcgcagtcaaaaccctcccgctcaatgcgagggtggagattgaggcactgccgttgtatcttaaagttgttcaaccgctgaaaaacatacacttgtga

SEQ ID NO: 165389 - DNA, 3843 bp, Arabidopsis thaliana landsberg
atgttgggagtccaaaactctcctaaagggaggacggtcacagatactgcaggaccttctactggtgatgctagagaaataatcaaaaagaaacaatctaaacagcagaaccctccaagatccaacaactctctgcttgcgtcgagttctgcacctcctactcataccatcatccctgcaatggtcaaaaagaaggtggattttcaaagtccacctcctcctcttccttaaagatagctagctggaactgttgtggtttgggaaatcccatgacaattcacagaatcaaggagatgcagaagaccatctccccggatataattttcctcatggagacaaaaaactcaaatgattttgttctcaaggcgcttaaatgtttaaattacacggaatctctgctagctgctccctatagtcctggtggtggggggctagctcttctctggaacacaaacatagccatcaaagttctatcagagagtcagaactttattgatactaccattgaagcggaagggcgtaccttctttgcaactttcatttatggtgaacctgataaaaccaaaagaaaagccatctgggacaagctaacggagcgtgggaaagatagaattgatccctagttccttataggagacttcaacaaaattattgactccaatgaaaagtcaggtggtcctacgcgccctgaaggatcctttgtggacctcagaacctttatgtccacttgtgacctctttgatcttcgccactcaggtaacttcctatcctggagaggcaaaagaaatgatcatgttgtgttctgcagacttgacagagcaatgttaaacagtgaatgagcagttagttatccctcaggcagaagtgaatatttacctttcgaagggtctgaccatcgaccaatcatcactttctttgacctaaaaatagaaaaagagaaaaggtctgttcagatatgatagaaggctcaggaatatccaggaggttatcagaaaattttcactacaaaaccaggagaaagaaggtcagtcatagctgcagccctacaaccttgcatctcagatgaaaccaataggaaacttacgagaatgccaactgcaaaagagataaaaactgcttgcttctccatccatgctgacaaagcccctggtcctgatggcttctctgcaagtttttttcagactaactggcgcacagtaggagctcaaatcattctggaaatacagaacttcttctcctccggaatcctgccaaggaacattaacactacccatgtcagactgatcccaaaaatcacgagtccaaaaactatgaaagattataggcctattgccctatgctctatctactacaaaatcatagcaaaggtactcaccaagagactccagccaattcttcacttcctgatctcagaaaaccaatctgcttttgttcctcaacgggcgattgctgacaatgtattgattacccatgaagctctacactacctacataattcaaaggcaaaagaaagatgctttatggccgtgaagactgatatgagtaaggcatatgatagagttgagtgggatttcattgaactagttatggagaggatgggcttccacagtacttggatcaattggatcatgcaatgtataacaacggtctcttactcttacctccttaatagatcggctcaaggttcagtgataccacaaaggggcattcgccaaggtgatcccctatcacccttcatttttatcctctgcagtgaagttctctctggtctctgcaacaaagcccaagaaagaggtgatcttactggcattaaagtggggaagaacaatccaagaatcaaccacttactatttgcagatgatacgatgttcttctgcaaatctgaccctcaagactgtgaaactcttatgctcatcctgcagcactatgaacaagcttcaggccagtttattaaccctcaaaagtcagcagttactttctctgcaaaaacatgtgtagagacaagagatagagttaagctactactcggaatccaaaaagaggggggcttgggcaaatacctaggtttacctgagctctttggtagaaagaagaaggatttattcaccctgattgtcgacaggattcgccaaaaggcttgcagctggtcatctagattcctatcttcagctgggaagttgatcatgctgaagtctgttctagcagcaatgccaacctatacgatgtcctgctttaaactaccctgctctctatataagcgcatccaatctgctttgacacggttctggtgggattctagtatggacaagaagaaaatgtgttggatctcctggctaaacttaacaaaatctaaaggagagggaggacttggtttcagggacttacaatgctttaatgatgctttgttggcaaaactaagctggagaatactcacaaagccgcagtgccttcttgctagaacccttcttgggaaatactgccattttacgccattcttagattgtaaaccacctgcgaccatttcacatggatggagaagcatatgtattggtagagatctactaaaacggaagcttggtaaagtcattgggtgtggcaaacaaacctctctgtggcaagaaccgtggctatccctacaatctcctatcacccctatgggccctcctcatgcatcctcacacaagtggacagtatcgcagctcatttctcctacaacacttgagtgggacagaggtctaattcagcaaaccatcccagaatttgaaatagaaattcttgagatccatctaagtaagcttggagcagaggactcttatgcgcggctccctgcaaagaatggggcatactcagcacgctccggttactatgaaagcataaggtcaattccattaagtccccaacatgtgtctccggtgactgatttcaagtggaccaaagaaatttggaaaattaacacttcaccaaagatgaaatttttcatgtggaaagctatgagaggatccttaccagtcggagaaaacctgcgccttagacagatcaatgaagaagcgagatgccctttctgcggagaggaggagtcatctttccacctgttcttcacctgtcgttttgctacatgaatctggcaaaacgcgccttttaaacagcccttggatcccaataccactgtgtcctttagggatctaattgagaaagttaatctgagcgtttgcctcccaccaattggcgtaggaacgggacctctcctaccgtggattctctggtcgatctggctttctaggaaccacttaatcttcaaggatcgcctcagctccccctctgaaactctggctcgagcaatcagtctagcacgagagtggcttttagctcagaatacaacccagatccgacctctgcagcaaaccccagggaaaatcatttcaatctcaaacaacactactatctgccaaaccgacgctgtctggaacaaagaacataaattggttggtttaggatggattttcaatcccaccatcactgaaacaagtaggattggatctaattcaagaaggaatgttcgatcacctcttttagcggaactctcgccatccacgaagctctctgccatgcatcgactttgggtatccaaaacaatgcaatagcgtccgattccaagcagttgatcaacgcaatcaatttgggggatctccattggaactccacgagattctacacgatatcctgagtttatcttctacttttctgcaatctagtttttctttcatctctcggaaacacaatcgcgaacgtgatgagattgctaagtgttccttaaaacaattgtaccggacccggtttagtggt

SEQ ID NO: 165390 - DNA, 1722 bp, Arabidopsis thaliana landsberg; identical to SEQ ID NO: 64405

SEQ ID NO: 165391 - DNA, 414 bp, Arabidopsis thaliana landsberg
acttcttctcctctctctctactccaagttttcagaatgacattcttcatcgaagacactagtctcatcatcagccacgttctctacaaaacggcacttatcatcaccgttttacgatggatctttgcatggatcctccgttaccgctcaagatcatcatcatcatcatcatcatcatctcaatcgtcctcttctccttctatttcatcacaaaccatcaaagaaagcctagccgtgtccgctttccgcgacgcggtggagagatctcccgcggcgataaacgacatgtgtgccgtgtgtctaggagatcttgaagacgaggacgaaatcagagagcttaggaactgtactcacgtgtttcatcgtgattgtattgaccgatggctagattatgaatgttgcggcggtgatgat

SEQ ID NO: 165392 - DNA, 1534 bp, Arabidopsis thaliana landsberg
  unsure (1)..(1534): unsure at all n locations
actatggcgtcttctttcaagaaggatgttatggcggaaagactctacaaagacgctgaagatctcatcgctaaaggaaatcacatcaaggccttggagatacttgaagatttgatttcaatccattggaatgccaatgacgcatggcttcttcatatcgaacaaggtaatgttttcgtagacctagctgaaaaagcagaggaccgtgacatggaagtcgcatacttgttgggttgtgttgcttgcttttcgcaacatgtgacggtatttgaactttgtgcacaatcactcttcatgttgggcagaaaccttgcgtctgtgtcacattacaagaaatgcttgaagaaagcaagagaggctttatctgatagtaactctaagaaactgagttcttctactccagtggctttccgagccatagtatcccgaaagaagaaagacctcgagggttttatcgaagatgcagagtccatgatcgctgcttccaagacttctcctttacaaaaacctgagccaaaagttcgggacccagagaaaactccagagccgtctaaggatgattttcagcggtttaggtcctattgggtgggattgggtgttaagatcaaaagggactttctgaaagtaagcattgcaaagcttacaagttttgtcgggggaatacgtaaaagaaaggcacaagaagctttggagcaagctctcgcttccaagaaagacagaaaatggacattctggatgtgtagaactaaatgttccaagaggtgctctagtgttgaagaatgtaggaagcattttgaacaacaacacgatgcagatttcaaaccttcttcagaaaaggatatagtcaagcggataggaaataactgggctcgtaagatatcggttggaggttgggaaccagtggatacagtagctgccgttgaaatgatcaagaatcggctcgcagatgtgaaagcgtttgcacctaagaatggatggtccgaagagtggcctttagctgcagatgaagatcgcagtaagttactcaaggaaatcaaattgctccttgtgtcactttgtgaccataaaattcttccttctagcattcgagagtggctgatgcgttttccggttcaacatcttgcaaaacttgatgtttccgaacagagtcttattgattctcacctagtgggaacacctcagagtatctgttttcttgaaagtcatgaactcaatcaaatcctagactttctaaaaaccatcaagtgtaaaaggaatgatggtacagatctggtttgcagagcagtggacagtttcttggatcatactcgagtcaaagaaaagatcgactttgaccctcagttttcatttctgcttctggataaaagactgctaaaatgcaaagatgttccattcgatgatgaagggacaatcaatgtttttgatcccaatgctcactacgccaaggcaccagctcaggcagatgatatcatatcctggntaactgactaccattcagtagatacgatcttttccagacctatcanggaacaca

SEQ ID NO: 165393 - DNA, 835 bp, Arabidopsis thaliana landsberg
tgaacgcgaagatgccttagagttgaacaacagctcagagtggggttatgattcagaaattatagaacctattagaggctacatatccaatggaaaagtgccctcggatatgtgggaagctcggaagctgaaagctcaggctgcacatttcgttctggtcaaggagaaactcttcaagtggcagttatctggacctttaatgaaaaagaagcaccccgcaaagtcatgaaagaagttcacggaagctcgtctggaaatcattttggaggaagagccctagccatcaagataaaacgtctcggttatttctggccaacgatgatcaaggattactaaaagttctccaaacgatgcgaaaaatgccaaaggcacgcgccaacgatccatcaaccggccgagctcctgtcatcaatcgcgtcaccatatccattcatacgttggtcgatggacataatcggccctatgcacgcctcgaaacagaaaaattagttctcgtcttaactgattacttctctaaatggatagaagctttgtgtggaagcacatcctatgtcgccacgggatcccttacgagatcgttatagacaactgctcgcaattcatattgacccgcttccaaggtttttacgataagtggggaatccgtcttagcaagtcaacaccacgatatccccaagggaacggtcaatccgaggctgcaaataagacgatcctcgacggcttaagaagcggctcgccgctaagaagtgttcgtgggccgacgaactcgaaggtttactatggtcgcatcgaacgatgcctcgtcgagccattggagaaaccccatttgcattag

SEQ ID NO: 165394 - DNA, 2365 bp, Arabidopsis thaliana landsberg
  unsure (1)..(2365): unsure at all n locations
catatacactcatgagttcattcccctatatagctatatttagcaaaataaaggccaacatccccaagtttcacttcagaagattattttagtaataaaaagtggacataacaaacngaaattataacttgttacgtgtcctactttcattgcttaactaccttcttataatgcaaactaccctcaaactcattcctccatcttcggagtgtttaactttctgaacctcttaagaaactctaacaagactctaaattttacgaccaaaatgcctcgatccgacctaacccgcggatactctgatggagacagcctggtcggagaaattgtccgagaggaaggtcacatttactcgttagcggcaacaaatgatcttttgtacacgggatcggacaataattacattagggtttggaaaaacttaaacgagtttagtgggtttaaatcgaacagcggattggttaaagcgatagtgataagtcgggaggctaaggtatttacgggtcatcaagacggtaagatccgggtttggaaaacctcgtccaaaaacccgcgagtgtacacacgcgccgggagcttgccggctttgaaagacgttttgaagagttcagtgaaaccgagtaactacgtggaggtgagaagacgtcgtacggccttatggatcaagcattccgacgccgtttcgtgtttgagcttagcggaagattaagggctgttgtactccgcttcatgggatcggacggtcaaggtttggcgtatccatgacttgaaatgtatcgagtctattaaagctcatgatgacgctgtgaattctgtaacgaccgccaagagccttgtgttcacgggatcggcggatggaacggttaaggtttggaaacgtgagatcagagggaagcgtacggcgcactctttgttccaaactttgctaaagcaagaatcagcggtcacggctttggtcacgagccacatggcagtgtatagtggttcaagcgacggagctgtgaatttttgggagatgggagacaagaaactcttgaagcattgtgaagttttcaagaagcataggcttgctgtcctctgtatcgcggcagccggaaaattgttgtttagcggtgcggcggataagaagatatgcgtgtggaggagggaagggaaggtacacacgtgtgtctctgtgttaaccggtcataccggaccagttaagtgtttggcggtggtggagccatcgggaggtgaagaagaagacggaggagatgggaggttggttttgtatagtggaagtcttgacaaatcggtcaaagtgtggagggtaccacgtcattaaatgtaggattttattcggtgcttaagagatttgggatgtatgtaggtaagtaagaacaaaaacccaagtcaaatgatgaattatgaggttcgtaatatatgatatttattagtaatttaatatatctttgatacatgtataattgaactagggttatcgtttacggtgaatatcaaatatcaatattaaaatatttcttgtgcattaatcggagtcaattaatcaaagaaactggagaagcaaagtgttggaaattctatattgataaacaaactactcataatatagtgtaaatactagtatatactaatccgagagatgaaataaatggattattgatattaatcgattaattctttttaacactaatccgaccaaagcaatacattaaaaacttacggttttgattttaagcgaaacttcaaactagtgctcttctagaactagttagcttccaataaatacgtgtagtacgtataagatatgaagtatgaaccataagcttgatcggatgggtataaaactttaaaattcacccccaaaaactacattatgtgttttttaaggggatacgtgaaatacgggaaatcgagatatcagaaatgcgacaaatgtcaatttacttttatttttaaggtagatactgacgagaaattcggaaaatcgacgtatcaatattacagttacatgaaagtgatgggtggttatcatctctttgtgaccgtccattattttttttgttataagtaaatatattttattttctttcgataatggtatgttttcttggcaatgttgcttttgctttatagtgattcctttgtacaaaaatggaaacaaaggttcgatctacaagagctataaatgtgtctatgttttaagctctataaatgtgtaggatcccacataaacatgtgtctgttccctcttgtcagcgaccatttctaatttaatcacctgagaccgcactttgttagtgctccatcattatattgatcatgcacactagctctattcatcagggtacacaaatttaaactc

SEQ ID NO: 165395 - DNA, 435 bp, Arabidopsis thaliana landsberg
  unsure (1)..(435): unsure at all n locations
gcggacgacaaggacntcacggacatcaacgtcaaggttttcacatttaagaagacgatgttcggcgtcggcatcagttcgtattaagacgccgcctccgcgctcaccgcctccaagatccactacgagaatatcaagatggaggactcagccaaccccatcttcatcgacatgaagtactgccccaacaagttgtgtactgccaacggcgcctccaaggtcaccgtcaaggacgtcaccttcaagaacatcaccggcacctcctccaccccggaggccgttagcctgctctgcactgccaaggtcccatgcaccggcgtcaccatggatgacgtcaacgtcgagtatagcggcaccaacaacaagaccatggctatatgcacgaacgccaagggcagcaccaaaggttgcctcaaggagcttgcatgcttctag

SEQ ID NO: 165396 - DNA, 2780 bp, Arabidopsis thaliana landsberg
atgtcgggtttaaggatttcggatccgagcaaattgcatctgaagaaggagcttactcatatcaggaaagttgcttctaaaggtttacgcgatcctggaaccacttcctcatggaaatctcctcttacttcctcgagattcgtcgttgagccgccggcgagcaacaacgtcgagattctcagtaacaatcagttagattctcagtttccgagtagtcgagtctttgggaataacgggaaggagaaggagaagaaggtgtttttgtataattggaagactcagagaacttcaagcgagaagactgagggtgaagatgaaacgtcttggatccaagctagtctcaatgatgatgatgacgatgatgatgatgtgagtgacgcgaggaatggtggagattcgtgtcttgaggaaactcgatctgcttcgatgattcgaaagagtggttttatcaagaagaagagtaaggaattggatttgagtatcggaagaaaaagcactgcgaaagctaggaactttccaagtcatcatcttcacgttgcatcaggtttaagtgtagtgagagatgaatctgatgaaacagaggattttagcaactctgagaatttccccactaaagtatcatctcctttgcttttgaaactaaagcgcaagaactggtcacgttcttcttctaagttcctgagaggtactagtaagagagaggattcttctcatacttgtaacagtacacctgcattgtcgactagctcatataatatgtatggtatccgtaatcctagcactgttggatcttgggaggatggtgatgatgagttggatgatgataacttggattttaaagggagacaaggttgtgggattcctttttattggactaagaggaatctgaaacatagaggtggatgtaggagttgttgctctccttcgttttcggatactcttaggaggaaaggaagtagcattttatgtgggagtcaatctgtgtatcgtagacataggcattcctctgggaggtttaataaacagaagcttgctttaagaagtgcaaaaggtgttttacctttgctcaaatatggtggtgatagtagaggagggtcatctataggaattgggtatagtgatgatgatctttctactgattttggagagattgatttagaagctcagagtagattagatgggaggagatggtctagttgttgtaagagtcaggatggagaaagagaagaagaggaagaaggaggaagtacaccggaaagtattcagagcttgagccaaaagtacaagccaatgttctttgatgaactgattgggcagagtatagttgttcaatcactaatgaacgctgtgaagaagggtagggttgctcatgtttatcttttccaaggtcctagaggtactgggaagacatctaccgcgagaattctttcggccgccttgaattgtgatgtggtcactgaagaaatgaaaccttgtgggtactgcaaagaatgtagtgattacatgctagggaaaagtagggatttattggaacttgatgctggtaagaagaatggagccgagaaagttaggtaccttttgaaaaaattgttgacattagctcctcagagttctcaaagatacaaggtttttgttatagatgagtgtcatttattaccatctaggacttggctatctttactcaagtttcttgagaaccctctgcagaaatttgtctttgtatgtatcacgactgaccttgacaatgttcctcggaccattcagtcaaggtgccagaagtacatcttcaacaaagtcagagatggtgacattgttgtgagactaaggaagattgcttcagatgaaaatctagatgtggaatcacaggcgttggacctgattgctttgaatgctgatggctcgcttcgagatgctgaaaccatgttagagcagttgagtttgatgggaaaacgaatcaccgttgatcttgtaaatgagcttgtaagtttttttgtttgttctatgtttcctttcctttgcattgggtaaaacttggaccaatgagtaatgtaaatgtgactactggtgtttgtgcaggttggtgttgtttcagatgataaattgcttgaactcttggaattagcgttgtcttctgacacggcagagaccgttaagaaagctagagagttactggacttgggagctgatccaatactcatgatgtctcaactagccagtcttatcatggatatcattgctggagcatacaaggctttggacgaaaaatacagcgaagcctttcttgatagaaggaactgtgagtatctgaaacttcaaagttgtttagttctcattatcttgaatgaaacagctaagtattgttctgtttttgttgttttttttgtagtgactgaagcggatttggagagactaaagcatgctttgaaacttctttctgaggctgagaagcagcttagagtttctactgatcgttcaacatggttcatagctaccttgcttcagcttggttcaatgccttctcctggaaccacacataccggtagcagtagaaggcaaagctctagagcaactgaagaaagcatttcaagagaagttattgcttacaaacagagatcaggccttcaatgtagtaatacagcctccccaacttccataagaaaaagtggaaacctcgttcgtgaagtgaaattgtcctcctcttctagcgaagttttagagagtgacacttccatggcctcacatgacgatacaacggcaagcaccatgacgggtcttgcaga

SEQ ID NO: 165397 - DNA, 1394 bp, Arabidopsis thaliana landsberg
gattgggtctgcaatgctgtacacggggcaaaacgagttctacggtagcgtggagaggacgtttatgtacattgtgaaacaagcaactggagttttgactaagctaacgagcttatgggactcgattcaatctgctaaagacattcagctcgatggacataacctctttcctcccgagtttagaggcaacatcgatcatttcaacaacatgatcaagatgtctaacatcacttaccccgaccgtgtcgctaaccagacaatccgttatctcaccggagcactaaaccctgtgtaagtaataagtattcgtttgatatatttcttgcctcacaagctaaatatatatagaagctctgtttgactcaaatgcgttttcctcaggagatatgtgttaaatgtgatcgctggtgtaatgctcgcagtcgcattcctcggcctttgtaagtcacaaatcaaaacatatctattttgatctgaagatacagaataatctcattatttttgtttctgtttttcttcttctttcgaaacagtgttttcgttctgtggattgcgagttcttgtctacctgtgagttacacttagaatacgttgttatattatcatatatatcatatccaaatcaaatgtttataatcagtgtttcaattatatcagattggtaattcttggttggattctcgtcacagccactatcctcctcagcgccgttttccttgtattccacaagtaaatgatatttcgtcgtcacttgatctaattcaagattcaatttgtttttatcaaactaatgatgttacttaataaacagtgtggttgcggacacgtgtatggctatggaccaatgggtgcatgacccagcggcagactcagcattgagtcaacttcttccgtgtttagatcctaaaaccattggagagacattggatataacgaagacgatgactgcgacggccgttgacatgaccaatgcgtacacggtcaatgtcagtaaccatgatcagttcccacctaatgcccctttctaccacaaccagtctggtccgctcgttcctcttctctgtaacccactcgaccaaaatcacaaaccgcgaccttgtgctccggacgaagtcctcttagccaatgcttctcaggtacatacattttctcataagtgatacatatgtcaaatgttaatgttaatccaatttatgtgttatcgtaattaggtttataaaggctatatttgccaagtgaacgcagaaggaatctgcacaacgcaggggaggttaacacaaggttcgtacgaccagatgatgggtgcgatcaacgtggcgttcacgttggaccattatggtcccttcttagctagtattgcggactgtacaatcgttagagcaccttcagagaca

SEQ ID NO: 165398 - DNA, 437 bp, Arabidopsis thaliana landsberg; identical to SEQ ID NO: 33214

SEQ ID NO: 165399 - DNA, 1090 bp, Arabidopsis thaliana landsberg
cattaccttttctatttgtagaaaacacaccattgggatcctttgatcacagggactgttcagttttacttcaacgagatctgtttaaagcgaatgaaaggcatggttagcactgtaagaactagtcgaaagaaacctaaatggatcgagaaaactctatggaaggaaatgactgcgtactgggacactaaagaagctcaggaaagaagtcaaatctattcaaatgcccgtatgtctgactgtaacggtctagttcctcacatacacttctcagggtctaagtcatatcatcaaatccgggacgaattggtaagtcttctctctgtttactcctttgcaactttaactcgatgtttcaatgtacttttctatgacttgttttttttttcattacaggaagagcaattgggcaaaattgtcagtattggtgacgttttcatcaaaacacatacaaaacctgatgggacgtatgttgatcgaaagacagagaagatttgcagagttatatcagaagaatttgcagttgaggcagtctgagctcgaggctgaagcttctgctgtttcagatggcacttcgcgggcacgagagcttacagctgaggaatgtacaaccatatttcttcaggtaacgttttatgtttcccaatttagtgtttttgagttgtctttttcattctctaatctcagcttttatcatactatgcagtccactgggagggattcgagaggcgttccttatggagtaggaagcctcaaagagtctcttgtcaatggcaagcagaagcaagcaggtgactcaacttcttttgtggctttgcaagaacaattacttgaagctcaacgcaagatagaagagcaggtctcttacaatcagaggcgtgaatctgagattgctttgcgtgaagctgagaattcccgagctgcagatgagcagaagaagaagcttgagcacttgtccttagtggagaagtttttacgcgaaaatgatcctcggttcctcaatttcctcgaatctcctccagctaaggagacaaccacagatcctatctcaccctctccagctgcctctccctcttcatctgcttcatag

SEQ ID NO: 165400 - DNA, 3586 bp, Arabidopsis thaliana landsberg
gatgttcacatgaaggaacagggtgaatggttacaggtttctccttctaaagtaagtcgtagcccgagcaaaggagcagaagtagaggaatcaacattggtgtcagcttccaaatatgcagtcttgagtatggatgaagaggaggaaggcgaaatatttgaaaatgtgggaaacaatgtaaagaatagcgctacggaagaggcaaatgatgcagaaaaaaagtttgtcgaggagacagagacaaatgataagccaaatgcaacacatactcactcaagaaagaagaaggatgttacggtgacttcgaatcaggcaacaaagaactcagttccaaaagttgcaggcaagaagtcacaccgtaaagcatactaaatgtcgtgtttttcatggaatgtgcgcggatttaataaaacttctaaacattctgtggtccgtcactggacaaacaataatgagatgcaatttggatgcttattagagacgagagtcaaggaaaagaaggcaacgagtatggtgtctacagttttcaacaattggtcttttatggcaaactatgagttcaatcagcttggtcgcatttgggttctttggagatctaccgtgcgtttaactccaatattcaaaagtgaccagctaatcacatgttctatactaatggagggagaagaagatgaatttttctgttctttcatttatgcaaagaatttagcagaagagaggaaagtattatgggaagacttgaggaatcaccaggattcgccattgtttagaaataaaagatggctgcttatgggtgattttaacgagatattggatggagtagaacattcaaatttcgaaaccatgcctactattccagtaggtatgagagattttcaagaggttatcagagattgttcactaatggatttaggatctcatggtctgttattcacttggaataacaagagagatgagggggtaatctttcagaagcttaacagggttcttatcaatagtgaatggctcaaccactactcacaaggctattgcgtttttgaaccaggcggttgttcagaccatctccgctgcagaattcaaatccaaagagagaaagtggtaaaaaggaaaccgtttaagttcacaaattcaatcgctacgatgctagagtttcaaccccttttgcaatcttattggcaagatacaccaaccctgtttcactctacttctgcaatattccggtttgccaagaagctcaaaaatctgaaacctcatatcagacagttaagtagggagaaacttggtgatttgcacaagagagtaaaagcagcttttgaagatctatgtaagaaacagagtgaaactttgtcttgtccgactgatgcagcatcacaggacgaaacagaagcttatagaaagtggtctcatttgtcagagctggaagagtcatttctaaagcaaaagtcaaagctgcattggcttgacgtgggggataaaaacaacaaaacgtttttcaatgcagctaagttacgggagtcaataaacacaatccgggaaatacaatgtgaggatggaacaattgcatttagtcaagatgaaataaagaaggaagtagagcattttttctcggatttcttaggccatgtacctttggattatgaagaaatgactgctgagactttggaacattgtctacctttcaaatgtattgaggctcaacagataatgcttgaaaaggaagtcactgctgcagaagttaggcaggttctctttgcaatgccagcgaacaaagctcccggtccagacggctatacgactgaattttttaaataggcatggttagtcattggcgatgatttcacgactgcgattcaatctttcttcattaagggtttccttccaaaaggtataaacacaacgatccttgctctgattccaaaaaaagaagatgccaaaataatgaaagattatcgaccgatatcttgttgtaacgttctctacaaggttatatctaagatattggccaataggttgaagcttctactgtcggagcttatctcgccaaatcagtctgcgttcataaaaaacagactcttactagagaatgttttgttggcgtccgagattgttaaagactatcacaaagacgacatctcccctaggtgtgccatgaagattgatatttcaaaagctttcgattcggtacaatggacttttctgctgaacactcttaaggctatgcacttcccgaccaaatacattcactggatccatctctgcatatcaacagctacgttctcagttcaaatcaatggtgagcttgcggggttttttgggagtaagagagggttaagacagggttgttgtttatcaccttacttgtttgtgatctgcatgaatgtgttaacccaaatgatcaataaggcggcaatggagggaaaggttggttatcacccacaatgtcgcaatgttcttctcacgcacttgtgttttgcagatgacttaatggtttttgcataagggacaaagaagtcgatcgaggaaattatctctgtttttgatggttatgcaaaatgctcgggtttgagaattagtattgagaaatctactctctacatggcagggattgaccctactactcaagctgccattcaatcgagttttccatttgcaacaggtaagctgccagtacggtatttgtggttacctttgatgactaaagctatgtcagctcatgattatcttcctctagtagagaaaatcagaaccagaataagctcttggacgtgtagatttctatcttatgcagggagattgcagttgataagagcggtcttgatgagcatcacaaacttttggtcttcaacattcagcttacccggcgcttgtattaaagagattcaacaactttgttctgcttttctctggagtggggctgatttaaatctttctaaagctaagatatcgtgggatgtagtttgtttgccgattagagaaggaggactaggtcttcgacctctcaaagagacaaacaaagtttgtggtctgaagctaatttggcgtttatttgcagcaccaacgtctctgtggagtaagtggattcatgcctatttaattcggaaaaaacgttttggacagtcaagggaaattcatctcaaggttcttggatgtgaaggaaactcttaaagcttagagacttggcaaaggatttctatcaggttgaaataaaaagtggcagagggacatccttttggtatgatacatggtcctctttggggaacttatttgatacttttggagatcgagggtgcattgatttgggtattacaaaagaagccacagtgggtgacgttttggcctctcacagaggtagacggcatagagtggagactttcaatagagtggaagaagtcatcatggaaacaacgttgaggaggaatgttgcataggaagattcgttctatggaaatggaagacagtgttttagcacaacttctactcatatgaaactgtgaagatgctgagagttgaactatcaatctgcagatgggcgaaagagatttgattctaggacgctacaccagagttctgtttcatcacttggctt

SEQ ID NO: 165401 - DNA, 1975 bp, Arabidopsis thaliana landsberg
  unsure (1)..(1975): unsure at all n locations
tggaagctcaatcctgaaaaatgcgttttcggggtaccagcaggaaagttgctcggatttatcgtcagccaccggggaattgagctaatccagataagattgaagctatcatgaagatggaagctcctcggtcgcaaaagaaggttcagcgactcactggatgtatggcagccctgagcagatttatatccaggctgggaggaaaaggtctgccattttacaaactactcaagaaggtggataagtttcaatggacttcagaagcacaagaagctctagacgcactgaagaaattcctgacaacaccaccagtactaaaaccgccccggcgagctacgccgactcaaccggctgaagatttgctgctatatatctcttgcacgactcacgtggtaagcactgcgttggtagtcgagcgagtggaagaagggcatgcctatccggtacaacatcctgtttatttcatcagtgaggttctaggcccatcgaagaaaaagtatcctcaggttcagaagctattatatgcagtacttctaactgcccgcaagctgcgtcactactttgacgatcacagagtcatagtagttactggttttccaataggggacattcttcacaacaaggaagccattggccgaatagccaagtgggcatgcagaactgggatctcatgacatcgaatttcgaccttgcactgccattaagactcaagcattggttgacttcgtatcagaatggactgaacaacaagtaccagaaaacccagaaactgcagaagtatggcggatgtattttgatggctcgctgaagctgcggggagcaggcgcgggaattctcttcatcgcacctggaggcgagcacctcaagtatgccctccagttgttatttccagcctccaacaatgcagccgagtatgaagctttgatccatggactaaacatcgccatatcattaggcatcaagagactaatggtatacggagattctttggtagtcataagccagataaacaaagaatgagactgttcgaatgattcaatgggaaaatattgcactgccgtccgaaaactagaagataaatttgagggtctggaatttcattatgtagaaaaagatcggaacacgacagccgatgtattgtccaagctaggatccagtcgaactcaggtcccacctggagtctttgtgcaagaaataccacagccgagcatctcaatggatcaagcagaagagtgtaatattatagatcaaccagagtcaagctctgatgactggagaaggtcaatcatcagatatataaagaatgaagaggagccagacgataaaaatgcagccgagcgtatcgccagacagtcggctcactacacactcattggggagacactatacagaaggggcgcgtcaggcatcttcatgaaatgcattctatcgtctaccgagatgcaacttctggaggaggtccacgctggacaatgcgggatacacannnnnnnnnnnnnnnnnnnngggaaggtcttcaggtctggtttctactggccgacagcaaagagtgatgcagccgagttagtccagagatgtgaagcttgtcaattcttgtcaaagcaatagcatttactagcacagcaactgcaaaccatacctgtaacatggccattcgcgtgctggggactagacatgattggacccttcaagaaagctcgaggaggctatactcacgtgttggtcgccattgacaaattcaccaaatggatagattacaaacccattgcttctctaactttagccaaggtagtggaattcatacaagacataatattcaggtttggaataccaaatagcatcataaccaacctaggatccaacttcactagctctaaattctttgatttctgcgaacaatggagcattcagatcaaatatgcatcagtagcacacccacaaagctaatggtcaggtggaaagggctaatggaatg

SEQ ID NO: 165402 - DNA, 2463 bp, Arabidopsis thaliana landsberg
  unsure (1)..(2463): unsure at all n locations
atgtcggactctggtggtggttctcacaagtcctccacaacaaaaccttccgttttcggactaaacctttacttagtcatcgcgatttgttctgttttcatactcttgatctcactcttgatcttccttttcgtctgcttgaatcgcgtctcacgcgctcgtagaatgcgcgttaaacacagctccggctcgatcccgctcgtctctaaagaaatctcggagatcaagacggtcggcaaattcataaactccgacgattccaagggtaaaatcggaaacgaagttgttgttgttgtctccgccacaagcaaagaagcgacaagtggttttgatactttgtcggtggcttcgacggctcacgttggtccttctcaggcaatggcatggggaaaatggtacagcttgaaagatctgcagattgcgacacgtggcttctctgatgataacatgatcggtcaaggagggtacggtgtcgtttacagagctgatttctccgacggttctgtcgccgccgtcaagaatctccttaacaacaagtaatgtctttaatgattattactaattttgattaagatcattttgagcaaaattcaagttttttgaaatttggatcttatcgggtagtatattaaatatatcattgcctcattcctaacaaatgttcatttacttcgtttcacggactccgtaattcttgggtcaaggtttcattggtacctactccccggttttaaaaatgcttttaatgttgtcttcttcgttgctttcaaacccaagaaaatggcgaaacttagattttttatatttctccgacaagtgtttaattagatagtaccactttctctgcattgactttaatatatcaatgaaattcttgagttctgtattgaataagggtccaactgtaaccattttatctcctgaattagtaacttaaagacatttcagagtatatagtaaatgtttttccgaccattgaactatataattgctgtttttttaggtaggtgtagtgaagctaaaagagtaaaacaaaaggaaatagtattaattagttgtgctttgttctttattctctattaatgctttctttaatcttttccttttcttttgacctctatcatctcttttgttttagtttgtcaccttttttagatgatgagatggtcttcactagtataaaacttgctggaacatgagatatcattgaaccaaatagcttgcaaagaatcttctctgtttgctttgtgggattgtcacttctttgttctgactttgggattgattagccaaagctccatggattgattttatggttaagaaaatgaataaatcttttatctaggtacagaaatctattatattcattgttaggttgagcagagtcaggttgttggttacaggacaaccactggaagtttgatgccatttaaaaaaaaatatatataataattttttggtcctgaggcatggatgaaactttttctcttcttgtttactcttatattattgttttataaacagttttgtagattttgatataagaaatgaatctgctaaatgatggtaaaatataattctattcaggggtcaggcggagaaggagttcaaagttgaagtagaagcaattgggaaagtaagacataagaacttggttggtctgatgggatattgtgctgacagtgctcaaagtcaaaggtgctaatccaaacaaactcaaatgaattagtaaactctaatttggaattaatctaacagttagttctttctttgttccttgattaggatgcttgtgtatgaatatattgataatggaaacttggagcagtggttacacggtgatgtaggtccggtgagnnnnnnnnnnnnnnnnnnnnnnnnnnngatagccattggaacagcaaaagggtgcaacttcttttgttttctacttcttcttttcagttcgcattttagctaagattggcctttgaaactctgccttttgatgaacagattagcctatttacatgaagggcttgaacctaaggttgtgcaccgtgatgtgaaatctagtaacatcttgctcgataagaaatggaacgcgaaagtgtctgattttggtttggccaagttattaggatctgaaacaagctacgtgacaactcgtgtgatgggaacttttgggtatatatatagataccctctcttctttcagttatcaggctcatattgtttctttacattttatcttcttacacctttttaactttctgcagatatgtttcaccggaatatgcaagtactggtatgctcaatgagtgtagtgatgtctacagtttcggtgttctgctcatggagatcattacaggaaggagcccagttgattattcaagaccgactggcgaggtaattgaaaacgcttgtaagtaacaaaacctttacctgccaagaccatacgcaaataattgtttgatgaaacat

SEQ ID NO: 165403 - DNA, 2902 bp, Arabidopsis thaliana landsberg
  unsure (1)..(2902): unsure at all n locations
cttcatgcgatctttatgacttaaaacatacaggaaacttcttatcttggagagggaaaagacattctcactatgttcgatgtagactggatagagcaatggcaaatagtgattggataattgattatccttcaggccgcagtgaatacctaaggtttgaaggatctgatcatcgccctctggttacctcttttgatcctgtgcaaggaaaacaaaccatattcagatatgatagaagtcttaaatataatcctgaagtcacaaagctggtcctagatacctggaaagcaaaaccgcatgcgaaggttgaccatcgtattcatctctgcagaactgcaattatcaaatggagcaaagaccatcatatcaacaaccaaaaagagattacttctctaagggaacaattggagaatgcaatgaatgatgtccacgttactattgaagctctaaaccaacaacttctagtgtcttacaagaaagaagaagaattctggaaacaaagaagtagacaattctggttggctcttgggacaagaattcaggcttcttccatgctgccaccaaaggcagaagagctattaataatatttcagtcttggaatcctcaacacggaaaagtgtttatgagaaagaggaaatcactaaagttatctcataatattttcaagacatttttacctcacaagatagcgagagaacaaatattgctctggaggctctctcaccttgtatcacgcctgatatgaatgattctcttacttgcttacctactgctctagaaatcaaacaggcttgtttttcaattcaccctgacaaagcaccaagccctgatgggttctcagcaagcttctttcaaaccaactggaatatgataagtgatgaggtaacttctgaaatccaagccttctttatctcaggcctattaccacaaaagataaaccacacccatgtcagacttatcccaaaaatacttgtcccacaaaaggtttctaattacagtcccatagctctatgttctgtctattacaatattattgtgaaacttttagctaagagactcaaaccggttctccacaagtgcatttctgaaaaccaatcggcctttgtcccctaacgtgctatttctgataatgtcctaataacacatgaagctcttcactatctaaaacactcaggtgcaacaaagaagtgtcatatggaagttaaaacggacatgagtaaagcctatgatagactagaatgagacttcattaaagcaactttagagagaatgggttttcaccagaattttagagggtggcttatgcaatgcattactacagtctcctattctttcctacttaatggccaagcaaaaggattagttttacctgagaggggtgtccgacaaggtgaccctctttcaccctatcttttcatcatctgcagcgaagtcttgtcagggttaggtttgaaagcacaggcaaatggaagccttcctgggttaagagtagctattggcagtcctagactcaaccacctcctctttgtagacgataccatgttcttctgccggatagacaacaagagctgtctgaaactcaaagcaatcctccacaagtatgaactcgcctctggcaagcaaataaatcagtcaaaatcttcaatcactttttcagttaaaaccccattagactgccgagaaagagtcaagagaacattgcctatacataaggagggtggttaaggaaagtatttaggacttcctcaactttttggtagagagaaaaaagatctgtttacctctattgttgagcggattaaacaacgagtcctgagttggtcctccagattcttatcttctgctggcaaactcacgatgctcaagtccgtcttggccaccatgcctacctacactatgtcttgcttccaacttcctacttcactttgcaaacgcattnnnnnnnnnnnnnnnnnnnnnnnnnnnnnnnnnaatcctgaaaaaaaaaagatgagcaggatctcttggcaacgaatgacaaaatcttttaagtctggtggcttaggtttcagggatatacagacttttcacaaggctttattggccaagctgagttggagaatactcactaacccttcatgtctgttgagcaagattcttcttgggaaatactgcaaaaatcaatcccttctagactgccaaacaccaaaatcctcttcccatggccggagaggtgtatgtttgggcaaggaaattttaaaactccagctaggacgccttattggctcaggaattgaaactcctctttggcgaactccatggctatctctatctgccccgaaagctgtgatgggaccacttacagaagcatcacacaatcttatggtgtcggatttgatcattcctcgcactaggatctggaatacagaactcatcagagcgatcatccccgcttatgaaaacgacattcttctgctcaaaccaagctcgcttggtgctgtggattcctgggcttggctacccacaagttcaggagtttacactgctaagtccggttactttgaggcattaaagacgtttactactcccgttatccctgatgacattattacaacagaagatttcaactggagatcgaacatatgggcactcaaaacatccccaaaaacaaaacttctcttacggaaggcgggatagaatgctttacttgtagggacaaacctcttgaatcgatatatcacggatagtggtaagtgtccacggtgtgacgaagatgaatcggttctccacctcctcttccaatgtccgtttgcccaaaatgtttggtctattgcccctcttaaaactgatatagattgtgttggaatcacctctgtcttgaatggtatctctacagccaacaagcttacttgtctcctaccc

SEQ ID NO: 165404 - DNA, 8756 bp, Arabidopsis thaliana landsberg
gttaccgagatagaccctagccgtcctccgggaactttttggtaagcctcttgtgtttcttttccttaagcataggtagtactagtcttagttaacagtttattgcctaatggaaccttgtgttggtaggtttgaggatgacccttcagttgcagctactgtccggagcatctttgaaagagatttcaaggagcctcatgctaactggttaatgacaccccaacatgtggttgatcgctggtttgaaacttttgctgtaagtccactaaagtctgttttgttgtgtaaagctttttagttgctgtaatattaagtctaagttttgctgtcacttgtgtctgttttgtagcaaatgtataattgggataaagcaataaacaagagagttaagactgagtttgaagcaaagctgaaggagaggatgagtgatcaagtttctcggtggaagggaaagtggagagagaagggagatgcatcaatgcctcgctggtttgatcctgcagagtgggccggtcttgttaagttttggaaggatcctaagtcagaactgaagagtatcaacagtagaaatgcaagataccatgatccggatggcctcgggatacataaacatcgcactggccagacttcttacaaagcccgtgctcgcaaacgtgtaagtacctacgcacctttactttatttacattgttgaacaaacaactaaccatattttttttctgttgtagtgtgagatgactggagagacttgtccagattttcttgtgctcttagatgagacacatagaaaatctgatgggactttcattgatagaaagtctgaggaggtttacaaagaagtttcttcgaggattcaagaggaggagtctcagctgtgttcaggggacactacggagagcacaacttctggggggttatctattaaggccaagaacaagatttatgctcaggtaaaatttttgttttgtcattgtgttttgggttacttgcattatgttttggatggcttgcaacatttcattgtgttcagtcatttgtctttcacttcaatattgttttggctggcttggattatgtcattgtctgttcatgatcttgtctttgtcattgtcagatggcttgagtagatagttcttgtcattgttttttttagtgtaagtctgttgtggcttgcattatgatatattgaatatgaaacggttatgattatgtcattgtgtttgtgattttgtcttccttagtattttctattgtggcttgcaataaatcatagtgaatatgaaactgttatgtcattgtctgttcatgtccttgtctttgtcattgtcgcatggcttgggtagctagttcatgccattgtctttttcagtgtttgttgtggcttgcattatgatatactgaatatgaaacgattatgattatgtcattttgttcgtgattttgttttccttagtatttggcaattgtggcttgcattatatcatagtgaatgtgaacctgttatgatttgttgtgtttttggttttgagtttgttacaggttgctctaaaaaacaaaggcagggtttatggggctggttcattgcagatagaagcctcctcagctcatgctagtccagtgctgcctggggaagacccggttgttctctctcgaaagctggctgtcgctgaagctactattgcaacccaagctgagaagatcactagctttgacgtctacttcgattatcttgccgataaggatccagagttcgttgccctctttcgagccagaacctctacaaggactgagccgaccagctccaatccgataccggaggagcccaataccgcagctgctccatctgctgggatcagagatgaggcagtcggagccacatgatcatcctctccatctcaagctttctaagattataacttgcattactttgggtcaagaaacatagacttttttggtttgtttaattatgtgttgaatacttggatctttatttcagttgctataaacaatgatgctttcaatttcaattcaagtttcattttcaattgcaattagttttcaaattggctatgtttaatactcaatgtcacgatttaagctaaatgtgatctctaaacaaaaccttaacctcggcttctatgtaaactcagtgtgatgcaaataattcgcaaattcgtcgcaaaagttactagggatttgctactaaagctaaaacacatcgcaattccgtcgcaaaaattgcgagggagatgcgacacctgtttaaattgctaccgttgttgtccctcgtaaattgcaactagtttgcgagagattttgttcatcgcaaaatttgcgagggaattactactgttaaccatttgcgagacgcgttttgcgaggaacagctgttcctcgcaaatctctcgcgattaacgatttgcgagggattaccgacgaaatcttccgtcgcaagtcgcctgttttcttgtagtgagagactcattaaagagatttccacggatgaagctaaacgtgctctcttttcgcttaatccagataaagtaccgggtccagatggtatgacagcccttttctatcaaaggttttgggatttgaccgggccagacctggttaaagtagttcaaaacttccattcatccagctcttttgatgagcgtttgaatgagacaaatatttgcatgattccaaaaacagatcgaccaaggaagatggcggaattctggccaatcagcctatgtaatgttagttataaagtaatttcaaaagttctcagctctcgtctgaaaaagattcttctggagttaatatctgagactcagtctgcctttgtggctgggagacttatcacagataatattcttatagctcaggaaaattttcatgccctccgaacaaactagcttgtaggaaaaagttcatggctataaagactgatatgagtaaagcttactatcgtgtggaatggtcttttctacgagctctcatgttgaaaatgggtattactgagaaatgggtagacttgataatcttttgcatctcatctgtctcatgtaaagtactcttaaatggagctccaagaggtttaatcaaaccatcaaggggaattagacaaggcgatcatatttccccgttcctctttattttgtgtacgaaagctttggtagcgaaactcaaagaagctgaatggaatggcaggatccaaggtcttcaaatctcacgcgcaagtccttccacctcgcatctcttgtttgcagatgacatcttatttttttgtagagctgacccagctcaaggtcaagagatcatcaatattctccgcatttatggtgaggcatcaggacaacagttaaatgctgctaagtcgtctgtaatgtttggtcatgatgtggacaatacgacccagagtaccataaaatcaaacttgggtatccaccgggatgggggcatgggatcttacttgggtttacttgagaaaattcatggctctaaaacccaagttttctcctttgtgagggatagactccaaaagagacttaatacctggtcagccaaattcttgtccaaaggaggcaaagaggttcttataaagtcagtagcacaagcccttccgacatatgttatatcgtgttttttactctctaaggctattcgctcaaagttgagtagtgctattgcaaatttctggtgaaaaactaatgagaatagtaatggtatccactggattgcatgggataagctttgcaacccacactctgaaggtggactaggttttagatcactggaagagtttaatctagctcttttagcaaaacaactatggcgtcttatccgattcccaaactctcttttgagtagggtcttgagggggagatattttcgatatagtgatccattacatatcagcgcatcaaatcgtccgtcttttggatggagaagtatcatggcaccaaacctcttcttgtctttgaatttcggaggaccataggttctggaatgctgactcgcgtatggaaagatccatggattcccactatcctagcgcggcctgcaaagagcattcttaacataagagattctctactctatgtcaatgatttaattgaccaaaacacaaatttgtggaaattggaccgtctccaagcactgatcgatcccgttgatattccactcattttagggattcgcccaagtcgtacctacttgagtgatggctttagctggtctcacactaaatccggtaattatactgttaagtcaggatattgggtcgcgagagatctttctcgtcctacttgtgaccccccttttcagggaccaggtgtttcggcacttcagacacaagtatgaaagcttaaaactacgcggaagcttatgcatttcgtgtggcaatgtatctcgggttgtctagccacttgccaaagattgacctatcgtcatatgggtacagataaaggatgcccccgttgtggagaagctgaagagacaattaatcatctcctttttcactgtccaccttcacgacagatttgggcattatcgcctattccttcttcagggaatattttcccaagaaattccctcttctataattttgacttccttttttggcgtggccgggaatttggaattggagaggaggtgttagaactctttccatggataatttggtatatctggaaaagtagaaatcgttttgtttttgagaatttcagggaacccccccttgacactttggctttggcacttaaagaggcatctgtttggaaacaagtaaccctaaaagaagacgtccccatacgctcaccgcctctcctagtttcttctcagatttcgctcaccttggtccctgaatgtcaacttgatgcttcttggcatgcagaggaccccttaagcggacatggttgggtccttgttcgacaagacttagtcctccatcttggcctcaagagtgctcgacgaagtttatcaccgcttcatgcggaatttgattccttgctatgggcaatggaatgcatgatctctattggcgatacttctgccgcttttgcttccaactgttcagacctgatttctatcattgacaaccaagacgattggccgacattcgcagcggaattggcatcctatcgctctctagtttgttttttcccttctttcaatattagatttcttcctcgtagttctaatactcgagcagatagtttagctaaaaaagcttgggcttgaaacagtcttttctcccatgtaagcacatcggttcctgaatggctctctctagcggagagtctcttcccgataacttaatataaatggtgtttgtggaaaaataaaaaaacacccaaacctatcatctgccatatcacacgcttcaagactcacagagattcggctaaaggtttaaggttagcaacgatctcaacatcttatgacttcctaactatgatcccaactcaacttcccttggctcatctcaacttcattcatcttgatttaacgactcttcattataataatagccttcaatcttgacggttaactcaaaatcaacccttataaatagtttctagacgaaaactaaatcatgggaatgattcaaagaaaacagactatcagatttctcgatcatttcttgattatgcttgacgttcctcaatcagaattcttggatattgctcacgatcacaacaattcctccgtagcagcctttcagtgttttccctctcttccttttaaatgacacgggattaatcgagtgtttataggcatatttaccttgcgctccaaggtatcggatattggcgagtgttgacacctcacgggacaactgtcaagcatggcgaacggtggcaacacatttctccgacgactttggctcaaagcaacaagaaatttggctccaactctctaaactttggctccaagtttctcagtcaatgacttggtcaagggtcgatgtttggtcaatggttgatcaaaggttgcggcttgtataatgtggtatggtcgttgtcgctcggattggtaatactttaatcatcgttcgcctgaatcactattatctcaccaaaccattgttcttttcaaaattctcccgatccaaactaattttgactcgtccaacttacttattatctatccttaatggtttttagattctttttaagttcatcttggtctcctcttgatcatcccttgtacggccatttacccttaagcaagggtcactacagtggatgtcaatgaatcacacatcaatgatcctccatatggttatctcctgcaaacacattcatggtaatgatatcgatgtatatatgcagccactaatcaaagacttgaagcagttatgtgattatggaattaaaacgctagatgcttccacaaagcaaacatttaacatgcgagtagctatcatgtggataatgtttacgacatgaaaaaactgtttaattggttatcgacgttttcttcctcgggatcatagctttcgtcaaaacgtggtacatttcgacggaaaagtagaaacaagatctccgccagtaacattgacaggttctactattattcatcaactagaacaagttaatgttactcttggtaagaaaaatggtttagttggagttgggaaaaaaaagaaagcaacgtgatgcaggaagatgtggtacttatcagtggaagaaaaaaagtattctctaaagttgtctttttgagtattctttcgtgagctaggtatacgttctgacttgtggcctgatgataatgagaaatatcaagcaacatatttttctttgaacaatcaagcgaaagacacttttttaagtgtcttccagaatgtaaaactccggatgattatgcttctaatttatcaagttgtgttgatgtcaatggtcgaaagctatcatgcttaaaaagccacgattttcatgtaataatgagaaatctattttcacttgcgatttgaaatctgttaccaacaaacatgacatcaacaattgttgagatagataaattacaatacattattttagtaactttatgtcgtatggaggtttttttcctcaatcatttttcacggtgatggtgcatttagtagtacatctcaccgaagaggcaaaatacggtggaccgttccattttgttggatgtatccgaccgagaggtgaggttttcccattttatgtttatatatatatatatatatatatatatatatatatacgaaactgaaacttactagattcaattatatacacatgatgttaggacacttcaaatgatatgttcgaaattgcgctaagcctgaaggttctatatgtgagcaatatttagctgatgagtgtgtaacattttgctcaatgtatctcgatgatatagagacacgatttactcggattggccgggttgatgatcgacctctagctgagactagcataaacccaaattcagaacttttacttttatttccaaaccttggaatagttgttggagcgggtaaagtttatactcttaatcatgtagagcggcaacaagcacatcgacatgtattggtcaactgccaactactagatcacctacgggagtaagttctcttattcaagaacaactaattttatttatgttttattgaaattcactaatgtagacgttatggttattgtatgtttaggaaatataaaaccgagttgttgaataaacaatctcatcaaagcaggaggaatcgtgttatcgatattgacagagaaatgcatcttagttttgcaaaatgaatcaagtagaaagtaaagacaaaatgagttagatgagctaactgatgatatgatgcttagctctgggtccatctgaaaatgttttaaagtatacagcttatgatgtcaatgttttcaaattccggacaacaaaaagagaatcaaacctgaaaacacaaaatagtggtgtttttgtggctactgagactacgagctatgctagttctcgtgatcctaaccccaagaaagggaactgtagcttactatcggaatctgatcaaagttatagagttaaactaccatgaagttttcaaagttgtaatattcaagtgtaagtgggcgggcactcttacagtaaaaggatataaaatagatgcatattgtaacaccctatcccgctattaaaatataaacaaaataggagcatcatgatagacgcccgcagtcagccaacccaggttttcgaaacaaattcgtttgcccgagtcgtcaaaccgcaagtgtccagcctctcgaacatggcctaaggcttttcaacccgtattgcacacgagtgttgtgtaagtcagaaaagactaatatcagtcggtctaccataaaaattttagaaatttgagtctttatacatatataccaaatcgcatatagttttcgcatcctctttgaaaaccatacatcatatgcttagtaagaattttacaaaaagctgtaaaacctacatcggttcgtcctaagtctcttgcgccctctacaaggctggtcaactaaggtttcctacaaaataagtagcgtcataagtaatctagcattacttagtgaacccggaatctagatagagttaacctaatacccttacccctaagcagaaatcaacacacaataatactacgagctaacaaaaataagtacgagttatacaagcaacgcacaatcaaagatgacacccaacacacaatgcaagcaaaatgtaatgcacaatgtataatgcatgcagactcaaattcctaa

SEQ ID NO: 165405 - DNA, 1355 bp, Arabidopsis thaliana landsberg
atggctgaagaacaacaaaactcagatcagagcaatggtggaaacgttattccaactcctgaagaagttgctacgttcctgcacaaaactggtgaagaaggggatttattcttccctcaatatcttttctcaccattaacggggatttaggtttttggtccatatatataaacagagctcgtgattatgtatagcgccttgtcacactaaccaaaatcaagtgctttccgatcattaaagttatattttgttaagtttaacgaatcttctacttaaaattaagattgactcatatatcactaatgtgattttaatcatctatggacccaaaaattctgaaaattttaaattttggaagctaaacaaaaggaaaattaaataagaaatgtaactaaataaaattataaacaggtggatgggaaaaatgttgggaagacggggtaacaccatgggaccaagggagagccacacctctcattcttcatcttctcgactcttcagctctccctcttggccgtacccttgtccccggctgtggcggagttagtcttctctctttccattttggtttggtttgagttcgagctttttttttagtttttatatctttgtagtttagaacatatttaaggatttggagattacaaccgaatctagtttgagttggtaacttggtatgataggttttcggattcaaattctaagacttaaatgcttgtacattaaaattgtatgttgtaatattattatgaacgtgagtagggacacgacgtcgttgcgatggcaagccctgaacgtttcgtagttggattggatatttctgacaaggctctcaacaaagctaatgaggttaatcataataactaacttctggtagttaatcacctcacttcctaataattaacgtttgtctttgaatactgaaaaaataaatcactttccgttgattatatatatatagacttacggctcctcaccgaaggcagagtacttttcgttcgtgaaggaagatgttttcacttggcgtcctaacgaattatttgacctcatcttcgattatgtgtgagtttattaactatgaaaacataattttagcaataaggaattgaaaatccaattaactaatgtagtaactaacaggtttttctgcgcaattgaaccggagatgagacctgcatggggtaaatccatgcatgaactcctcaaacctgacggagaacttataactcttatgtatccggtaattatttcatatttttgtcgtgagaatgttccatatacaaatacaatgatatataaatatatgaattaatactttgcctttctattaattagatgaccgaccacgagggtgg

SEQ ID NO: 165406 - DNA, 614 bp, Arabidopsis thaliana landsberg; identical to SEQ ID NO: 40135

SEQ ID NO: 165407 - DNA, 1720 bp, Arabidopsis thaliana landsberg
  unsure (1)..(1720): unsure at all n locations
ttggggattttctccgaaacgaattggaggtccagatggccggaacttgcagctgcatttcaagtctagattatctctccctttattcactggaggaagagtggaaggagagcaaggtgctactatccatgttgtattgattgatgcaaacacgggtcgtcctgtaacagtnnnnnnnnnnnnnnnnnnnnnnnnnnnngttgttgttcttgggggtgactttaacaatgaagatgatgaagattggacccaggaagagtttgaaagtcatgttgtaaaagagcgtgaaggaaagagacctttgcttactggagacttgtttgttgttctcaaggaaggggtaggcactttgggtgagattgttttcacggataattcgagttggattagaagtcgcaagttcaggcttggtttgagggtaccctctgggtactgtgatggcatacgtatacgtgaagcaaaaacaaaagctttctctgttaaagatcacaggggcgaatgtatgtgttatcctttcatgttctctttatgccttgtgcttgccacttgttttcttctaaatcaacatgttgttggattggttatgtgtagtgtacaagaagcattatccacctgctttgaatgatgaggtgtggaggttagagaagattggtaaagatggggcgttccataagaggctaaccgctgcaggaatagtcactgtggaaggctttctgagacaattggtcagagattctacaaaattacgggctgtgagtgcctcctattacgtcaagctcattgttgttggatgaacattcattcaatgctcatgagtaattatgattatttgatatttgtctagattcttggaagtggcatgtcaaataagatgtgggatttgctagtggagcatgcaaaaacatgtgtcctaagcggtaagctttatatctactatactgaagattcaaggtctgttggcgttgtattcaataacatctacgagttaagtggcctcataactgaagaccaatacttatctgctgattcactctctgaaagccaaaaggtctatttcattctccttattttcttacacttatttgcctcatgatgtttggtatattgttctggaaaactctgatttacagatttttgttttggtgatgtgtgattatatagttcagttctgttatatatatgcggtagtgtaaattttttggtgtttaaatctgaaaggtatatgtggatggactggtgaagaaagcgtatgaaaattggaaccaggtcgtggagtatgaaggcgaatctcttttaaacttaaaccagcctgcgaggttggatatttctcagactgatcctgaaacagctctggcaagttactctacggtgcctcttagtcagtttcttgaatgagtgatagaaggttggctcatcagtcccttgtaatgtaactacatctcggatagtatgttctgtgatctgtatcataagtttatattctgcttctatttttgctgcagggtatagtcaagcgctggcagcagccctacctcataacccacaagcacattttgattttgttcccgagcaagatcagtttatcggaatacagcgaacctcaaactcgaatgaacatagagaatgaaaatgtaactaggttggttctcgcgtcccccacaatcatccacaggtgggtaccaaaaaataaaatcttttgctgaccaggaaaatcttaatc

SEQ ID NO: 165408 - DNA, 400 bp, Arabidopsis thaliana landsberg
atggggtttgggttcaagatcggatcaagattccgattagccaccgcattcacatggtgccttctcatcgcatcagcgtgctttgcatacaccgcatcagcagcccggttcgaggtaagaaacgagatctccagatacccaggacggaatcgtagcctcgcgattaactgttggtcgtcgaataacaaattgggcacgcatgctctcaaaccaggccaatccaaaagctggtcgttcaagccaatatttattaagataccgtttttctacacatactttgagtgcacgttcttcaccgcgtttggctcgccatttggtcagacagcaacggtttttgccggggagagattattcgggtggcaatctcaaaatccccacgaggaagagtgcatttgggtgg

SEQ ID NO: 165409 - DNA, 1179 bp, Arabidopsis thaliana landsberg
ggtgcgctcgccttcagtaagggatgcgccgaccgaggacctgcgggcggactcaacctcaggggtgcgggagaagacgctccagcctccctggagaagcctgatgacctacgggcagaactcaaccgcaaggcgtgtgggtgaggatgcccgcgtctctctggagagggcgtgtgagtgccgatagaacatcgagggtcgcaacctcgactacgactttgctgcggttgcactgcagattccaacggacgcccggtcccaagcgggtgtcccattggccggcgtggtacgccgcactagcaagtcgtctccgcgcgacgacttggccatccaagttccgaccgcacctgccggagaagtacgacggtacatcaaatccgtcggaatttttgcaggtttacgtcaccgccatcacggcagcaggtggagacaccaccgtgatggcaacatacttccatgtagccttgtctgggccagcccagacttggctcatgaacctcaccccaggatcgatctactcttgggaagagctctgtgcgtggttcacagcgaacttcaccagcgcttaccaacagcatggcgtggaggctcatctccatgcaatgaggcaggaacccggggagactctccgggctttcatctcccgcttcaccaaggtacgggggactataccttgcatctccgatgtctccattatcactgctttccgacagggggtacgtgataagaagatattggtgaaactggcgacgcatgacatggaaaccgtcactacgctcttcactctggccgacaaatgtgccagagctgctgagggcccttgcatggcactcggcaccacacactggagttacccagacgggtggctccggagccgttgcccaggatgacaaaaagaagaagaagaaccgcggccatgagaagctgtggtctatcgctctgattgtcgcaaccgcgactgggggccggagcaagcgcaacaagcgcccccggccacagggaggcaacaacggctcgtgccatgtgcaccccaatgcttgccacagcgcctcggagtgccatgagaccatcaagcgagcgacgcaaacagtcgtccaaggacggctccccaccccgttgccggcctggtaaggaaaggtccaacgacggtgaggtggccgcgggagaacgagaactcag

SEQ ID NO: 165410 - DNA, 1518 bp, Arabidopsis thaliana landsberg
ggatgaatataacaaagtgagcggcttggataacgccaagcagatctgggacaccctcaagatttctcatgagggaaatgacgttaccttgctcaccaaaatggagttgatggagggcgagcttggacggttcgcgatgataaggggcgaggagccaactcaaacctacaaccggctcaagacccttattaacaaaataaggagctacggaagcacgcgatggacggaccacgacgtcgtccgactaatgctaaggtcctttactgttcttgatcctcatttggtgaataatattcgtgagaatcccaggtacaccaaaatgtcgcccgaagaagtcctaggaaaattcgtcagcgggcgaatgatgatcagggaggcgaggtacgtggacgacgccttgaatggaccgatcaacgagccgcaacctcttgctctcaaagcaacacgaagcaaggaggcgctacctagcaaggtggcacaagttgaagcggtcgggctaaataatgaggagatgctctcatcatcaaacgcttcaagacggcacttaaaggccgcaagggacggccaagcaagaccaagacaaaggagaagcgctcatgcttcaaatgcggtaagcttggtcattttattgctaactgtcccgataatgatagtgaccaggatcaagggaataagagggagaaaaagaagaactataagaaggcaaagggcgaggctcaccttggcaaggagtgggattcggactgctcctcgtccgactccgacaatgagggactcgccgccactgccttcaacaagtcatccctcttccccaacgagcatcacacttgcctcatggcaagggagaagaaagtaagcactcctaatactagtacttatgcttcttcaagtgaggatgagtctagtgatgatgatgagatagattactcatgcttattcaagggattagatagaactaaggtagacaaaattaatgaattgattgatgccttgaatgataggaatatactgttagaaaagcaagaggatttgttgtatgaagaacatgatgaatttgttgaggcacaaaaatcctatgctttagaagttaagagaaatgaaatgctttcttttgaactatctacttgtcatgaaaccatttctactttgaaaggtgtcaacaatgatttaaatgctaaattagaagtagcaaacaaatccaattcttgtgtagaacatgttgaaatttgtactaggtgtaaagactttgacattaatgcttgtagtgaacacctagtttcaatttccaagcttaatgatgaactggctagtcttaatgctcaacttaagactagcaagaatgatttcgataagctaaaatttgcaagggatgcctacacaattggtagacacccctcaattaaggatggacttggcttcaagagagaagctaagaacttaacaagccataaggctcccattcccgccaaggagaaagggaaggcccctatggctactagtgctaaaaggaaccatgca

SEQ ID NO: 165411 - DNA, 6984 bp, Arabidopsis thaliana landsberg
cgatagatgtcagggaagagaaaataagtctcaaccttggaaagcacatcaagttgcagttcgacatcaacaaaactccacaagagtcaaaagaagatgaaaaaacctctggagatgatggagtgatcccaggagaaggatatgagactgagaaagtaaaagagagtacaaaataaaggcaagaagacattgaggaacccccgctgatgcccatgtcttccatgcaaaagaccaagagacaaggaatctcttcacaccccctctccaccagtcgacctcatcgtaaccttaccccccccccccccatcactcgacctctccgccttctccttccatcataaacactcgacttctccctttcaccttcatcccaacaacactcgactctcacttctctcatcaaccctcactctcaagctcaccaaacactcgatctcaatcaccaattcgccttaaccacttctcgctcataaccactcgaccactcttcgccaccaccacctctcattcgtctccgttttactcgaccacaactctcatcgcctctccatcatcaccgcctgctccctctctccaaggaaacaactcgacctcaccatttgattcactcgaccgccactttacgtcttctcaatcatactctcattcactcgacctctcgacaagagcacctccgcctctccatcgccacttctcaccttatcatgccaccaacaacactcgaccgcgactcctacatagcctcatcgtttccaccgctttgccacattcactcgaccaagctaccaccactttctcttctcaccgaatcattcactcgacttctccactgctttccaccgctcaagctccattagttcactcgacatcatctcattctcaaatcaactcgttcccaaatcaaacgagaagaagaaggaagacgccaccatcaacaaccgcttcactctaaccacgaaactagtttcactcgaccttacaaaatcactcgatcacaatccacagaccgaaaaagaaaaaagaaaaaaatcttcaaaaccgataggttcactttaacggtttactctgctgtattgtgtttttggttttattggaactaacgtattaacgtttatctttgagtttcatttgttttcaggtttcatcatgagtaacaacaatggaaaatcctttatggatcctgattataatgtagatgaagctgagtcttggtccactagaccagagagagaagaacacgtttacgagagctttagaggagaattcgaacgcaccgcagctcgacgtaatcagagaagagctgaaatcgccagaggaaagagagcgatgtcgagtagatatgagatgattgatgaggacatcaaaactgagtatgagccagagtcatggcgcaaggagacgaagctgctgaacaaacccgacgaggttacagtggaggagtatatcagattctttgagatgaatgacttctggggaacgaggtatccctactataagactttagcccagctgggcttactggaggacgtgcagcatctgttcgagaagtatcatctggagacactcatgtcttacccttacgctgcctataaggaggagacaatcgagtttctttccacactgcaaggggagatgtatcagggtctcacagactttgagctgtataccatgggattagggttcttgacgttcatagtggatgaacagcggtatcagatgtcgatcaagaagttggaagaactgtttggtttccctagtggaaagggaatcaaaaccaggtttgacagggaagagcttaaggatttgtgggctactattgggaacaatgtaccgctaaactctacgcggtccaagagcaaccaaatccggagtcctgtgattcgctactttcagcgctcggttgccaatgttttttactccagggagtctacaggcaccgtgtctaacacggacatggagatgatagatttcgccattacagggattctcggtcgtacaaagggaaagaatgttctgagaggcgatctcaacgacgcctgccaccagtaattcctctgttgatccacctgtgtggatacaggaagtgggcattgacaaacggcaagaaaaaagtgagaggagcactatgcgtaggtggcgttgtgacaccaattctggaagcttgtggagtactgctcaaggaaccagggttagcaccgagaatgatggacttatatcatttgcgctgatgtgagttcttggagtatgacatggttggcgacttccaccgctacaggttcgagcattcatcgattagaatcgccaacattcttctcccctgcattgatgctactaggattctcgagggaaggaacattgattcttcaagcgcaggcttgaagtcaatgttccttcctagtgttcctgacttaatcactggggacagtgatgttcaagaaggggagccttttactcaaattaaggtctttgttgttaaattcaaccattctggttgttctcgccatctcattcaatccacctcggaagagaaagcaaccataatcgagagaatggtaaaacgattcaaacctactccattaccctcacgtgctctgccatggaaattcaggaaagcgtggatggagagatacaagtctgttgcagcgaaacagctagacgagattaaagcagtgatgccactgatggaagttctcaacctgattcctgatcctcacaaagatgtgagaggtctgatattaaaaggatcaagatgtgtcacgattcagatgttgaaagagatgccactccatctcgagctgctgaccagaggattgtttaagaaaagttagaagatcctggatctttcactctaccatgttccattggggaattagctttcagcgattgtctgtgcgatctcggagcctctgtcagcttaatgccactctctgtggcaagaaggttagagtttattcagtataaaccttgtgacctgactttgatcattgcggataggtcttcgagaaaatccttcggcaagctgaaaaatctaccagtcatgattaatggagtagaagtgcctacagacttcgtggtgttggatatggaagtagagcataaggatctcttaatcctgggaagacccttcttagcttcagtgggagtagtgatagatgtcagggaagggaaaataagtctcaacctgggaaagcacatcaagttgcagtttgacatcaacaaaattccacaagggtcaacagaatatgaaagtataaaggctcaacatcagcatgcgtattcaatcgccagaccaagctcagcctctacatccgacttgcgagatctcaaaaagaaatctgatgagcaagaagagaccatagacaagctagctcagacagttgaggagcttaagagtaaactggatcagatgcaagagatagctcaatccaaatgcgagaataacactatcccgagaaaaaagattacttcaagatggtctgaggagatagatcatccaccagaagagtaagaggcctatttcgaggaaagaagaattgagtattcggctcctcatctctcaagagaggatgctgaatatgatgatgagatcagagaggactatgcagaccctctctatcacccattttcttcttaatgagtgtgaggagtcaagctagagactttaaacaagctcacttgggaggaattctcaagactgtttctgtaaataaaacttttattttctcgttatttttgatttgtttttggttgtgtttgtgattctcaggaacagagaaacaacatggaggtagagtaaaaatttaaaaattttactctacagagcaacagcggatcgagtattccagaaattcaagaatttgaaaaaacctctgttgcactcagaagccatgaggtcgagtaaactggtcgagtattagtgatgattctaaaaaccaaaattttgaaatcatatctatgctcgaccaacagaagctacagagacttacagggagtttaacaagtttacagatgattacagaaggttctagtcaactgaaaacagtgcttcaggacaaatagacagaacgtggcccaccacctctcacctttgttcccccacgcgttttaagagataacaaaatctcttccttccttccccaccactcgatctcaccttatcctctcccaccgacataatctctctccctctccaaacactcgaccaagaaaattcactctacctcacgtttctcactcgaccaaacctcaccatctctcttcctctccaaacacttgaccgcaccatcacactcgacctcaccgttcactcgatctctcccctccggcttcaccatccctcgctgctttgtcactcacttactcgacctcgccgtctcagctctcaccgctcacgcctccgccttctcttcactctccttcactcgacgatagcactccgccctcgccgttctctcccttctcaccactcgccgttcactcgaccactccgccctttacttcgccggaagcttcaccgtctcatcgtcgtctccttctcactcaaccgctactcgacctcatctccgcttccaccattcactcgaccacatcgcaatttggacaaagaagctcttcattcgattttcgacaaacggccagagtttctctctctcgttctcgcgagccaactcgacttcgccggagcttctcgccgttcactcgacctcgccattcactgcgcctccattcgtctctttactcgaccgctcctcaaaccgccaccgtcttctctaaattcgacatttactcgaccacgctgttacgtctctcattcgtgtacactcgaccgctatacccgaagccactatctcactatactcgaccgcttcactcgaccgcgtacttgactggtttagtatttgtgtttatttgaactaacatattgatatttggttttgagttacattctttttcagggaatcaatatgagtaactacagtggcgaatcctccatggatgcggattacaacgtcgatgaagctgaatcttggtcaactggaccagagagagagcgacaggcttatgagagcttcagagctgagacccaacgctcagtagctcgacgcaatgaaaggagagctgagattgctagaggccagagacccatgaccagcatatatgagttgatcgacgaagatattgacgtcgagtatgagcctgagtcatggcacagagagacgaagctgttgaataggcctgatgaagttacagtggaggagtacatcagacttttcgagctgaacgacttctggggaacgaggtacccctgttatcagactttggcccagttggggctactggaggacgtacaacacttattcgagaattgtcatctggagacgctgatgtcttacccatatgttgcttacaagaaggaaacaatagagtttctctctactttgcaagtggagatgtatcaaggacttacagcagatgagctggagagtgaagggttggggttcttgactttttcagtgaacgagcagcgttaccagctatctatcaagagcatgaaaggattgtttggtttccccagtggaaagggaactaaacccaagttcgagagagaagagttgaaggatttgtggttaaccattgggaatgatatagcgctcaactctgcgaggtctaagagcaaccagattcaaagccctgtgatccgctactatcagcgctctttagcaaatgttctgtactctagggaatctacaggcaccgtgtctaacacagacatggagatgattgattctgcactcaagggcattctccgcagaacaaaggggaagaaggtcctgaagggcgacctcaatgatgcaccaacggttatgcttctattgatccacctgtgtggatacaggaagtgggcgcacaccaacgggaagaagagggcgcgaggagccctttgtgtaggtggtgttgtgacaccgattctgattgcatgtggtgtacctctcatgtctccagggttcgatccgaggatgatggatttagatcacttgcgtcgttgtgagtttctggagcatgacatggttgccaatttctatcgctacaaattcgagcactccttgacccgaacaaccaacattctgcttccctgcatcgaggccataaccatacttcagggagaaaacattgacttcagacctgcgcgtgattacctctactttgagagcgctccaccgactgatgacaatgtccctacgacggaagctacagaggatgatattgctgagacggatgaggataagaaggaggagtatgatacgagcatgtatcatttcagtgagcacgtacctccagcgcgggagagcaagagcttgagtgaagctcacagaaacaacagtaagttgcagaggtggtgcaagaaacaagataggctacttatcaagtgcttcaaggccatcacgtttctgacggacaagataacctgcttctcttctaccacagctattccacagggagagcgtcctcaggacatgccttcgaggagatatgacgcgccagggccaagtcatcacaggcctgagccaagttaccacaggcctgagcctagtgaccgagtagtcccaccagtccctgcaaggcattcatcattcaagcctcgggagctcgggagaaaaaagaaggctgcacttgctcggtctggcagcaggagtacacaatttctccagtcccgtagcttacgcgaccgcggtgctggccgcagcagaagaagagaggtcgagtatcctcagagcggtgctggtcgccgtagagctaatgaggttgagtacccacctgctggagctgatacagaacaaggtggtttgtctatggcctgggagcaatcacaggcagccattgacgagcaactacgttcattcttcgactgaggtaagcgcctcacttcaccattgtattatatcatctgttgtgatttgtttttatttcattttgtttctgtga

SEQ ID NO: 165412 - DNA, 5631 bp, Arabidopsis thaliana landsberg
ctcatcacagtgtcaagaggtttctttatgtcatatgccctaagaatgtagaaactgttatatgatgatctactatttctggtggtagtatgggtgggaacttgtgtattttatgtggagatctgatactctatactacttcacaatgcctgatatccacatcgtcattcttatacaccattggatcaagaacatgaaaataggttttactgacccctaacttaactctacatcctcaactattatcaacaacaaagagccatttggttttctcaaaaatccatcttccacacacagagaataatcctgatccatacccaaccccttattcttagtatgaagaaaacgctttataaagcgaatcacaaaacatgataaaaaagtcacacttaaaaacgtagatgaattgatgaattgaggaagagaacaaaccactgaatctaagaaatcccgaaaaggaaggaagcgtaattttagtgtataatttaaacagttggagcgtaaaataaggaaaaaaaacggaagtgaataatctcaatttaatgcaccaaatgtcaaatatggaaataaattaaacaaatttgttgtcatcaattataagtctgtcgtaacacattgtaaataaaccggttcaccgaagctctcaaaccgggaaacgtttttaattgagcgtttaacaaaattttgaaaacaaaagtgatgtttcaaaatttgaaaacaaatctgtcaacaaaaggtctgtcatcaatgaaaaggttattctatttataaacatatatgttataacaagacatgagtaaatctcttatgcttaagatctgaaaaacaaaactgttatcagtaaaaacaaatctgttatcattaggatactgtctagtaatttattttttaaagcaaaatctgttataaaacgatagatttaccaacaagttcataaaatctttgatcacatataacatatctatcatcattgaatttcattttatttggatgactcgcctgtggccgctctaccgtatccatagtcgaatgattcatttgtgtacaggctctctgtgctttgaattagccttgtggtataagtcccaattttgataagaattaaccatgttgagaccgcagtcaatgcgagctgccttgcttcgagcctggtattacgtatcccatgaaaaagagatgaactactagctaaaagacacgaaccgaccaagcaaacgcctcgcatcgataaacctcaacccgacgctccgaatcacaacaaaggcgcccaaggcgggacattcgttcaccatgaaggacaaaatttctctagagcccataattaccaggccgatcgccccaaggcgaagccgcccgaggccgagggcgaggccgcggacgaggacgcggtcgggaatcctacacgtggacgaaggatcaacccgcaggaaacgagcaagaatattgcgagttgcataagagttacggccatcacacttccagatgtcgctgcctcggagcaaggttggtagcaaaattcctggccggagaaattggtggaggtttgaccatcgatgatttaaaggcagaaaaaggtaaaaccgagcaggtcaacgctgtggccaatcctgagcagacagcccccgcggcaaaccccgaaggacccaaaagaggccggggtaatcgccaaacagacgacgatgagccagaagctgctcggggaaggattttcacaattttaggggattcggctttctgtcaagacacgacagcatcaatcaaggcatatcaaaggaaagccgacgcgaatcataactggacgcggccatttaatggaccaaatgacgaagtaacctttcacgaaagcgataccaacggtttagaccgtccacacaacgatcccttagtcattacactgaccatcggtgatttcaacgtcgaacgagtcctagtcgacacgggaagcacactggacatcattttccttacaactctgcgagaaatgaagatcgacatgacgcaaatcgttctaactccacgacctgtgctcgggttctcaggggaaaccactatgactctcggaaccatcaaactgccagtccgagccaaaggggtaacaaaaatcgtcgatttctctgttaccgaccagccgaccgtgtacaacgcgattatcggcaccccatggctaaatcagttccgagctgtcgcctcgacgtatcatctatgcttaaaatttcccacaagcgacggcgtgaaaaccatctggggaaaccagaaaaatgctcgcatttgcttcatggcagaacacaagctcaggaaccccgtcactgagtcgacggccgacgcgaatcataagaaggccaagcttggccgagctcaagaaaagtcaatctccgagcagttatagcagctaaagatcgaagaagctcaaaaatctacgacaccaactcccgatccgatcatctcaatttgccttgacgacgcaaagcccgagcgatgcgtagaaatcagcggagatgtgggagaagaactaacaactgaactcactgccttcctcaaagaaaacgtcaatactttcgcctggtccccagaagatttgcccggagtaagtgttaacgtcgtatcacacgagctcaacatcgatccaactttcaaacccgtcaagcagaagaggagaaaattgggtcgagagtgagcagaagccgtaaaagccgaggtagaaaaattattgaggattggatccatcactgaggcgaaatatcccgattggatcgcaaacccagtcgtagtaaaaaagaaaaactgcaaatggagagtatgcgtagatttcatagacgttaacaaagcttgcccaaaagacagcttcccattaccacacatcgatcgcctcgtggaatcaacttctggaaacaagctactgtcgttcatggatgctttcgctggttacaaccagatcatgatgaaccccgaagatcaagaaaaaaccgctttttacacagagcaagtaattttttgctaccgagtgatgcccttcggactcaagaacgcccgggcgacctatcaatgcttcgtcggcaaaattttttccttacagatcggaaagacaatggaggtctacattgacgacatgttggtgaaatccatggaagagaaagatcacgtgacccacctgcgcgaatgtttcaaacaactaaacctatacaacgtcaaactcaatcctgcgacgtgtcgcttcggagtaagatccggcgagttcctcgggtacctggtcacacatcgcggcatcgaggcgaatccaaagcagatcgaggcattgctgggaatggcatcgcctcagaacaagcgagaagtgcagcgcctaaccggaagagttgcggcccttaaccgtttcatctctcgatcgacagacaaatgcttagccttttacgatgtgcttcggggaaacaaaaagttcgagtggacaatccgatgtgaagaagcttttcaggaactcaaaaagtacctagcaacaccgcccatcctcgccaaacccgtaatcggagagccattgtatttgtatattgccgtatcagatactgcagtcagcggagtgttagtccgagaagacagaggcgaacagaagccgattttctacgtctcacagactttcaccggcgcggagtctcgctatcggcaaatggagaaacttgctttaacggttgtaatgtcggctcggaaactgcgaccctttttcaatcccattccatcgtataatgggatccatgccgctccgcgctgtcctacacagtccaaaccaatagggacgcctggctaaatcggcaatcgagctcagcgagtatgacatcgattatcggatcaaaacatgtgcaaaatcacaggtcctagcagattttatcgtcgaattacccacaaaggaggcccgggagaatccgctcgatacaacttggctattgcacgtaaacggctcttcatcaaagcaaggtttgggcgtgggcatccgtcttacctcgccatcgggagaggttctcgagcaatcattcagattaaacttcaaggctaccaacaacgtggctgaatacgaagcgctcgtagccgggggctaaagatagagaaaatccgagcttttgtgactctcagctcgtcgcaaatcaattcaacggagaatacacggctcgggacgaaagaattgaagcatatctggctcatgtacaaaatctggcgaagcatttcgacaaattcgagttaacgaggatccctcgaggagaaaatacatcggctgacgctttagctgctctggcctcaacatctgacccaagcttgagaagagtcatcccattggaattcattgagaagccaggaattgagctcggcgaagaagaacacgtcctcccaatacaagtcagcgcggatcaagacgacccgggtgactgcagctcagtatggatggaacccatcataagctatatatccgaagggaagttgccctcggacaaatggaaagctcggaaactcaaagctcaggctgcacgtttcgttctagttgatgaaaaactttacaagtggcgattatccagacccttgacgacatgcgtggaaggagaagcgacttgcaagatcatgaaggaaattcacggtggctcgtgcgtaaatcattccgggggaagggccttagccattaaaataaaacgccacggattcttctggccgacaatgatcaaagactgcgaaattttttcaaaacgatgcgaaaaatgtcaaaggcacgcaccaacaatccatcagccagccgagctcttgtcatcaatcgcctcgccatatccattcatgcggtggtcaatggatataattggacctatgcatccttcaaagcagaaaaagttagttctcgtattgactgaatcttacgccagcatcaaggacgctcaagtcgagaactttgtgtggaaacatatcctatgtctccagaggataccttacgagatcgttacggataacggctcgcagtttatatcaactcgcttccaaggcttctgtgataaatggggagttcgacttagcaaatcaacaccacgatatccccaaggaaacggccaaaccgaagccgcgaacaaaacaatcctcgatggtttgaaaaaacggctcgctgctaaaaagggctcgtggtccgacgaactcgagggtgttctatggtcgcatcagacaactcctcgttgagccacgtgagaaacccccttctccttagtctacggaacggaatgcgtaattccagccgaaatgatggtaccgagcatgcgccgatgtctatctcccgagaacaaaccagataatactcacaggctgctcgacaaacttgatctgatcgacgaacgaagagattcagccttggttcgcatacaatactatcagaatgaaacggctcggtattacaactcaaacgtccgacagcgaagattccatgaaggagatcgagttctccgaaaagtttttcaaaacactgccgaaccgaacgctgggaagctcgtgacgaactgggaagggccatacctgatctctaaggtcgtccgacccggagtatatgagctcgccgacttaaacggcaaagtcgttccaagatcctggaacgcaatgcacctacggaaatactacaactaa

SEQ ID NO: 165413 - DNA, 1441 bp, Arabidopsis thaliana landsberg
atggtcaataattagatccttgctaccaccgttgacgcggagggaaacccgatccctccaatccaggtaaacgctcctgaagtcaacgctcccgcagtcctagcaaagctgaggagcatgatggcacaactccagaagaaggtgaacgatcaggagcaagcaaaccgatccttggcccaacagctcgaagtggctacttctcaagggcaggtcaggaccacccgctttggcgcacaacactttcctgatcggtgagcagcggcagatctcaatccaacgagactcgtgttcaacacacaccggtaacacgacgaggccatttcggcggactgcgccagcactcggcggactgcgccagcactcggtggaacccgagcaaaacatgacgaaccgagtagaggaagccgacccgcaggtcccgattccccgagccgaatctgacgaggctgaccagatcaaagtctctaacggccaaaagattcggaggaaaacattaggatgggctgaggagtaagctagggagtaggaaataaatgccatcaagctcttcctagccaatgcagatgccgagatgaagctcgtacgatcacagatgcatagcgctggctactcagtcccaaacatcgatcgcattctagaagtactcacaacacgcctttcactcacatgatctctaacgcgataattttagacccggggaaactgagaatcgagtacttcaacgggtcatccgacccgaagggccatttgaaatctttcataatttctgtggcccgagccaagttcaaaccggaggagagaaatgctggtctctatcatctgttcgtcgagcacttgaaaggaccagccctagattggttctcaagactcgaagggaattctgtcgacagttttctggagctatcgacgctcttcctcaagcaatactcggtcgctgtctcaacagccgaatgagccacttactgagccgctttcctcacaatgttttgatccaccttagctaaagttgagggaataaatgacgtcgcggctctctccgctctgaagaaggcactatggtacaaatctgaatcgcgaaagaaattaaatctgtttaaaccaaaacaatccgggacgccctgcactcagcctcagattatgtttccaataaggaagaaatggaagtgctatcgaaaagggcacgagtcatcgaaacaaacgcctcgtggcgaaaaatcccaacctagctttgaaggcgggaatttagtacaccatgaggggcgaaacttctccggagcccacaattatcaagtcgatacaccccgccgttgagggcgaggccgcggttgaggtcatggacgagaatcatatacttggacgaaagatcaacctacgggaaatgagcaggagtactgcgaaatacgtaagagctacgaccatcacacttttagatgtcatagtc

SEQ ID NO: 165414 - DNA, 1353 bp, Arabidopsis thaliana landsberg
aaagttaagttaagattcttttgcaatattaatggggatgaggtgagtgaaaatgctcatattgcgcggtggatcaacgatgttgttaagcgaaaagttcacaatctcgatcttacgtggggtgcagtagagatacctccaatcctatacttgtgtaacagtttggtgtctttaaagctttgtggcgtaaccttgccaaatcttgagcttacgtctttaccgtgtgtcaaagttatcgttctagaatgggttaagtttgcaaatgatttggctttggaaatgcttatctcaggctgcctagttctcgaaagcttaactttatgcagacgtcccaatgacaatgtaaaagttttacgtgtgagttctcagtctctattgagactcaactataacggctccagttacaagggtcttcatgatgatctagtacttgaaattaatgctcctaagcttaagatcctcaagctgctctctcatcaattaactacaagtctcataagccatacttcgagttccattgtagaaacagataacaatattggtttgggaaagaaatttgatcccaaggatctgccaaagagaaatatgatttgcaattttcttgccgggatctccagtgtcaaaaatctgttcattgctccatgtactcttgaggtaacatattttttcttctaagaatgttaatattccattaaaaatgaaaaagttaggaattacaagaatgtaaaacctatagtttggtctcatggcaaaaacgaataaaaaacatgaaagcaaatatcaatcagtcaactggtccactattttagtatttaagtttatcctgatactttaattttcttgtatttatttttcttgtaggtcatttatgattactcaagatgtgaaccactgcccttattctgtaacctatcttacttgagcgttgacttctacaacaacagctgggaaatattgccaatctttcttgagagctgcccgaatctaaaatcccttgtcgtggttagaatcgttcacataaaacttgtgtactttctttggtataaatgcaaatggggaaagtacattatgactcaaacatggatgtattttcagggatctataacatctccaaagaggagaactagtgttttatctggacctaggcgtctcctatcatctcttgagtatgttgaaatagaatcgccattgacaggggaggtctttgagatgaaacttgtgagttacttacttgagaactcaccaatcctcaagaaactcactataaatttggatgattcttctagaaagaaagcagaatgtgaactacttaccattccaagacgatctacctcatgccaagttgtcgtcctc

SEQ ID NO: 165415 - DNA, 465 bp, Arabidopsis thaliana landsberg
atggcgaagccagcatgcatgcccgtcactcctcaggagtatcttcggcaggagcgcgcgcgcacggaagggcgggcggaactgctcgatggcgagatcgtgatgatggccggggcgactcggcggcacaaccgaatcgtaagctcaatcgacgttgctctgaatgttcgtctggccgcggggcattgcgaagccatcgtcaccgacatgaaggtcaaggcgcaggcgacggagtcctacacgtaccccgacgtagtcgtcttctgcgatgatagcgccgagtttgaggacgaagaagaagatgttcttaccactccgctggtgatgttcgaggttctttcgccttcaacccgggggcgggaccgtggagacaagtttgcctactaccggacgatcccgtcccttcgtcactacgtgttggtggatacgcagggacgcgaggtggaccattacgctcgtcaaggc

SEQ ID NO: 165416 - DNA, 1062 bp, Arabidopsis thaliana landsberg
ctcgccaatgacgacttccatcgagtattcctcagtttccgaggagatcagttgcgctacagctttgtcagccaccttctggacgcctttgagagacatggaatcttgtgttttgtagacaaagacgagctaaggggggaaaacatgacaaacctttttgtaaggattaaagagtcgaagatcgcactagttatcttctctagtaggtactgttaattaactaagacttacgagtgaagataaccaatatttatatctcttctttattcaatctacttcaataagaaaggtaaaaaaatctatatagatgcatgttttaattgttcgctggtgaatcatgtttgattttttacagtttttttattgacagtatggtcataatcctgtaggtatgcggagtcgagttggtgcatgaatgactggtgaggatgaagaaacgtgcggataaaggaatgctccaagtcattcccatcttctacaaggttagggcaagagatgtgagaggacagaccggtgagtttggtgaaacgttttgggcgcttgcaagaacttctcgaggagatcagatcatgaagtggaaggaagcgctagagtgtatttccaacaagatgggcctgtccttgggagacaaaaggtactactagtgcttctgcttttatgttttttttcttcctttggtcaaataacatgcaatttgtacatgtagttttaatcaggtgataacatagcgacgactacaaatactgatcttgttttttttgtcattttacgttatatttactaaaacaaatgaatgtagataagttggttcatttatcgcatatgctttcttaaattcagatagaatatgcacatgttttaaagcaaatgttattttgtttatcaataacacacatcactatcttatattatctctatttttttcacatttaattaaatacaagaaaaaagaaaattccatgtttgagagaaaagcataaacgccaagggacatggaatctctctgtaaaatttagattttgtgtatgtgtgtgtgtgataaagataatgttaagggtgttt

SEQ ID NO: 165417 - DNA, 799 bp, Arabidopsis thaliana landsberg
atctcaaaacaagggattacagcgcaatgtttcttccggccaaagaaatttttcaggatgttgtttccaaagaaaaatttattattgaacaactttgagtcatcattaaccgagagattgaagaaactcatacctcaaaatacagatgagattctcaccttaccttggatgattctagctatggaattactttatgatacacataatgatataaacattctcatcactgatctcaagcttcattatatgactgattcggagcatggatattggtttgagaattacatgaacataaatacaaaattgctcgatctgtgtaacgcttttatgtccttgcttcgtcacatgaaccatggcattgtttgcttaaagttccttaggcataaattagaaatgaaatctgaggatctatgcactgagatttgttccgcacttgatagttggagggaaaatatcaccgcggaaatatcgaaatgccgcgaagttcttgggagatatgttgaatcattaaactttcataaagtcaagaattgtataaaagaagcaaaggttcttatgaaggcattttatggggctaatgttcttacggcttatatctgcagtgtctttgtgatagttttgtcgaattccaacaaagatattttgcctatatatgtctggaagcaatcattgtggaaaaaagatttcttggatttgcagactatcgtaaacgtcaaaacaagagttaatatttccactgatggaacaatggtactccaagagttagaatctgttgctgccaaaatagctgagagaacaa

SEQ ID NO: 165418 - DNA, 463 bp, Arabidopsis thaliana landsberg
  unsure (1)..(463): unsure at all n locations
aaaaacagcattttcttgcccccgaatgcgggcactatggtatcttcagcggtcgccgctggcgggaaatgatttatcccaagatacgagaattcattgctgcgaatgcctgatgttctgactgaacaaattgatgatttattgccccaaacccaatgtcagcaatgtgggtttggcggctgcttgccctacgcacaggccattcaggctggcaccgcagacatcaaccgctgcccaccgggcggcgaaatcaccatcacattactcgcaaacctactcggcaaggctgaaaaaccgcttgatcctgaatgcggtcaaaccgtggtgcgccacattgccagcattcagccagagcactgcatcggctgcaccttgtgcatcaaggcctgccctgttgacgccattgcggtgcanacaagcaccgacacgctgtgatttgcccgctgtgcacaggctgtgaact

SEQ ID NO: 165419 - DNA, 616 bp, Arabidopsis thaliana landsberg
atgctgcctaaactctgagtgcaaagacgatggcagcgagagcgtgtgggtggtttattggaaagtcattgcaactccataaggcaccgaaactagattgtttgattgtcgaactcggtccacattgtcctattgacgtcgatgtcagaaagtggattgagaactgcagttaatagagatgtggaagagttagatttcacgctcctctggagcgcagcgcctacaagctttcctaagagcctttacacatgtgacacgctcgtttgtttaactctatccaaccagattctggtggatgtgtcttccccggctagtctaccatctctcttagatttgagtcttcattacgtggtgtataaagacgatggctctcttgttaggctcttatcaagttcccctgttctcaagaggctgagtgtgcatagacatgaggatgacaacttaaaaacctttaccgtgaaagtttcttccttagaatcattatattatgatgagaattggctcaagaatgaggtagaggataaagagattgatgaggttaggataatgaggttgatgaggtagtggataatgaggtagaggttgatgagggtgatgatctcaatggatcgttggt

SEQ ID NO: 165420 - DNA, 748 bp, Arabidopsis thaliana landsberg
atgttttactcgcttttactcgcagaggagactgaggtagaggaatctgtggatgattttggaaaagatgaaagattggatttagatgacaatgaacctgagtatgaggctgaggaatatggcggggaggagtttgaagagagggaattgggacaggaggaccatgagttggtaaatgaggagggggaagaactggaggaagagattgaggtcgaggaggaagctggtgagtttgcagacgagattggagatggtgcggaggaccttgatagtgaggatgatgatgatgatcatgctaatgaagaggtcaagcatggagaaactgttgatgtggaagaagaagagcatcatgatgttctccatgagaggcgtaagcgtaaggagttcgaaatatttgttgggagtttggacaaaggtgcttcggaggaggacttaaagaaagtgtttggtcatgtgggcgaggtgactgaagttaggattttgaagaatcctcagacaaagaagagcaagggttctgctttcttgcgttttgcaactgtggaacaggcaaaacgagctgttaaagagcttaaaagcccaatggtaattgtctacactttagtatttgatggagagtttgtgtagctttacattttatatcatgctcttggtcattgggactgcagataaatggtaaaaagtgtggtgtaactgcaagccaagataatgataccctcttcgtttgtaacatatgcaagatatggacccc

SEQ ID NO: 165421 - DNA, 608 bp, Arabidopsis thaliana landsberg
gcacggtttggaattcttcatcgatcacaaaaaccctaaaattcgatcggaaggaaagattcgtcgggatctttggatgaagtttttttacgcttcaggtagagaaaagagccgtgataatagagaagctgcggtgaagatcccgacgcacgcaacgatgaagaagactggagattcaaagcgagacaaagtgcgtgagattctacaaacatctttggctaaagtcgcttctgaggttgttgacacggagatgaagacacgagtgactgcttgtgatccttgggttgtggctgtatctgtggaaactgcaatgtttgagaacttaggttgtttcatgggacctcaaaaagcaaattaccggtctattctgttcaacatgggagatagtaacaatccagatttgaggaggaaagtgttacttggtgagattagtggggagagattagtgaagatggagaaggaagagatggggagtgagaagattcagaaggaggttcaaaggattaaagagagagcaagatttaaggaagagagtcgcgtgaagatgctttcatcagcagatatgatcatcatttagttagctgcagagatttagtcatgagtttcat

SEQ ID NO: 165422 - DNA, 1221 bp, Arabidopsis thaliana landsberg
atggtgaagctctctccaataacaatgatggttactctactctttcttgcatttggccttgcgcatgctagatactcgattttcccaaccgagcatttctttttccatcacaccatattagtgaaccaatatctaggagtatttccaattcctcatccagttccaccttcgccgggacatccaccacaccaaaacgcgaagatatcagtgaaccaatatccaggcgtatttccaattcctcatccagttccaccatcaccgggacatccaccacaccaaaacacaaagatatcagtgaaccaatatcctgacgtctttccaattcctcatccagttccaccatcgccaggacatccaccacaccaaaacgcaaagatatcagtcaaccaatatccaggcgtatttccaattcctcatccagttccaccatcgccaggacatccaccacacttaaacaaaatatcagtgaaccaatatccacacatattaccaatttctcatccagttccaccatcgctgaaacatccaccacaccaaaacgcgaagatatcaatgaaccaatattcaggcgtttttccaatttctcatccagttccaccgtcaccaggacatccaccacaccaaaacaagaaaatattagtgaatcaatatccacgtatattaccaatttctcatccacttccaccatcgcagggacatccaccacaacaaaacgtgaagatatcagtgaaccaatatccaggcgtatttccaattcctcatccagttccaccatcaccgggacatccaccacaccaaaacaagaaaataccagtgaaccaatatccacgcatattaccaatttctcatccagttctaccatcaccaggacatccaccacaccaaagcgcgagtatatcaatgaactaatatccatacaaatctctttgtcattcgggttataaaaaatgtatcccataaactagtatgttttaaatggaaataagacaacataagatatgttgtattattgtgaatttttatattataaatctaaattacttcatccataattagagctataatatttagcataaacatatatatgctaatggtaccttatgtttcatattaatgtcaaatttgaatggctaggatgctttggtaacgatgagtgatagtattttgataaaaattttggccttctcttgaattctggtaagaattttttttctttttttc

SEQ ID NO: 165423 - DNA, 358 bp, Arabidopsis thaliana landsberg
caaatttgcggatgccaccggcgatcaccagtggatccacgtggatccggtgaaggccgcggccggtcctttcggtgcctgcattgcgcacggctatctctcgctctcgctggtggccagcttccaggaacagatggcgacgctggaaaacctgaagatgggcgtcaactacggtaccgacaaggtgcggttcccctcggccgtcaaagtgaattcgcgcctgcgcggcaagggcgagttgatcgccgctgaaaagaccaaggacggcggcgtgcaggccatcatccgtgtcaccgtcgagatcgaaggcgcggaccgtcccgcctgcgtcgccgaaaccatttcccgttattacttc

SEQ ID NO: 165424 - DNA, 959 bp, Arabidopsis thaliana landsberg
agaggatccatcaatgttctacaacatgggttggatcagatgtttgttcttacaaaggtgtgttctgttttggtcaatctataacctctatagatcttaaccatgcaaatctcaaaggcacacttgtcaaagacctagctttactctcagacctcaatattctccatctcaacagtaacagattctcagggcaaatcccagattctttcaaatctttagcttctcttcaagaacttgatctaagcaacaataaactctcaggtcctttccctttagtcacactctacataccaaatctggtttacctcgatctccggtttaatagtttaaccggtttcatccctgaagagcttttcaacaaacggttagacgcgattctcctcaataacaatcaattcgtcggagaaatcccaagaaacctcggaaattctccggcttcggttattaatctcgcgaataacagattttccggcgaaattccgacgagttttggtctgacgggatcgagggttaaggaagttttgcttttgaataaccagttaaccggttgtataccggaatctgttggtatgttctctgaaattgaagtctttgacgttagctacaatgcattgatgggtcatgttccagatacgatctcttgcttgtcggcgattgaaattttgaatcttgctcacaataaattctctggggaggttcctgatttggtttgttcgttgaggaatctgattaatctcactgttgcgttcaatttcttctctgggtttagctctgaatgttcttccagggttagtttcgggtttgatttcgttgggaattgtattcccgggaggaattcgcagcggccgcagccggattgttccggttattccagtggtgcgatgagctgttttaggattccgacgcagcctttggcttgtgcggcgataagtgttggattgagagagagtaataatcag

SEQ ID NO: 165425 - DNA, 3378 bp, Arabidopsis thaliana landsberg
gataacaattaccaaagtccagacagtgctcaggccttttcttctctgcgaatttcagatgagtccggcaaagaatggcaccctgactccgctgctaccgctcatgtcacctcctcaaccaacaatcttcagtcagctacaccttatgctgggaatgacacagttcttgttggtgatggagcttttcttcccatcactcatgtaggatccaccactatttcctctggaacaggtacgattccattaaatgaggttttggtatgcctagatatacagaagttcctcctctctgtttcaaaactctgtgatgattatccatgtggagtatattttgatgctaataaagtctgcattattgatctaaatactcagaaagtggtgtccaagggtcctcgaaatagtagtggtctatatgtgttgaagaatcaggagctagtagccttatactctaatcgtcagtgtgctgccacagaagagaagtggcatctgcgtttaggacactgcaactctaaggttcttcaacatctcaacaccagctaggaaatcattttgaataagagcagcacctcccctgtttgtgagccttgccagatggagaaaagtactagtttacagttttttgcttcagaatcttgtgtgaagaatcccttaggtcgaatacattttgacctatgggggccttcaccagttgtatcaaatcaaggattcaaatactatgcagtttttattgatgattttacaagattctcttggttctatcatttaaaggcaaaatcaaattttttctcggtgtttgttgcttttcaaaagttggttgaaaatcagtttgatgtcaagataaaagagtttcagagtgatggaggtggtgaatttacaagcattcaaatgaagactcatctaaagaacagtgggatacaacagggaatttcatgtccctacactcctcaacaaaatggggttgcagaaaggaagcaccgccacattgttgaacttggtctctccatgatgtttcacagtcatgtgccattgcattattgggtagaagccttctccaccgccactttcatcatcaatcttcttcctgttcttcaaagcaacacaagtcctcatgagcgtctatttaaacaaaaaccggtatacactatgctccgggcttttggatctgcttgttatccttgcttaagaccacttggtagtcacaaattcgagccgaggtctcttcaatgcgtttttctgggatacaaaagagaataccagggatatagatgtttatatcctcccactggtagagtatatatctcaagacatgcaatttttgatgaagatgtctacccttttcaacaaaagtttcagtctcttattccaaggtatcactccacacttctcgactcttggcaacagtctttcatgtctaacaaggttcaggaggaaccagaagtacctataattcctcccacacatgtgaatcagtcttcaagtgaacctgaacctgcagtagaaccagtcactgatgaagtaactcagaattcaccatcagaaacagaatcttcaaatgaaatagaggaatctattgatgagcaagtcacagtttctgaaacacatcctattgcggaagctcaagtcaatactcatcccatgagaacaagggccaaggatggaattcataagccaaactcaaggtatgtgttgcttacatctaaatttgcaacagaggagccaaaaactattgttgctgctttgaaacatccaggctggaacaatgcagtaaatgatgaaatgaggacaatacatatgctacatacttggtcactagttccaccaactgaagacatgaatatcttggattgcaagtgggtgttcaaaacaaaactgaaaccagatgggtctctggaaaaattaaaagctagactagtggccaaaggatttgatcaagaagaaggcttagactacttggaaaccttcagtccagtggttcgaactgctactattcgaatggttctcgatattgctacagcaaaagaatggtatataaagcaactcgatgttacaaacgcctttctccatggagaattacaagaaccagtcttcatgcgtcaaccaccgggctttatagatcaagaaagaccaagtcatgtttgccgtctcaccaaagctctttatggactcaagtaggcgcctagggcttggttcgacaccttgagcaactttcttcttgatttcgggttcacatgctgtaagtctgatccatctctcttcacttaccacaaaaatggcaagactctagtattactcctctatgttgacgacattctgttaacaggaagtgatcaaagcctgctagaagagctactcaaatctctcaactcaaggttctccatgaaagatcttggtctacctaaatactttctgggagtggagattgaaactcatccaggaggactttttttacaccaaactgcctatgccaaagacattctgcatcaggcatcaatgtccacatgcaattccatgccaacccctctgccacaacaaatcgataaccaagattcagaactcttctcagaacctacctattttcgaagtcttgcggggaagttacagtacttgaccataacaaggccagacattcagtatgcagtaaacttcgtgtgtcaaagaatgcatgctcctaccacagctgacttcagttttctcaaaagattgctcagatatgtcaaaggtacaattcatatgggattacacatcagaaaagatcagaatctagcactctctgcttatagaaacagtgattgggcaggatgcaaagaaacaagacgctccaccactggtttctgtactatgcttggtcctaatctcatatcttggtctacaaaaaggcaagaaacagtgtcaaagtcaagtactgaagcagagtatagagctctcacggccgttgctcaagaactcacatggttgtcttttctactccgagatcttggcgtatcacagtttcatccaaccctagttcgttgtgataatctatccgcagtatacttgacagcaaatcctgctctgcataatcgattaaagcatttcgacaccgactaccactacattagagaacatgttgctttggggctcattgaaaccaaacacatctctacaactctccaacttgcagacattttcaccaaaccgctgtctagaaaagcctttgtcgatctacgtaccacacttggtgtcgctgaaccaccgaccacaagtttgagggggaatgtgagtcagtcatcaaatgagcaactgggccaaagtaaagataagcccagctcatgtccagttaccaatctaagcccacacactaaatcccagaacacgacaaaggcaaaaccctctaaagct

SEQ ID NO: 165426 - DNA, 1808 bp, Arabidopsis thaliana landsberg
atgcttctctaaaagatgtagcgtcagcacgcaaggtgttcgacgaaattcctgagagaaacgtaattatcattaatgttatgattagaagctatgtgaataatgggttttacggtgaaggtgttacagtgtttgggacgatgtgtggttgtaatgttagacctgatcattatactttcccgtgtgttctaaaggcgtgttcttgctctgggaatattgtcattgggaggaaaattcatgggtctgctacaaaagttgggctctcttcgactttgtttgttgggaatggtttagtttctatgtatggaaagtgtggatttttatctgaagcaaggcttgtacttgacgagatgtctaggagagatgtggtgtcttggaactcgttggttgttggttatgcgcaaaatcagagatttgatgatgctttggaggtttgtagggaaatggagtctgtgaagataagccatgatgctggtacgatggctagtctgttaccagcagtgagtaacactacaactgaaaacgttatgtatgttaaagatatgttttttaaaatggggaaaaagagtttggtttcatggaatgtgatgatcggtgtgtatatgaaaaatgcgatgcctgttgaagctgtggaattgtattcccgaatggaggctgatgggtttgaacctgatgcagtctcaatcacaagtgtattacctgcttgtggagatacctctgctctgtctcttggtaagaaaatccatggatacattgagaggaagaagctgataccaaatctgttgttagagaatgcactgatcgacatgtatgcaaaatgcggatgtttagagaaagctagagatgtgtttgagaacatgaagtcacgtgatgttgtgtcttggacagctatgatttcagcttatggattcagcggacgaggctgtgacgcagtggcattgttttcgaaaatgcaagattcgggtctcgtccctgattcaattgcgtttgtcacaacgcttgctgcttgtagccatgcggggttactagaagaaggtaggagttgtttcaaactcatgacagatcattacaagatcactcctaggttagagcatttggcttgtatggtggatcttcttggccgagccgggaaagtgaaagaagcttacagatttatacaagatatgtcaatggaaccaaacgagagagtttggggagcattattaggagcttgcagggtgcattctgatacagacatcggtctactagcagctgataaacttttccagttagcacccgagcaatcgggttactacgtattgctttctaacatatacgcaaaggctggaagatgggaagaagtgactaacatcagaaacataatgaagagcaaagggttaaagaagaatcccggagcaagcaatgttgaggtcaacagaataattcatacattcttagtaggcgacaggtcacacccgcaatccgatgagatatacagagagctggatgttctagtaaagaaaatgaaagagttaggttatgttcctgattcagagtcagcgcttcacgatgtggaagaggaagataaagagacgcatttagctgttcacagtgagaaattagccattgtgtttgctctgatgaacactaaggaggaagaagaagacagtaataataccataagaataacgaagaatcttaggatatgtggagactgtcatgttgcagccaagcttatctcacagataacttctcgagagataatcatcagagacactaatagatttcatgtgttccggttcggtgtttgctcttgtggtgactattgg

SEQ ID NO: 165427 - DNA, 968 bp, Arabidopsis thaliana landsberg
  unsure (1)..(968): unsure at all n locations
ggatttttctggggtatgagattgggggtttttagctgaggaagctcagttttattctaaaattggatcgagattccttgcgaagaaagtgacctttagggttcttcttactaatttgagagccgaattagctttactttctcttggtagctatatttagatctctcctttagcttttgattgattgtgacattgtgatgtttttggtattgttctatgagcaacagggacgcaagcctctacctggtgacatggttggatcatcttctcgagcaactccttactcttcccataaccaaagtcctctttcttccacttttgatagccccatcttatcttaccaagtcagtccttcctcttcttcattcccgagtccttctcgagttggtgatccacacaatatctccacaatcttccctttcctcaggaatggtggtattccttcatcgcttcctccacttagaatctcaaacagtgctcctgtcactccaccagtgtcatccccaacttctagaaactccaaaccattgcctacttgggaatcttttaccaaacaatccatgtccatggctgctaaacagtcaatgacttctttgaactacccgttttatgcggtgtctgcacctgccagtcctactcatcatcgccagttccatgctccggctactatacctgaatgtgatgagtctgactcttccactgttgattctggtcattgaataagctttcaaaagtttgcacaacaacagccattctctgcctctatggtgccaacctctcctaccttcaatcttgtgaaacctgcgcctcagcagatgtctccaaatactgnnnnnnnnnnnnnnnnnnnnnnnnnnnnnnnnnttaaatttgagaatagccaagttaagccctgggaaggagagaggatacatgatgtgggtatggaggatcttgagcttacacttggaaatgggaaagctcgtggt

SEQ ID NO: 165428 - DNA, 443 bp, Arabidopsis thaliana landsberg
tgaattaaactctgtttctctgtctcttgggttaggatttgctctcagagtactcaggcttcttgagcaagatgattaaaccagagcaataagaagaaaaagaatcccaaggccagtagaatcatcatcgaggttgagaattttccaggtgggtcagatgggttcgacttggttttaagattctgttatggtggaggaatctcgatagatgtctcaaatgtgtccattctgcattgctcttctgtcttccttgagatgacagagaaactctgttcctccaatctcttgcttcgaacagagaagtttctacaaggaatgttctactggtcctggaccgacatcgtattgtgtctcaagagctgcgagcaagtgttcttacacgctgattcatacggtcttgttgataagcttgttttcggggttttagccaagattcctcagaa

SEQ ID NO: 165429 - DNA, 570 bp, Arabidopsis thaliana landsberg
  unsure (1)..(570): unsure at all n locations
gatgttatggatcgtgaagaggatatagatgatgaagncgatatagatgatgaggttgcgtcccttccattattactagtaagccaagctaatcaaaagcagtctaggaagagggaagaaaaaactgaaaaanatcaacctaagagggttaagaatcagaacatcatgaaaataaatatccatgacttttcagaagaaactctgaggttaattgaggattggtacaacgctgaactcgatccacaggatatattcggcgatgatgaggtgacgaggcgattcagccgaccgataaagaagcagttgatgtcgagcgacgtcgatacagatcaaagcaggctcatgttatcgaaggagcaagtgaaggagaagatgcttccttttctagaagaatcagaggatccggtaaagggggttgatgtttcggtgtatggaccagacggggaagttcaacagatgaagttcaagatgtggaatggggataaaacacctgtcttaacttcagggtggatacagtttgtggcagattatggtcttttgaagacttgtgattttgtcactgtttggatg

SEQ ID NO: 165430 - DNA, 981 bp, Arabidopsis thaliana landsberg
aaagactgcgaaacgttcttcttctcatcaccacatcctcaagatctgtctcctatagccgcaaatttgcatatgagtttcccgatgagctgtccctctaatatttgtcgtcctgttcgtggctgggtatgtggtttacatcaacgaactacaaagggaacgacggttactgagccattgatatgtaaccctagcacaggggaatccgtggtcttacgtaaagtgaaaacaaggaggaaaggagtgataagctttttggggtttgatccgatcgacaaaaatttcaaagtattatgcatgacgcgttcatgtataggacgagctgattctgaagagcatcaagttcacacgttagaaaccgggaagaaaccgtcaaggaaaatgatcgaatgtgacatactacattatcctgttcctgtggagcatactaatggcttttctcaatatgatggggtatgcatcaatggtgttttgtattacttagccattgtccatggtgtttctgacgacaggtatcctgatgtagtatgctttgagtttggatctgacaaattcaaatatatcaagaaagttgctggtcatgacatggaaatattgtacttgggaaggcggctgaattcaattctagtaaattacaagggtaaattagctaagcttcagcccaacatgcctaacaacgtatgcaccggtattcaactatgggttcttgaagacgcggagaaacacgaatggtcaagtcatatctacgttttgcctcctccgtggaggaatgtatatgaagagaccaagttatgtttcgttggaacgactcgtaaaggtgaaattgtgttgtccccaaacactatatccgactttttctaccttctctattacaatcccgataggaacactatcactatagttaaaatcaaaggaatggaaacttttcagagtcacaaagcttacacctttcttgaccatttagaggatgttaaccttgta

SEQ ID NO: 165431 - DNA, 1830 bp, Arabidopsis thaliana landsberg
cgattctaatgcaattgacgacattgcccacaagaacagagcaaaatgtctccattctcagaaacctctgttctgctacttcccatggtcgagaaatgcataaacctcttgcaaacctacggcgtttcatcgataacgaaactcagacaaatccacgctttttcaatccgccatggagtctcaatctcagacgccgagctggggaaacacctcatcttctaccttgtttctcttccttctccacctcccatgtcttacgctcacaaagtcttctccaagattgagaaacccatcaatgtctttatttggaacacattgatcagaggctacgccgagattggtaattccatctctgctttttctctataccgtgagatgagagtctctggtttggtcgagccagatactcatacttatccgtttcttattaaggctgtgacgacaatggcggatgttagattaggagagacgattcattcggttgttataagaagtggctttggttcgttgatctatgttcagaactctctgcttcatttatacgcaaattgtggagatgtagctagtgcgtacaaggtgtttgataaaatgcctgagaaagatttagtggcttggaactctgtgattaatgggtttgcggaaaacggtaaaccagaagaagctttagcgctttatactgagatgaattccaagggtatcaagcctgatgggttcacaattgttagcttgttgtctgcttgtgcaaagattggtgctttgacattgggtaagagagttcatgtctatatgatcaaagtaggtttgacacgaaacttgcattccagcaatgtgctcttggacttgtatgcgagatgtggaagagtggaagaagccaaaacacttttcgatgaaatggtggacaagaacagtgtctcgtggacttcgttgatagtcggtttagctgttaatggttttgggaaagaagccattgagcttttcaagtatatggaatcaacggagggattgttaccatgtgagatcacgtttgttgggatattatacgcttgtagccattgcgggatggtgaaggaaggttttgagtatttcaggagaatgagagaggagtataagattgaacctaggatcgagcattttggttgtatggtcgatttgttagctagagctggacaagtgaagaaagcatatgaatacatcaagagtatgccgatgcagcctaatgttgtaatctggagaacattgttaggagcttgtactgttcatggtgattcagatttagcagagtttgctagaatccagatcttacaactagaaccaaaccacagcggcgattatgttctcttgtcgaatatgtacgcatccgagcagcgttggtccgatgtgcaaaagatacggaaacaaatgttaagagacggtgtgaaaaaagtccccggtcacagcttagtagaagtaggaaacagagttcatgagtttcttatgggtgataagtctcacccacaaagcgatgctatttacgctaagctgaaagaaatgactggtagattgagatcagaaggttacgttccacaaatttctaatgtctatgtagatgttgaagaggaagagaaggagaatgctgtggtttatcacagtgagaagattgctattgcatttatgttaattagtacaccagaaagatcaccgattacagtcgtgaagaatcttagagtatgtgcagattgtcacttagcaatcaaacttgtgtcaaaggtttataaccgagagattgtagtcagagatcgtagcaggtttcaccattttaaaaatggttcttgttcttgccaagattactgg

SEQ ID NO: 165432 - DNA, 524 bp, Arabidopsis thaliana landsberg
  unsure (1)..(524): unsure at all n locations
ggccgaggagcaaaaggaggaacccgcccgaggaggggcacgcgcccgaccagccagtaggagaggcaaaagcccaccaaggcgaagagaaggagctggcccgagaggacgaccagccacaccgggaccagagacacggcccaaacccccacgggaggcagcaccggggaaccccccgcaaggggcgaaagcccgacggagcaaagccgcgaggagggagaaggcccacgggacccgaacaccaaaacccagagaagaagcaacgacgggaccaggggaaaaagcaccaggcaaacgccgagccagcagccgcgggaaaacagaggaagcaagcgccaaccggaaagaaagggcggaaagcgccaggaggaggccaaaaaagacccccggcaaaacccagggcccaacccaggacaggcgggggaaaccaccaagccngagaacggnaggggcagagggaaaacccgggggaacggcgaaaagccgaaagaccggaaagaacaccaaccggcaaagcacccagg

SEQ ID NO: 165433 - DNA, 1847 bp, Arabidopsis thaliana landsberg
atgaaagagaacgtgatcatatattttaaattccaaggtcgcatgtataatgtgatgatgaagacattaggggagaagattactttctcaatgttagaagataggctaatgacgaagcttggattagatggaaataaggtaaaattgcatatgaggtacaatccacggttgttcggagtagaggaagaaatgaacgtttgtgatgatgaggatgtctgtgtttatgtaacatccgcaaaaaataaccggagaagtgttttggttgtggaggagatctctaaaccgcccgagccggagcaattgcccgagcaattgtctagagttggtaatagttctgttggtaagaactatacggagttgaattcagaggaggatgaaatgagagtggatgatggtgcactcatcgtcttattagaagaggaacaaggaactcaacatcaacttgaggcaatagtggaggatcacgggactcaacattaacttgaggcaatagtggaggatcacggaactcaacatcaacttgaggcaatagtggaggttcacgggactcaagaagatgaaacacggtatgatgagtctatggataattctgatagggggaacagtatgttgagtcgccacctgctgtagaaccgggtatgtttaaaaaagaatgggaagacggaattgggttgaccttacgtcaagaatttccaaacaaggcggcattgcacgaggtggtggattgagctgcatttgctaacagttttggttatgtgattaagaagtcggataaggagcgctatgtcctaaagtgtgccaaagagagctgttcttggcgtttacgagcgtccaatatcagtaatactgatatattctcgattagaaggtacaataagatgcatagttgcactcggttaagtaaaggtagtagtaggctcaggaaaagaaaaggcaacccacaattagtcgtagctctcattcatgatcattttctgggacagttggaaactccggttccaagaattatcatggagctagttcagacgaaattaggtgtgaaagtatcatactcgacagcgctaagagggaaatatcatgcgatttatgatttaaaaggtagcccggaagaaagctacaaggatatcaattgttatttatacatgttgaagaaggtaaatgatggtacagttacttatctgaaattggatgagagcgataaatttcagtacctattcatatcatgaggagagtgataattgtggatgcaacacatttgaagaacggatttggggtgttctagtatttgcctcagctcaagatccaaatcatcatcattatatcatagcggttggtgtactcgacggtgagaatgatgttagttggggatggttctttgagaagcggctaagtgttgtacctgatactctaaaattgttatttattagcgacagaaattcaagcctcatcaaaggcatacgtattgtgtattccacggctcatcacgagtattatatttagcatttatcccaaaatatgaaagatcatgccaataacatatacagagacgtactcgcattaaaattcatggagttaagtcgggtttacaccatagctaaatttgagagggagtatagaactttaaagttgagatatcctgttgcggcctattatttggaggatccaaccgtgaaagaaaaatagggtaggtgttgtttccaaggacaatgtaaggaagtattctttaatatccatgcttgatgcgataatgtccaatatttttgtttggtttaatgaacatcgaaaacccgtcgcgtcatgatctgcttacaataacttcgtgcctttagtggagaactacttgcatg

SEQ ID NO: 165434 - DNA, 2790 bp, Arabidopsis thaliana landsberg
acgccaggtctcctcatcaagattcgccccgcccgaatggccttatccatggctctatcgcgctgggctctcagagtaatggaagtttcttcagcaaccttggcagccaactgagcggtttctagctcctgggagatggatttcttggaagcacggagttctttgatagtagcatccttcgacgatatcaattgcttgagccggatcacctcatccgtggattcctgcagcttacagcgatggttgtctaactcctccatggtgaagcgatgactcctctccaggatggtcaacgagttgctagagtcgcgatacaatctgtcgaggctgtcacgagaagcagcaaggatacgtttttcttcctgcaaacaaaagacagctacctcaaaaaccaagcaagtaataggagcacaacaaggaaaagcacagtctcataaatcaccttttcagaattgagctgagcgtgaagagaagaactcagtgcattggcatcatctaaggcagcagagacctgagttagtttggtctgactttgagagtacttttcctcgaagtcagcgcaccgtcgagccatttcagcttgatcttgggaatgtttttcctcaagaactgcgatctgccgagtcattcctatcaagaggtaatcaaacgaaatgaggtcagaaggtaaaacaatccacgaacaaaggcaaggaagaagaagaaagggcactaaccagcattagttgcctccaactcggatacacgacgatgaagcaacaccggattccaacgctcaagagatgaagccacttctaggatggaagcaccctgcgacctcagctggctggccattccatccaccaaagcctgataagaagagtgatgaacataatggcaacaattcatgcaacataaaaatcaaactaaagcacagcacagcacctggagttggaaaaaagcgaaggatccccaagtcaggagaaatcagctgatgaccaggtgccagaccaccacccgaagcagcttgcagcagaccagcaggaacgagctcagtacattcagcagagcctaacgccagaccagtggggatgctgccctctaaagcgaccccctgatccggagtttgagccaccaccatgccgccagagtgtggaggtgaacccacatgaacatccatggaagtgcaggaaggagacctcgctcggacaccctcgggggctgggtcaaggttgcactgcccactcgagccgggtcatccctggcaacaccctcgggggctgggtagtggcctacactcctcacccgagctgagtcctccccggcgacaccctcgggggctgggcacgtgtcagcactattcaagggatccaagctctctgcagtagccacctctaaggttgacgggccctcagctacttccataggatcaggacgatccaagtcagtctcccgaccctcgagatcacgctctaaggtcgacgaggcacgggatgacctcaatccagcatcaggcacgtcaacgcaaacctccattgcaccatcatccaccggttccgataacaaatcctctgggaccatatcctcaagagtctgatcaaagttggccagggacagttcctgcaaaccaatgagggcagacaaagcaggagagggaactccactacttccaccgctcgcgatgagctgtcgactgttttttccgagtcaaaggagcttcattttcttcctcctcatcatccacattggcaacacaagcagcacccccattgggatcagcaacaggtggagcacccacattggatcagcagccgattgggtacacccattggggtcagcatcaataagtccagtcgctggcatttcttcagtagcaggaaccgaggtaccaacgtcctgatcaaagctggatactcgccggaggcgtcttcttgtcttcttctgctcatcagcagaaggatcaggctgattggctcggcaagggcgcctcgggcgagtactgacaggtttctgtgcatccaaagtagtatcagcctctgggagggcgctactgccaacgccccaacaggagcagcgtcagaagagtcctcagccagcaaatcaagcatagcgcttatctctacatcactagggttcaggggcacctcaaaatggacctatcgttcatcatcaggaatctccccgagcgaggcaaccaaggcactaacttcttcagcagagggccacactctaaggcccaaactgccatcagtgacaggaggattcgacacaaaaagggtgaaggctttgggaggaggcaggttccaggccgagtatgccactggggcaccaacatttgacaccttgcctctaaggatcatctcaagtcggttcactaagtctgcagagggaattcttctgttggtaacccgagttgagtcggctaggcctcgatacagataagccgggtgcgccctgtctttcaacggctgaatattcttgaagacaaagtcagcaaccacagcttctgcagtcagacccctctccttcaacaatccaacttcagctagcagagcccctgcctcagccacctcctagtctgtagggactcggtccaactcggagtacgaacatccggctgtcttcctgaccgtggggggagggaattctcgtgattctccatgataaaccactccaaacgccatcccttgatactatccttgagggggatgtcaaggtagtcagtcttcctcccacgacgcatctccaacgtcgcgccccctaccagttggtgctgcctccggccatcccagggcgacagtgatacaaata

SEQ ID NO: 165435 - DNA, 962 bp, Arabidopsis thaliana landsberg
atggataggattagtaatctgtctgatgatttgcttttgaagattgtttcatcacttccaaccaaagatgttgtcgtcacaatgcttttgtcaaaacgttggaagtttctttggatgatggttccaaagcttcgttttgatgatgagtttgaacttgagccttcctattacgggagatttctcaagtatgtagacaaatcaatggtgttgaatagagctcaggttctagaaacagtgaagttcaacgttggtccttgttgtagctctgaagatatagcaacatggatcagaatcggaatggttcgcaatatgcgtgaacttgaaatatcacattgtgaaggatatttcagggaacataggtcaatcaaactaccaaagagtctttatacatatgaaaaactcgaggtcttgaaactcgcttccacggtagttctgaatgttcctatcgatgtttgttttccatccttgaaatcattacaccttgtgtgtgtagagtacaaaaccaaaaagtctcaccgcaggcttttgtcgggttgtcctgttcttgaagagttggtgttggacaaatcttataacagtttccatgtgcggtctttctatgtagaaatacctactttacagagattatctattcttgatacatctggagaactgtacggtgactttacgtttgtggtcaatgccccagctttgaagtacttcaactttgtagacttctatggcgacttgtgcttgagagataatatgcctgaggtggttgatgtgaatattaaagtcatttacagaaatcccaagaagctattgggacctcttaaatcagtcaagcgtctctctttatgtttatctccttcgacgacggtacgtaaccaaaaccaaacctatgttttcttgtgatacacgacatttgtattgtgattatgtttccgagaatctctatgcagcttcataaccacatggagttc

SEQ ID NO: 165436 - DNA, 851 bp, Arabidopsis thaliana landsberg
tttctgggtgataatgagacgttccaagtttaggatggggagactctgcagttagaagaggtcagctatgtgcagaaccaaggaggttacaacaaaggtttcaacaacttcaagcagaaccatcccaatctgtcttacaggagtacaaacgttgcaaacccgcaggaccaagtctacccttcacagcagcagaatgaacccaagccctttgttccatacaaccaaggtcaagggtatgttcctaagcagccgtatcagggcaactatcagcagcaactcccaccacctgggttcacacagcagcaacaacaaccaggttcaacaactccaggattcagacttgaagaacatgttacagcagattctccagggacaagctgcaggagcaatggatctcgccaaaaagatggcagaaattcacaacaaggttgactgcagttacaatgatatcaatatcaaggttgaagcactgacatctaagatcagatacatagaaggccaaactgggtcgaccgcagcaccattgtctagggatagcttgattgcgcttgttaaccattcgaataggctaggatagcactctactcgattaccccatccttaggaatttctcgtctatcttatttctctgttttatcgttatcacttaatcgttctcattgcctgtttcttagtttttataatcactcgaccaacttactcgaccacacccagtgtctggcaacagactgtgcagtcgagtaagattgtcttgtttcttgtctgttactcgaccagtatactcgaccacacccagtgtctggcaacagactgtgcagtcgagtatatctgtttcatatcctgtctgttac

SEQ ID NO: 165437 - DNA, 223 bp, Arabidopsis thaliana landsberg
tcgtgtaaggtatatactcctttcttctctttcacttcttatacttactcttcctctttaggacaaataatcgaaaagaatctattttctactttttctgcaattatgaatccttcatccccattatgaagcttcgactcttcggcggaaaggcacaactcaccttttgacgactagaaccctcctcgctcgtctgtcgacctctgttctcacctgaacgata

SEQ ID NO: 165438 - DNA, 1496 bp, Arabidopsis thaliana landsberg
atgggacgtagtaacaagcatgttgtcactagtaccactccttctctggcaattgtccaggcgaatcctcacccccacaaagatgttgttcccactgaagcaccaattgtatcatcttacaatgaccacatcaggccgttgcttgacactgtggacaagctcaggaacttgaatgtgatgcaagaagggattcagcttcctaccattgttgtggttggagaccagtcctcggggaagtcgagtgtcctcgagtcattggcaggaatcagtttgccacgtgggcaaggaatctgcactagagttcctcttgtcatgaggctccagagaaggcgaagccctgaacctgagatctggctggagtacggtgacaaaattgttcctacagatgaggaacacattgctcaaactatttgtgcagctacagacgtgatagctggtatgttttgactctattccttccatactgttaaatatgtttggtttaagcttccaagcctctgaaaatgaaaacgacacctttatttgaaatatgccaaatttagaacgagctagctactggtaaagaaaaagttcctgaaactaaatgtgcatttattattgaatactagtgctagaggtgttaataggattctgaaaatgaaaacgacacctttatttgagatatcccacactcaaaacgagctaactactatataatataccctgaaactacatgtgctcttatatgaatactagtgctagtgttaataggattctgtaattcctagtgggtccttagtgatctgattttctttcatcctgttacactagttctgctatcagctgaaatttcacagtattgaagtgttgagactaaccagttgaagtcttgattttgataagtacttgtgaatactgtgttgcaggatctggcaaaggggtttcagacacaccccttacgctccatgtgaagaaggctggtgttccagatattactatggttgatctccctggaataacccgtgttcctgtgaacggacagcctgtgaacggacagccctaacgatcaaaagatgcattgcagagctcgcttggctgaaatgttaaaccgattctcagacaatctgcaggcacagcctcaagccgtgacagaagagttcttgatggatgaaatcaaagtcttagaagagcgcaaatgtatcggattgcctaattttataccaagatcttctttcttagcaatcctttcacaacatgtggatgggatacaagacaagccagttgagttcatcaaggagatatgggactacattgaagttgttctgtcatcagtcattacgacatattctgacaactttccccagattcaatcctccatcaaaagggctggtcgtaatctaatgagcaggactaaggaacgttccgtgaacagagtaattgagatcgtggagatggagaagcttaccgaaaacacatgtaacccagattacatgacttcttggactcagaagacaacc

SEQ ID NO: 165439 - DNA, 461 bp, Arabidopsis thaliana landsberg; identical to SEQ ID NO: 61992

SEQ ID NO: 165440 - DNA, 392 bp, Arabidopsis thaliana landsberg
atgccatctgagtacgccaagaccctgggcgcgcggctgcgcgccattcgcacccagcaggggctctcacttcacggtgtcgaagagaagtcccgtggtcgctggaaggccgtagtcgtcgggtcgtacgaacgcggcgaccgttcggtcaccgtccagaagctcgccgagctagccgagttctacggcgtgccggtatccgaactcctgcccggcgacgccgcgcccacgccgatcgcgaccgctcctaagctcgtgatcgaccttgagcgcatgaaccagctgccgaaggagaaggtcggcccgctcgcgcggtacgtcgccaccatccaggaacagcgcggcgactacaacggccgggtgctgtcggtgcggcacgaggacctgcgctc

SEQ ID NO: 165441 - DNA, 7068 bp, Arabidopsis thaliana landsberg
atggatgatacagaccgtgctacaacaaaggagttgacacagaatgcaacaagagttatgcagacatcaacaaaggtgttgagcaacagaggtattaagcatcagatattgtaaagatctatgtgattgtgaagccggagtatcaaaagaaagtatcagagttgtgtttcacaggtagcagctgtgtaacatagtaggcgaactgaatgccgaaagaatcaagtgaggaatgaagatgacatggcatgattctattggagacgtgatgtttgctttagtggtggtccagatactttcgaatcaaggcaaaacgattgcgagaatatttggagcctagggttttgtcttgattatatatagatggttgccgtgacataaaaaggttgcgcgtctatgatatagtggagagagatgcacacacttgtgtgtggcgtcgccccaccaaatacagatgatgatctcttggtggtattcctttggaatctgcagccgttagagaagacggtgatgcaccggtgctgccgggtggtagtcaagacatgcgtggcttgatactgtttccaaagtccatctagaaaagagtggtaagcatagttatgctgtaatatcatatgcaattgtatttgcaatcttgttctagtggaattgttctggactaggtcccggggatgtaggttgttaccgaaccccgttaacaaatctctgtgtcatttactttatgcacacgtacaagttctttacacactctcatcattaacgacgtattagatctagttagtaatttcacatataaccttagccattgtacccataaagaatttgatgatagcagtctccaaataagtttaaggcaactaactttgtttgcttcttctagtgagcgaagcccagccctccttcttctttaggtacacaaacatccctccaagaaactttagctttttttgaatttaactcaaggcagaccatagaaaagcagagcatagactgtcaatttctttgatgcaagcactcggtaatctaaaagcagacatccaaaagtttgtaaggctatggatcacagaacttataagttgcaaacgtccggcaaaggagaggtgtcctgccgtccaactatttattcttcctcgaattcgttctatgagaggagcatagtcacttgtcgtcattcttttgcttagtaatggctattgagcaagacctaataaaaagcatccatccgtacaaataaagaaaagaggccgagtgttgtgtgtaagctcaaggtgttgggctgacacattgagaagtctatgaagagcttctagaagaggtgaaggcacacaaatatctcttgtagccgttgaagaggactcacgagtgtctttagcaacaaggtcaaccaatgaccagtcactatcatcaccaagaccaaggaacctcttctcttatgtctctttcagtcttacgttaattgtaaacggccagattctctttctgtgtctttaaagcattgtaaacacacaaaggttataatccaattctatcaacatgatttggtctcatattctctcacatacaaactctcttgttcttcataactctcttaacctttaatacaattccgcatattctttcatggtattagagcgtaagatcatgtctttatgcttataaatcttctactctcattctattcttcattttctcgaaatctcttcatcattctctagcttcatctcttttaaccaacagataatagctttattcatcagtccgtttgtgttcgaatcatggagacttctcaaaaggtgattactacggtgatacttcaagggggaaactacctaacttggtcaagaacaacaaaaacgctgttgtgtggtggtgggctttggagccatgtaatctcatctcaagctccaaaagaagccaaagaagaaggagacgaagaagaaacggagactatatctcccgaggaagaaaaatggttccaagaggatcaagccgtccttgctcttcttcaaaactctcttgaaacctctattctagagagatactcttactgtgagacagcaaaagagttgtgggatacacttaaaaacgtgtatgggaacgaatcgaatttgacccgcgtgtttgaagtgaagaaggcgattaacgaactaagtcaagaagacttagagtttactaaacactttggtaagttcaggtccttatggtctgaacttgagagcttgaggccaggaacgcttgacccgaagattctccacgaaaggcgtgagcaagacaaggtgtttggactccttctcaccttaaatccagggtacaatgatctaattaaacacttgcttagatcggagaagttaccaagtcttgatgaggtatgctctaaaatccaaaaggaacaaggttcaaccggattatttggtggaaaaagtgaactcatcacggctaacaaaggagtgtacaagaatgaagatagaaagatgctgacatgtgaccattgtaagaagaagggtcacaccaaagataagtgttggttattacacccacatctcaagcccgccaagttcaaagactcaagagcccatatctctcaagaagctcatgaggagcaaagtcaatccgggtcatccaagggagagacatccacaatatcatccggagattatgtgaggaagtcggacttggaagctctcatcaagtctatcgtctctcttaaagaatccggtatcaccttcttctcacaaaaacctagtagttcaattgttatagattcgggtgcttctcatcatatgattagtaattctaatcttcttaacaacatagaaccagctctaggacatgttattattgctaatggtgacaaggttccaattgaaggcatagggaatttacgactgtttaataaagattcaaaagctttctttatgcctaagtttacttctaacctcttatccgtaaaaagaacaactaaagacctaaattgctatgctatttttgggcctaatgatgtatattttcaggatattgagacgggaaaagttattggagaaggtggctcaaaaggagaactctatgttcttgaagatgtgttaccaaactcttctagttgtttctcttctaaatcgcatttaggcatttctttcaatgttttgtggcatgctaggctaggtcatccacatactcgagctcttaaacttatgttaccaaatatgtcttttgatcatacaagttgtgaagcttgtattcttggtaaacattgcaaatcggtttttcctaaatctcttactatttatgagaaatgttttgatctagtacattcggatgtttggacttcaccatgtgtttctagagacaacaacaaatattttgtgacttttatagatgagaaatcaaagtacacttggataacactcttaccttcaaaagatagagtgtttgaagctttcactaactttgaaacctatgtcactaatcaatttaatgcaaagattaaagtgtttaggaccgataatggaggagaatacacaagccaaaagtttcgagatcatctagccaaacgtggaataatacaccaaacaagttgcctgtacacaccacaacaaaatggagtggcggagagaaagaaccgacatctcatggaggtggcgcggtcaatgatgtttcatacaagtgttccaaagagattttggggtgatgcggtcttaaccgcgtgctaccttatcaatcgaacaccaactaaagtcttaagtgacttatctcccttcgaggtacttaacaatactaaaccgttcattgatcacttacgagtgtttggttgtgtatgttttgttttgatacccggagaacaaagaagcaagctagatgcgaagagcactaagtgtatgtttcttggctactcaactactcaaaaaggatataaatgctttgatccaaccaagaaccgcacatttatatcccgagatgtcaagtttcttgaaaaccaagactacaacaacaagaaggattgggagaacctaaaagatcttactcattccacctccgatcgtgttgcaactctaaactttctattggatcatttgggcaatgactcaacttcgacaactcaacatcaaccggagatgacacaagatcaagaagacttgaatcaagagaatgaggaggtgtccctacaacatcaagaaaatcttacacacgtgcaagaagatcctccaaacacacaagaacactctgaacatgttcaagaaatccaagatgactcaagtgaagatgaagaacctacacaagttcttccacctccaccacctcttagaaggagtacacgcattcgacgcaagaaggaattcttcaactctaatgcggtagctcatcctttccaagcaacatgttctcttgcccttgtacctctagatcatcaagcgtttctctccaagatttctgagcatcggattcctcaaacatatgaagaggcaatggaagtcaaggaatggagggatgcgatagccgatgagataaacgctatgaaacgaaatcatacttgggatgaagatgacttacctaaaggaaagaaaacagtgagctcaaggtgggtgttcacaatcaagtataagagtaatggagatatcgaaagatataaagctcgcttggtggctcgggggttcacgcaaacatatggctccgactacatggagacttttgctccggtggctaagctccacacggtgagagtggttcttaccttagcaacaaatttatcatggggactatggcaaatggatgtcaaaaatgcatttctccaaggcgaacttgaagatgatgtgtatatgatgcctccacccggtctagaagataccattccatgtgataaagtgttgagactacgcaaagctatctatggtcttaaacaatctccacgtgcatggtaccacaagctcagccgaactcttaaagatcatggattcaagaagtccgagtccgatcacactttgtttacattacaaagtactcaaggtattgtcgttgttctcatctatgttgatgatcttatcatcaccggagacaacaaagacggtatcgactctaccaagacttttcttaaatcttgttttgatattaaagatcttggtgaactcaaatacttcctaggaattgaagtgtgtcgctctaatgctggactctttctatcacaacgcaaatacactcttgacttgttgaatgagacaggttttatggacgctaaaccggctcgcactccacttgaagatggctacaaggtcaatcgaaagggggagaaagaagatgagaagtttggcgatgcacctctctatcacaaacttgtaggtaagttgatctatttgacaaacacaagacctgacatttgttttgctgtaaattaggttagtcaacacatgaaagtcccgatggtgtatcattggaacatgatggagagaatactaaggtatctcaaaggcagctccggacaaggcatatggatgggaaagaactcaagtaccgagatagtgggatattgcgatgcggactatgcgggtgatagaggagatagaagatctacaactggttattgtacgttcattggaggtaaccttgcaacttggaagacaaagaaacagaaggtggtctcatgttcgagtgcagaatcggagtatagagcaatgagaaagctcaccaacgaactcacttggcttaaagctcttcttaaagatcttggcattgaacaacacatgcctatcaccatgcattgtgacaacaaggcagcaatatacatagcctcaaattcggttttccatgagagaaccaagcatattgaagtcgattgtcatatagtccgagagaagatagaagaaggaatgattctaccgtgttatacggacaccaaagacaacttggcggacatctttacaaagggggcaagtctcaaagtttgtgaacacatctacaacaaacttggacttgttgatcttacacgtccttgatgatcttccataatccatggtcattacactctttttcccttaacatagttttctcccatgtggtttttctatgttaaggtttttaatgaggtaatgtatcatgggttccaagcttaacccattcatcataggctaagcttgagggggagtattagtcaagtaacacacatggatcatgggcttagagttaacaagaagaagagaagttgatgagcccattaaccccttctagaagtgcgattagagccgttagaagggagaagagaggagagtcacgggtaggctaaggtttcatcttagccatggtcaagtcactatcactgtagagaaaagtcgtctactctctcttcatgtctctttcattttgttttgtttgttgtaaagggaaccctagtgtctccctatataaaagtcttgttccctacattgtaaccaatctaatctaagtaatatcttcacttcctattcttggctcttctctcctctataaacttcatacttctccatacttctcatactcttttccgcatattctaacatggtatcagagcatgttcttcgattcttaacatgctaaatctcttctacttactctaatctacttactctctacattcttcttaaatctacactttcctcttcaagaaacactctattacccaacggttaaaagagtgtacacatcatggagaacccaaaaccggcgataacgtcggtggtcttgaaaggagagaactatctactatggatgaggacgacaaaaacggtgttatgtggccgagggctttggagccatgttgaaaccaaacatgttcagtttaaggctaccaaagaagacggcgacgaagggttcaagagggaagaagaagaagctgagatcgagaaagaagccaagtggtttcaagaagaccacaacgttctcgctattcttcaacattctcttgagagctccattcttgaggcttactcttattgtgaaacggcacgcgagctatgggagacactcgagaacgtgtatgggaatgtgtcaaacttgactcgagtctttgaagtcaagaaggccattaacgcccttagccaagtcgacggg

SEQ ID NO: 165442 - DNA, 847 bp, Arabidopsis thaliana landsberg
ccttcgcatgtaagggtactctagccatgggaattcacttgtccaaaaactctgactttcagcttcgtgcttacagtgaaatggagcctgaaacggagtctgatttcaatcttcgagcttacactggcagtgattgggtggctgtaaagaaacttgtcgctctacaggaggctattgtacgttccttggcactaacctcatttcctcgtcttctaagaagcagccgactgtctctcgcagctctactgaagcagagaacagatcactttcagaaactgctcaaaaaatgacttggatttgtcatgttctccgagagttagggatacctcttaccgttacgcctgagctttatggtgacaacctttcttctgtctacttaacagcaaatcatgcgtttcatgtccgaagcaaacactttgaatttgattaccactatgttcgtgaaagagttgctttggggtctttggttgtcaaacacattcctgctcaccaacagatagttgatatattcaccaagtcattgtcatttaaagctttctgtgatctcaggttcaaacttgacgtggatttgccacccacaccgcgtttaagggggagtatcagacaacctcttcaaaacgacagcattttgtcaacttcatcagttgggcctgcgacagaaacaaatgaattgggccacagaacacttaaggccaaaacagaaacatcgtcgtgcactgtgcaacggtcttctccactctcgcttaaagacaaaagaaacagaacagaggtgacgaaagcttgtacggagaagatacagcttgctaatcaattctcagcccttgatgacttagagactacaggatga

SEQ ID NO: 165443 - DNA, 482 bp, Arabidopsis thaliana landsberg
gcacgccgcactccccgcagccaaaaccaacaggcacaccacccagcaactgttcctgcatcgagctctcgctaccggcgcaccatgctggcgcgactgcacatacccttcgacgtcgaatcgcccgatatcgacgaaacgccgcaagcccacgaaaccccggccgacctggcgcgccggctgtccaggacaaaagccgacacggtggcggccaggcatccgggggctgtcgtcataggttcggaccaggtcgcctgcctggccggcggcccgcccatcggcaagccgggaagcttcgacaacgcccgccgacaactgcgccggctaagcggccggcaggtcgaattccacagcggcctttgcgtgaccgacggcggccgccgcgtcaccagcaatatcgttacccgctgaaagtttcaccccttgagcgaccgggaaatcgacacatacctgcatatcgagcagccctacgacacggcggg

SEQ ID NO: 165444 - DNA, 3482 bp, Arabidopsis thaliana landsberg
tcttctactttgtcatcactatgtccggagctatcgtccccgtgactactccatctccttatggtatcactgcatctgacaatcccggtgctttgatttcctctgttatattaaaagaagacaattactctgaatgggctgaagaactcatgaattctcttcaggcaaaagaaaaactcgggttccttgatggtacgataccaaagccaacaacagaacctgccttgtcatcatggaaagctgcaaattctatgattataggttggattagaacatcaattgatccaaccatctgttcaacggttgccttcgtgtctgatgcaaaagatctttgggatagtctcaaacaacgattctccactggaaacggtgttcgtaaacaattgttgaaagatgaaatttcggagtgtaagcaagatggtcaatctattcttgtttattacgggagactaaccaagctttgggaagaactgcaaaattacaagaccagtcggacttgcacgtgtgaagttgctcccgacatcgccaaagaacgtgaagacgacaaggttcatcaattcctgctcaatttggatgaacgcttcaggcctattcgctctacaattacagatcaagatcctctaccggctcttaatcaagtgtactcgcgtgtgattcgtgaagaacagaggctgttgggtttacagttcaagccacaccgcttccgcctacacctcaagttgcggcagtctctgcacctcgatttcgtgatcgctcctctttgacttgtactcactaccatcgtcaaggacatgacattacagagtgttttttggttcatggttatccagactggtggttagaatagaatggttctaatggctctgctggacgaggcacttccggtcgtgggaacaatggtcgtggtaacaacaatcgtggcggacgttcttcatcttctggttctcgtggtaaaggacgtgctaacgctgctagtacacatccacctcctacatcaactccttcaaatgcggaccagattaatcaattgatctctctacttcaagctcaaaatccagccacatcttcacaaaagttgtctggtaaaacatttactacttacgttatcattgacacaggtgcttcacaccatatgaccggtgatatcacattactcacaaatgtggaagatatcattccttcgcctgtcactaagcctgacgggactgcctctcgtgccacaaaacgtggaacgcttgccttacataatgcatatgttcttccagatgtgctatttgtgccagattttaattgcacattaatatctgttgctaaattactaaagcatactggatgtgctgcaatctttactgatactctttgtttcttgcaggaccgttttacgagaactttgattggtgcgggtgaagagcgagagggggtgtattattttacgggtgttcttgctgctcgtgttaacaaaggtttcaaggattcctcatcggcgacattgtggcatcacagattaggacatccatctaccggtgttttgctttcatttccagagtttgcttcttctagtagtgatttagagatcatcaaaagttgtgacatttgttatcgtgctaaacaagcacgtgaagttttttctccaagtcttaataaagctacagtttgttttgaactaattcattgcgatgtttggggaccttaccgcacaccggcttcgtgtggatctgtttactttctcactatagttgacgacttctcgcgatctgtctggacatttctcatggctgaaaaatcagaagtatctcgattaattcgaaatttttgtgccatgagtgaacgtcaattttgcaaatctatcaagacggtccacagcgataatggaaccgaattcatgtgtctcaaatcattttttcaagaacaaggtattattcatcaaacttcatgtgtagatacacggcaacaaaacggacgcgtcgagcgtaagcatcgacacattttaaatgtcgcccgcacgtgtctttttcaaagtcatcttcctcgcaaatttcggggagaaagtatccttaccgctattcatctcataaatcgcacacccaccaaaattctccatggaaaatctccatatgaagtattgtttgggtctcgaccttcttattcagctttgcgaacgtttggttgtctgtgctacgctcattatagagctcgtgacaaggataaattcagtgaaagaagtagacgatgcgtctttgttggctacccctatggtaagaaaggttggcgcctttatgacttagagaagaacaaattctttgtgagtcgtgatgttgtgtttcaagaaactgtcttcccgtatggtactatagaatcaagctcaattcccttctcaccgtctatgtttcctccctctacgatttttcacgatgatgattggctccaaccgcaagctgatatttctatctcaccaacggttgatctttcatcacctactacaatacctactttgactaccacgtcccctcctgtgatcgtgacaacacccacgtctccgttatcactctcgcatcctatggtattgacaccatcatcgaactctaatcctggttcgccatcgtcacctagttcgcctcttcctccaagctcatctccctcgttatcacctctttcctcaccggaagcttcgcctggtttaccggaacttcttggaaaaggtcatcgtcaaaaattaccatctgttcttttaaaagattttgttgctcatcatgctacagctccatcacttactaataatacaccctctactgcttcttctgccactttcactgatcctagcctctctaaaacggtctgcggtaagatacttgactctattcccatatcgatttctgacgaaaaaatttcggagttgcatcgagtttttatggcagctattacttctgacacggaaccaacgagctatcaccaagcttctcagatcaaagaatggtgtgctgctatgggtttagaaattactgctcttgaagaaaaccatacttgggatatcactaccttacctccagggaagaaagctattggcagcaagtgggtctataaactcaaatacaattccgacggcacagtagaacgtcacaaggctcgtttggttgctctcggaaatcgacaagtcgaaggctccgattttacagaaacttttgcaccagttgctaagatgacaacagtacgctttcttcttgctgttgcggctgcaagacaatgggaagttcatcagatggatgtacataatgtctttcttcacggtgatttggacgaagaagtttatatgaaactacctcccggttttcatactaacggttctaatcaagtgtgtcggcttcgaaaatcactatatgggcttcgataggctcctcgttgctgggttgagaaacttgctactgctctccgcacatttggattcaagcaaagttatccagattattcacttttctcatctgtgc

SEQ ID NO: 165445 - DNA, 5035 bp, Arabidopsis thaliana landsberg; identical to SEQ ID NO: 32904

SEQ ID NO: 165446 - DNA, 3380 bp, Arabidopsis thaliana landsberg
  unsure (1)..(3380): unsure at all n locations
gtggtatggctttcgtgttgcaggcttgggcgtatgattcaatcatcaccatcggcgagcattttgggattgttctaaaagcggatgagatttcgttgcttagatggggtggcaaccgtaccactgtaacaatagaatcgnnnnnnnnnnnnnnnnnnaaagtgaatggtggtgaggtacggtttcggctctgttatgatagtcattgactgagttatgttctgttttttatcaaatatttatgttacggctgcgttgtgctcttttatcactgagttaatgttttgtttttttgtcaagtatgttacgtgacgactgagttatgatctgtgaaggctgagttatgttttcttgttttggcaaatatgttatgtgacgactgagttatgttctataatggctgagttatgttaggtgacggctgagttatgttctataatggttgagttatgttaagtgatggctgagttaaacatactgatgggttttattatctcttgtgttgtagctgcgtgttcgtaaaatggttgaaaaggctgagttaagcgagctgtttcattcttggccagaccaattagaagacccaacactcgataacttgatccaagacttacatgagcttaagcttgttaaaggttattgagatgtgaagacgagtgagaaaaagaagaaactcttaaaagataaagaaacggatgtgtctgaatctcccacaaagaagctgaaagtctctcacagtgagggtgttcattctcatgagaaaaatgcacaaaagaagaagaagaagaagaataagaagaaggaagtagctgtcgaatctgatgaggacgaggacgagcaggatgttcagggagaacagcagtcgctcgtggatgtggtgtccaacttaatctctcccttaaactcaaggtttgacaccgttgataaaagcatcatagaaatctcctcccgtctaaaggtgattggagatcaagtctaagagaggattgattcaaagtttgaaagaaggtttggatccattgataatgaggtcaagcagatgaaagagcatctgaaggttctaggcggggtgggcctaactggccaaactggcatagctgacttagcattaaactctggcatagctgacttagcattaaacccaagaggatcaaggcctccctaaaccccaaaaggtgcacagaatcctacaaataaccaatttgttactactcctcctccggtaagctaattgctgagctattacttattatctaattacggctgaattatcttcatattatacgggtgagttttaacttttatttagttatggctgagttatcttcatattatacggttgagttctctgaatattttacggctgagttatataaatattttacggctgagttataaacgctggttagttatggctgagttgttttcatgttataaatttagttagttagttatggctgagttatatgaatattatacggctgagttaaaaatttaattaggcatggctgagtttagttagttacggctgaggtatatgaatatgatacggctgagtttagttagttatggctgaggtatatgaatatgatacggctgagtttagttagttatggctgagttatatttatacataggtatgagttttcgttgtttaacgcctgagtttcgttacgtttatgcagtcgaaacaagctgatgttggggtaagtaggaagcttgaagcagaatttgataaggtctccattgtgtctgatgtggatttcgttgagactgtttctcctctcaatcgccgtttacgctctaggaagccaccatccccaaatgtgccaaagcagaaaaaggagaaaacattaaatgagctaatccagaaaccgccaacgagaagaggaagaggaagaaagcctttggagcagcctaaaaaggtgcctcctactgcgccaaagattagaataaataaacctaaaccatctgaggaaacaaagtcaaaagctgaggaagctaaggaaaaagctgagttagattcggatgtagttgatgtcacggataaggttgtatccgagtataatgaaatgcttcctgagtctgatgaagatgaggaggaaaccgagaggctaaagagtgtaaaagaaattcggctcaaaactattaagctggccccggatgggagctcattgattaaccccgaagatatgcccactcacacttttccagttattggagacaacgggctgagctgcatgagaaagggttgtctgccttcacgagcaatctatgatcctctggcaccggttgatccggccaaactgcagaagcttaaggcttatttgacaggtcccgaaaggtatggccctttatacgttactaagttgttaaatacgacatgcttacactatttgtttatattaactttctttattatgtgttagcaaacaatattacaaaccatatgggttcgacgatgtgatgttctactctgttatcatggccgaaagaaaggactggccagacgagaaacatggatggctgggtgatgatgtaagttactgttatgttctgtctgagtttggctaatgttatggctgagttatagtgtcgttatgtctgagttacagtagataatgactgatttatttaggtgttaaggctgagttttacttggttacgtctgagttaatgttgtgttttgtcttggttttattttctgtccagcactttggtgcgtatgtgaaaggcctcaccacgaggctcctgcgagatcctaccccatactacagcgaacgcgtcatgattctagacccgtggttcacatcaatgtggacgaaggattacgcacagtggaagatgaagccgaagagggtttctttcaaaggttctacgtatgaaaaatgggtcaacggtacgggtggagacgacccgacaaacaagaagtggataacagatgtggatcacttgtatactatcctccaaaccggaggtaatcattgggtgaccattcacgttgacttgcctaggggtcacgtggactgctatgattgcatcgtcggatgtcatacaccggaaagcgatggaaaaatccaggaacactgtaggccgttcacgaggatgattccacagatcatgagtgaaattatccctcccgcagtccgtgtcctgcaatacgaccaattttcattccgcggacggaccttaaaaaggtcccgcagaatactatcaccggggactgcggcgtttacacgttaaagattcttgaatgtttattgcttggtgtttcttttgaaggcattaatgattcaaatatccaggggctacgggttaggatggcaacagagctctacgatgaattacctaacagaatgcccgttcgtttttatgagacc

SEQ ID NO: 165447 - DNA, 668 bp, Arabidopsis thaliana landsberg
atgttaaggcaaacaactaaaagagcctttttagggctcgcttctcaaaatcccacaccgttccctgtcgtgtctcgattataccatccaaatgtcatcgaccattatgacaatccccgtaacgttggatcatttgataagaatgatcctaacgttggtacgggattggtcggagctcctcaatgtggagatgttatgaagcttcaggttaagtttgatggttctggtcaaatcattgatgctaaattcaagacctttggttgtggttctgccatagcagcttcttccgtcggtatggtaccttcttatgtgatattgtgatcgatttgtttctctaatcctgaaatctttaaattaattgattcgcttacatggtttacgtaatcgcgttataaatcatataggtattagagaggtctctgactatttagcagcttttttttgtaaattagtgtatgatttggtgaaatcaattagaagctctccactcaaatgttagtttcataagttcatacgttttgcgatgtttgatataagcttgctaattattcttagctactgaatgggtcaagggaaaatccgtggaggaagtcttgaccataaagaactcgtaagtgccttctttttgtggtttcattatttcaataaaagtcttaacgatatgatga

SEQ ID NO: 165448 - DNA, 3043 bp, Arabidopsis thaliana landsberg
aaagtatgttgtcattatgtcaaaagtccaaattggtatcaactacaatgttcacttatcaggtctctcaaccaatattactagactaggataaaatggatacgttttggacttgtggttattactttagcaagctactgtagatataaattagtaaaatttaggtgtgagtcaattctgagagtctagatctccgtactcaaataaactatagcacatgctgttgagacccgatacaaatcgtttatgataaagagaaagatacataggccatgactccaagatgataccacaacaaaaactaaaaagtgggtcctaactcggcctaaaacttgttccgaaacaatacaatcttcttaggacaaagtgagtttgtaccattttcgattcacttagcttggactttgcactttgtcaatgttgttcagtttacgaagaacaggtcccaagcacaagaagaagtcctttataatttaattatagtcttacttcgggattcatagccaccccctcttgtcgacaaacctccacggctccgatgacccctttttttccttttttttaaaaaaatatatatcattaacaatagtatggtttatggtaatttaaccatctaatctactgtttaaatataatggggaatgttgagtctttgttcccaagttcgaatatacgttggaaaaaggatggtttacgtgtagacaaatattatcaattttttattcccaaactaagagagattatggtacaaggccttgaactttctttatccccaaacaaaaaaagtggcagtcatgtgtgtgtttaatacatgtttactttacctaacaattaacataagacatttttaagaagagaagaggaaatcataccttatattttattcaataaaatgattaaaaaaaacttttcaatccatgattcctcatgtttgccaatatatataaatacatgcaatagattgtaatggaggagctctagaagtcagacatggctgtttcagttagtaagcagtacatgacaagtcttgtagtgatcttgctcttcatctccttatcatctctctctccaacttcaacttcacacaactgtgaccctgtcgaagaagaagaagaagcctcctccttcggttacgtttgccactcaaacctccaaaagtgccacactttcgccattctcagagccaaacctcccttctattccctctcggacctgagtcgccatcttggtctcgacgcagacgaggagtatgttccgaaaggtcagttactcttgatcccaatagagtgcaggtgtaatggaagcatctacgaggccagtctcattaaaaattgcgttaaaggagacacctttcgctctgtctctcagtctctgcaaggcttgaccacctgcctgtgagagccaaacactttttccaattaagttgtctatgactgaaatttgtttttgtttatcgattcagtactgctatattcactgcagatctatcagagagaagaatccacatatttccgaagacaagcttggcgacaacattaaactgcgtttggcgatcaggtgctcttgtccacaagaaggcgtttcaaacgctagttttctcgttacgtatccggtgggcgtccgcgacagcgtttcaagcctggcggttaggtttaacacaacagaggatgccattgtctctgcaaacaacaaatctggtgtggttccactcaagcctgctctcatccctcttgatcacaaaccagagaaacaaggatcccggaaaagaaatccatccaagaagaaacggtcaaagatgaagctcatgatcgctgtgagcagcgcgattgctggagtttgcggtcttgtcactctcatggtgtttggttacttacactggaagaaagagacgcagattcaaacgcaaacgcaaaagtggattagcaacaaagaccccgagacgcggcagctgagtctgagcatccgaaccacgagtgacaagaaaatctcgtttgaagggtcgcaggacggttccatcttggattctcacaacaccgtcggcaccacaacgccccgaaaacccgttctggagatttacgcgtttgaagagttagagaaggccacggagaatttcagttcaagcaatcacatcaaaggttcggtttatttcggttcgctcaaaggcaaagacttggctataaagcaagtcaatgcagatgaaatgaaaagattcgatttcgggcttctcaatgatcagtcacactactataaccacaatgtgattagggttcttggaacatgttttagagaaatcgatcaagattcttatctggttttcgagtatgcaaggaatgggtccctgtgggattggattcagaacaaattggccatcaagaatcaattcatcgagtcttgttactgtttcttggcatggaaacagaggatcaagatatgtcacgatgtcgccatcgcgttaaagtatatgcatcggatcaactacgtccacggcaacatcaagagcagaaacatcttcttgaacgaagatctcagaggtaaagtcggaaactttgggatgtcaaagtgcgtaaccaatgaattagccacagaagagaaccttatagagagttcactgtctccagcttctgacatatttgcttacgggataatcgtaatggaggttttgtctggacaaaccccagatatgttgcttggattgcaagaagtagagacaacatcccttgggacacaagaaacttttgtttccgaatggagtagattaagaaggcttctcggggacaaggaaaagctgagggaagtgatggacagcacattgggagagagctattcggttgattctgcgtttgaaatcgcaagtattgcaagagattgtactgcagaagaagccgagtcaaggccgagcgcggttgagattgcagagagggtttcaagattggtggatgacgatgaagatgaagaagatgaggcagtaatagatagagagagtaccttaatttcagagagttcatacaagcctttggtaaagaagagtagtataatagattaa

SEQ ID NO: 165449 - DNA, 1273 bp, Arabidopsis thaliana landsberg
atcccaaggcgtttaaccacacaattgatatcttcgtagatcgttacaaagacatgcaaatctctgtcgttgctggtaagactcctctgtttttaacccttggttcttccttatcctctcatttctttactccagtgtttcgtcatcaagtttgttaagtaacgccaaaaactatgtgtctttctaaaatgggtttacatcatataagcaaacaaaagacaattaaaaaaaggagaaacaagaattgtctttttcttcattaagaaattaatatgtttgtttacatccagatgtataatataggagttgaagcaagaggtttcttgtttggtccttccattgcattagccatcggcgcaaagtttatccctttgcgtaaaccaggaaaattaccaggtttttttactgcattatctgttttggttattgtgatagagaagctcttgagattctgaaaaattggcgaaactataaaatatagggaaagtgatatcggagtcttatgagctcgagtatgggcatgaccgtttagagatgcatgttggcgctgttgagccacgcgaacgcgtcattatcattgatgatcttgttgctactggcggcactctttctgccgcaatgagcctattgggtttctttctttcttcttgttttctttttcagtttttaaagagaattttttggtcttgaattgtaatgtgatacagtttgacgttttacagagagccaaggagctgaagttgttgagtgtgcttgtgttattggcttgcctgaagtcaaggtgagtcacatttatcttacttgtctaagaagttatctctggttttgttcttttgaaatgatttctaaaatgtagtgatagagttagtttttttgttataatctcaactcaaatttgctcattgagtttgtgaaaattttgaattgtttttaggggcaactcaagctcaaagggaagccgctttatgtgttggtggagcctagtggattagatgagttctgttaggatacataccggttacttccggttcagttttctttccctgcagagttcatgttctttttttcaaaatttctagggttccaacttcttgtattcgttctcgtttattgatctctgtagattttgaattttgatgtgtactttccacggcagtggttggtaaaaaaccgagatactgaaaagagtctttacatttcccggtttggtggaatttctgatggatcactaactcatgttaatcagtttataataactgtaatcattaaaagg

SEQ ID NO: 165450 - DNA, 1996 bp, Arabidopsis thaliana landsberg
atgaatttcacagaagctatgaatgttgtgcacaacagaatccatcaacttgaaccagagaatgcatcgaagatcataggttatctcttgttgatgcaagatcaaaacgaccgtgacatgatacgtctcgcattctgtccagattcggtgatgcgttctatgatcaactgtgttaaatgtgaattggctaaaaactctcattacaataacatcccttcttctgatcacattcaaatccgtaaattcggatcattatccggttcatcaaaccaatctcttttggtttctgcctctcctccttcggttctctctatgggaacaagtttttgggagaatacaaacgatatggattcatcattgaaagacaatgttcagtacttcttggattttgaggattctgtgaccagtcctgaattctcaactagtttcttctctcagaagaaacagagtttgtctttaagaactagtcgaagatcactgagtttaccagagtttcctctcaaaatctgccattacttcaacaaaggattctgcaaacacggcaacaactgtcgttatttccatggaaaaatcataccggagaaagatagttttgcgcagatgtttaatccaaaagacaacaacctaagcgacgaagagcatgttgtttcccctggatcacttgagaagctagaaagagagatcattgagctgcttaaatcaagaagaggtgctccaatttccatagcatttttgccaatgatgtaccacgagaagtatggtaggagtcttcaagctgaaggatatctcacagagtcacaaagacatggcaaagctggttttagcctcaccaagcttcttgctcgcttaaagaacaccatccgcctcatcgacaggttagttacttagtcacgtaacacatattaacaaatgaatatacgaggaagtgtagtttatgcattgttttgcttaatggtgtttgaattgtaggcctcatggacaacattcagttatactagctgaagatgtatcaaagtttgtggaatatacgggagagagaagcgaacatggagcaatcttagctggttcaaggcaggtttacttgacatttccggcagagagtagtttcactgaacatgacgtttcaaactacttctctgaagttggaccagtggaagatgtaagaattccatgtcaacaaaagagaatgtatggatttgtaacttttgtttatatggaaaccgtcaaacgcattcttgctaaaggcaatcctcatttcatatgcggagcacgtgttctcgtcaagccttaccgagcataattaggttcgaggaaattccaaaaactgttatcacatcatcgtctttgtctttggggttagactgtttggtcggatggcatgggccatggagttaggttttttagactatttggtttatgacagggggtgagacacaaaacatatataaaggatctgttttcaggtgagcaagttaagaaacataaggtacatgggttatctcttattgaacgttttgatatttcattgtatcatatgacaaatccttctagttttacgaacaatgttagaaaaatgtatgggtagtttcgcctacttaagaaaatatcgccatatcaacgatgaatagtctgtatgatcagaaacttatgaatgttgaacacttatatattgtacaatgaataagagatgaataacattgaaaacataattttttcgctaacaatgaaagaaatgaatattcaaaaaaatatttcatcgtgtcttgcgaaatgtagttaattctaaggttataaaaccaaaaaaaaaaattgatctggaaaatatacctgaccaaaataatagcaagatttgctaatagaaagaattgacaacaatctggaaaatttataggaatataaatagatattaaatctgacgcgagccaccatttatattcaattcttcttctagtgttccattacacatgcgatacgtatttacataccagaagacatg

SEQ ID NO: 165451 - DNA, 894 bp, Arabidopsis thaliana landsberg
  unsure (1)..(894): unsure at all n locations
ctagacttgagttggtcttcctcgtcgcccatgccgctgccgtccgtgacgccactccacgtcgacgcatttacttttcctccggctgttgagtcgcccgcttcccacaaaagacttttcctcggtggtgcaggttagcatcaatagtctgtctatacaattaatgcacacagcagcattatgtggctaattacctttaatcacgcagggatacgatggtttgatattaaaggcaagttcgtgattgtgacggtcatcggagtctaccttgaagccatggcactgccgtcaatctccgctaagtggaaaggcaagaatgcaaaggagttgacggaatccgtccctttcttcagtcaactcgtcacaggtggtgtacactttattacgtgctaatttaattaaaacacttttctatctcgttcacacttcacacgatttttgtagttattacatgttcaacttaaacacgtcatatattacaattgtttttgttcttctcttgtgggaaaaggtgagtttgagaaattggcaagggtgacgatgaaaaagaggttaacggggatacgatactcagagaaagtagtagaatactgtgaggagatcatgaaagcgtcagggaaatacacaagatccgaagccaaagccattgaccaattcttgatggtcttcaaaaaccaagatttccctcccggctcttcaatcatcttcgctatctgtcctaaaggctctctcacagtgagttaactttatttttcggattatcatttcgaagaatatttgatcgaatgaatgaaatgattaatagatattttaacaacttgtgatgcagattgcattttcgaaagaggagagagtcccgaaanctggnaaagcggttagcaagaataagttgtt

SEQ ID NO: 165452 - DNA, 2157 bp, Arabidopsis thaliana landsberg
aactacactgatgggaattatccggaaggcacgaaagatcctggaatcggttggatgaccgtttttcttgttctttacttgctttgttggtcttttagcattggttcctctaagaaaggtagagattattcaagattctgtctcattgcatttgtagttagagatgttgcggtaggccaaagtttgcgggtcattccgccccatataattgcgatatggccctggccaaaccccttatatccaacataggacggagattaatattggccaagtttggactattaatcccctgttggctggtttgggtctacattgctaagtgttcattatgctttttcttttggctaaccagatcatgatcatagactacaagctgacatatccaagtggaacagctaccgcggttttgatcaacggtttccacactcctaaaggcaataaaatggccaagtattaactcgattttttggcagtctcttagctctctttcaccactaattctagagtttttgatttaaataaaatctgtttatatgcaggaaacaagtgtttgggtttgtgaagtacttctcatttagcttcatttgggctttcttccaatggttcttctctggtggtacagagtgcggtttcattcagtttccaactttcgggttagaagctttgaagaacacgtgagtattattcttagttctattgactgtttatatatcaacagatagaaacagaatcttgatgatcttgaaaaaacttgacagattctacttcgactttagcatgacatacgttggagcaggaatgatctgtccccatattgtcaatatatctttgctttttggcgcggttctgtcttggggaatcatgtggccactcattaaaggtcttaaaggagattggttcccatcaactcttcctgaaaacagcatgaagagtctcaatggttacaaggttccatacaaaaaacactagtactctacaataaactccgccctttctttcgcgtactttcgttcttaatttgttcataactctttaggtgtttatatcaatctcattgatcctcggagacgggctttaccaattcatcaagatactttttaagacaggaataaacatgtacgtcaagttaaacaatcgcaactctgggaaatctagtaagtatacaccaaaaaaactatagaaaaatcgtcatttcaataatgtattatctgatgttcaaacgtaaatcgcagattcggagaaagataagcaatctattgcagatcttaaaagagatgagatctttgtaagagacagcattccattatgggttgcagcagtaggatacgcagcgttctctgttgtctcgatcatcgcgatccctataatgttccccgagctgaaatggtacttcatagtcgtagcttacatgttagctccatcgttaggtttcagtaacgcttatggagcagggctaacagatatgaacatggcttataactatggtaaagtcgctctgtttatcttagccgctatggcagggaaacaaaatggtgtagtcgcgggacttgtcggatgcgggttgataaaatcgattgtatcgatttcttctgacctaatgcacgatttcaagacaggacatttgactctgacttcacctaggtcgatgcttgtgagtcaagcgatcggtacagcgatcggatgcgttgtggcgcctctaactttcttcttgttttataaagctttcgatgtcgggaaccaggagggagagtacaaagctccttacgctttggtatacagaaacatggcaattcttggagttgaaggtttctctattttgcctcaaacattgtttacagctttgttacgggttttttggcattcgcggtggcggcaaatctcgttagggataggttaccggataagatagggaattgggttccattaccgatggcaatggcggttccgtttcttgttggagggtactttgctattgatatgtgtgtgggaagtttgattgtgtttgcttggaatatgagagatcgagttaaagccggtttaatggtaccggcggttgcttccggtttgatatgtggagatggtctatggattttgccgtcgtcggttcttgctttggccggcgttagacctcctatatgtatgggcttcatgccgagt

SEQ ID NO: 165453 - DNA, 930 bp, Arabidopsis thaliana landsberg
gtggggggtcaggttggggcaggtcctccttccaaggtccgactcggtctcagaaagtgagacagtcgtccaattctggtggggggtctgcgggaagtaggccctccactggtttgacactcacgaccgtgatcatccaatcagtgaggacgaggctgggttggcgaacctgcttcgccacatcaaagggaggaactgcctaattcccggattgaagaacatggccgaggcggcggcttatgctgacatgatggcgaaggagggccaggtaataatcgataactgcctccttccaattctattcttatgttaattctaacttttgttttgcctatggcaggcgatagctgccacaaacaagctggtcgctctctatgagcaacgtttgagcaaggttccttcggcgagcgagctctaagaagggaagaccctcatccaggagctgacagcgagtgtgacttgtttgtatatattttatcgatgatatgatgattctgacctgactatggtttcaggcggagatcgagaggttgaaaatggagctgtccacatcgaaagatctcgagaaaggttatgcttccaagatcgggatcatggaacagaagatcgtggggttggaggcagataagcagacagcgaggaaccagattcatcgcttgaacgaaaagaaggacgagctctctaaaagagtgctgcatctcacttcgattgtgcagggagctaacaaggcggttcacaatgctaaggttgatctggctgcttcgtattcaaagttgctagatgagatcaagaagaagtgggtcgccaagtaggaattcaccgtgctggaaagtcaagcggccgaggtggcatcgcccttggccttgattgatcaaatcacaaaggcaactgtcgacctggccgtagagagacctcggctgcgagcggagc

SEQ ID NO: 165454 - DNA, 842 bp, Arabidopsis thaliana landsberg
agggctaagagaggacaaatcactcctaagaagaaggaatcatccttgaacttcattccctttggggtttcaagtaagctactctttttttttttctcattttcttgaaattctctagtaaattgtaaactcaaacctagataatagattgatacaattacctcaaagtttaactaaaatatcatagtctcaaatattgttcaggagtgtcaactatttattatcatacatttgtattagtgtacctttgtttagtttttgtacgtaatcaatcctttcatgagaacttacatattttcacaaaatatatatataggtggtctacaatcgcaagatatttaccaggacgaacagataatgaaattaaaaactactggagaacacattacaagaaaaaccaaaaatcttcttcgaagcaagacaaagtaaaaaaatctctatcccggaaacaacaacaagtggatcttaaaccacaaccacaagcacaatctcagaatcatcagtctcagctagtgtcccaagatcacatgaatatcgacaacgatcataacatagcttcatccttgtattacccgactagtgtcttcaatgacgaccaattatatatgcctcaaagtgtagcaacaacctcatccgaccactctatgatcgatgaaggtcacttgtggggaagcttgtggaatctagacgaggatgatccgcatggttttggtggtggctcaggacagagaacagctggagatatcgctgagaagtttccaggcagcggaattgaggccccgtcgtgtggctcaggggattatagttatactggagtttacatgggaggctatattttttaa

SEQ ID NO: 165455 - DNA, 2287 bp, Arabidopsis thaliana landsberg
tcaaatcacaaaggaatggctcaattacttctcttcaccatcttagtattttcttccgtttttgtaatcgtatccttaagcttcatcccaccgcctcacccatttgatcccttgactgagatcgaactcaatatcgtccgcaacatcatcaacgaaaggtaccccgttggtccggaacataggttcactttccagtacgtgggtctcaacgaacccaacaagtccctagtcttatcctggcattcatcacaagaccataatgtcaagtcaccaccacgacgcattcgtcatcgcccgagatcacggaaagacccgagagatcgtcgtggactttgcctctcaagccatagtttcggaaaagattcacgtaggaaatggttactctatgcttacaattgacgagcaacaagcaaccagcgagcttgttctcaagttcaagccgttttgtgactcaatcaggagacgtggcttgaacgtgtccgaggttgttgtcacgacctcaacgatgggatggtttggtgaggcgaagccggagaggcttataaaaaagagaccgttttatctgaatgggtcggtgaacacttaccttagacctatagaaggaatgacgataatcgttaaccttgaccagatgaaagtaacgaagtttagggataggtttacgagtcctttgcctaatgctaagggaaccgagttccgtatctcgaagctaaaaccgccgtttggcccgtcgcttcaaaacgccgtcctttttcagtcggaggggcctgggtttaaaatcgatggacacacggtcaggtaaaactaaaatatctgtttttagctatatacttaaaaattcatattttatagaaaaacgatattgtatctattataaaaaaaacaaatgaaatcctaataaaacatacatttaattattattctgttttatttttaaaatttaatgtgtgaagaatagatgggcaaattgggaattccatatgtcatttgacgtacgagctggtcttgttatctctcttgcgtccattttcgacatggacgttaacaaataccgtcaagtcctatacaaaggccatttgtcggaaatatttgtaacttatatggatccaagtgaagattggtacttcagaactttttttgactgtggtgaatttggttgcggccaatatgctgtgtctcttgaaccttacaccgattgtcccggtaacgctgccttcatggacggcgtctttgcaagccaagacggaactccgataaaaatcacaaatgttatgtgcatcttcgagaaatatgccggagacattatgtggcggcataccgaaattgaaattcccggcttaaaagtaacaaattaaactatcaagatctacccaactaaattcttcaatttattagtgatatataatatggaaaacttttatatttaaataagtgctgatgtatagatcacagaggtaagaccggacgtaagtcttgtggtccggatggtgacgaccgtggggaactacgactatatagttgattacgagttcgaacctagtggttccatcaaaattggggtaacatgtctttcaaaaacttttctagcttatttgtttttggtaggagaaactttttctagcttattacatgcattttactttattgatttaagaacttaattgttaatcatttctatttttggtatattggaatattcacttaatatttcagagaaatacaatattaaattgtattatactaaacattaattgaaattgaaaatgtaaatatgagacacaaacacagaaagcatattgcttgtgataaaaagttaaaaaaaaaaatcgattcatttttgtttaatatatagactcagactcaatcatacaaacaaaataaatagattccaactctaccaaaaacaaacaataagatttaacaggatcaatgttcccaattttattttgttctaatgttaccgttttaatgtgcctaggtcggtttaacaggtgttttagaagttaaaccggtggaatatgttaacacatccgagatcaaagaagacgacatccatgggacaatcgtcgcggacaacaccattggagttaaccacgaccatttcgtgacataccgtcttgatcttgacattgatggcacggataattcttttgtccgtagtgaacttgtgaccaagaggacaccaaaatctgttaacacgcctaggaagagctattggacaacgaaacgtaagacagcgaaaaccgaggccgaggctcgggtgaaactagggctgaaagcagaggag

SEQ ID NO: 165456 - DNA, 1845 bp, Arabidopsis thaliana landsberg
atggaaaggtgtgattccttctctccctttaacgcgaacaagtccgggatcacgccaaagcagccatgttataaactctctatgatctttttccacagcaagatgcaatggactgtagccacttgtgttcagctttctggcaaacgatggcttaagattcagcatctccatggcaaatggaatgttgtcagaagctgcagctacatggagcggagtgttaacaaatggcacggcattgatgttatcaagaatgtaaggattctcctcaatcagagcataaaagtcattgatgcttccggtttcagcagcatgttgtagtctcggatccatggtgagagagagagggagcttttgatcagaaaaactctgaattcaagaaaaatgtttgtgatctaaattcagcaagaggacaacaaagaaattgtctttacctagaaccatcaaacaaatgtaagaaagaataaagaaacagagttcaaagaccgaagaacccacatgtacatgtgaagaagagacaatttaaaaacaagtgggactcttttatatggcagctggatatttcttcatggtatcacactcatttgatttgacattcacaacacaaatttcaaaggctcacgcttgatgaagcatattgaacgtactaacatgtatatagaaacaaactacctataattacaacattattatgatacaagaagaagaagtcagaagggacataacatatttttaatgtttgcacctctgcattctcaaagtccgctgagttgttgtatcaaactgtcaccactgcttacgaaagcttccatcaagatatggagaggaaaaagcaggtacaagggaaagcaaacagagagaaccagtaaggcatgcatactcggtagagagagcctctctttgcctcatttacgggatcatcggtaaggacttggacaagtcaaatctattttcatatccagagcatctgaccattaacactcacattttggatacattaaagttactcgacactctacctcaagattgacagtaagcacggattctctcattaatcaaagcataaaagtcaccgatgctaccagattcagcagcctgttgaggccttggatccatagaaaatgagcttctggcagaaacgtacttattctaaactctaaagtaatgagtgggtttattaaagtttgttgctttgaaaggcccatcgagtatattcccaaaaggattagactagtcgtctttatacatacagtacatctcatatataccaaccaaacctctctctgcatctttattaacacaaaattccaaaagattaaatgttgtcgaagctccctacacagcgacacttgcacctctctccctcctctccctccatggaaaccgtcgggcgtccacgtggcagacctcgaggttccaaaaacaaacctaaagctccaatctttgtcaccattgaccctcctatgagtccttacatcctcgaagtgccatccggaaacgatgtcgttgaagccctaaaccgtttctgccgcggtaaagccatcggcttttgcgtcctcagtggctcaggctccgttgctgatgtcactttgcgtcagccttctccggcagctcctggctcaaccattactttccacggaaagttcgatcttctctctgtctccgccactttcctccctcctctacctcctacctccttgtcccctcccgtctccaatttcttcaccgtctctctcgccggacctcaggggaaagtcatcggtggattcgtcgctggtcctctcgttgccgccggaactgtttacttcgtcgccactagtttcaagaacccttcctatcaccgttacc

SEQ ID NO: 165457 - DNA, 3891 bp, Arabidopsis thaliana landsberg
atggcacgtgacccattgaatgaaatcagcaaaacgcagcgttttaggttcgagttcgtttttttgcgttgtgctctgtttcttcccttctctctctatccagtgcgtttctccacaatcctttcgccttcttctgccgaaattttgtcttgcccaaaaaacactaaaaaaccgaataacgcaaactactaaaaagcttcaacaagattgaaactttctgcttctattgattctaatcatctctctttcacaataccctagtatcaatttctccttttgactctctcggtttctagagattatttgtcttccatcttcaaatccaaaccaagctttagaggtttcgacgactctctagccgccgctttttcttaaacagagaagacttcaagaggttcgagaaagttttctctttttaattgggattttttttttattgtatagaggaactgatgctggcattgtgcatgtgctttgttcaatcctgattctgtattgaaatgttctgatttaatttgcgtttggattctttggtgattagagatggggcatttttattttagggtttttgtttttttgattgtggcagtgacaatgtgttatggttttggacttctttcgaaacaatcgtttgctctgtgatcgtagttctccttagctcacgcggcatcaccgaggtacacttcctaagatctcttattttatttgaaagttaattagaatgttttgtactgttgttcgtggaatgttttggcatgtatatgtatgtgttgtgggtttaggatattttagttaacttttgaagtgtattcaatggagttcttaatcttggttacttgagttatgtagttttaagttcccttctggtgctagaaattatccttgtaattgtcaaagattgtatttcttaacattagtgtaaggatggagtagactggtttaagctttagtacaaggattatattccgccaatttgttcagtttttcatttatcctatagtgttttagatagtttccttcgaagaattaataggaactacttggtgtaggttttagtatgcttgaagcttatgagatgcataggttttgacgttatttgcaatccctctagatttccacagttgtctcactgtaattttccagggagtagaactaactgaaaaatctcccaggatcttattttcacttctcttgttggttgaaagtataatatcttcatgatgtttttttatttttctattcatgttctagctgttggatttgcgttgatgattaacgtcagtgtctggcaaattgacagggtcttatggctcttaggaaaaatactccaaaaggcgattcagtttcactacctatgaagcctttgaatttctccagaaaattgccaggaaatgtgcagattccagaccctgatattgttcaaagtgttgcgcctaacattgatctagacctccgggaagtttactttttgatgctccacttactttcatctgggccgtgccagaaaacttatgcactgttgcggcatgaacttcttgaacatgagcttcttcctagaagatatcatgcttggtactcgaggagtggattgcctagtggggatgagaatgatgatggcaattcctttcctttgaactatactgagttggctaagaggtaactaacagtgttactctcaccgtttgtagtactagtgtgaattttaaattatttttcaagtgaagaagttaatatgtcattcatttctcctaattctgtattttctaatttgttaatgactgggtttagggttcttctcaccagaaatatttaacttgtttcatggcattgtatgtgcacttccaggtattctcatgtaaaaaaagatcacctggtggagcttctaaagcaattggtctttgtttcaaataggcctaatccctcacgagggatcggtgatggaaataaaatgattggagctggggttccaacacttttaggcactggctcgttctcccttttgagctgtaggtgatttctagaatttgttattttattggcacgtttaactcactcacatgcacatacatagactcatacatacatatgcttgcatatgtctataataacatattaatactaccaaggtctcttataaattatttggggattctttagcatttactaaattctctttgaaaatcttgatttgctattaagctacttcgtttggtttttcagctgacaaggaaatagttggaagtgatctcaaaccaccacctattggcatgcgttggcctcatatgcatgctgatcaggttcgtggtattagtttgagggaaattggtggtggttttgccagacatcatcgtgccccatcaattcgagcagcatgttacgtcattgcaaaaccatcgtcaatggtacaaaagatgcagaacatcaagaggctacgtggacacagaaatgctgtgtactgtggtatgatatttaattgtttagggatgaaatttttagtgtcaagttccattactaaataatagactaatcatttagatgaactggatacctgaagctatctttaaatgctgcagctatattagatcgctcaggaaggtatgtaatcactggttcagatgaccgccttgtaaaagtatggtcgatggatactgcatactgcctggccagctgtcgagggcatgaagtgagttccaagtactttgtgagaatgctatcattttgttactgtatctttaagtggtgcttaaaattgtttttggtgcatttgtaagggtgacataactgatcttgctgtgagttcgaacaacattttcatagcatccgcatcaaatgattgtgtgatccgcgttgtaagtttcttgtatcgtcctctgtatatgattgacttccacatattagcctcttgatgacttcacccatcaaaatttttgtagtggcgattgccagatggcttaccggtttccgtcctcgtggacatactgaagctgttactgctattgcatttagtcctagacctggatccccgtaccagcttctctcgtaagaattgttctttttggcatcttatacgctgttttgtgtcagttctattcattggttgatatcatgctatttatgtgtttggaaaagatggtttatttcaactggtaagctccatgagccctttataaaatctttgcagatcgtcagatgatggcacatgtctgatatgggatgctcggggtgtccagcttgctccgcggatataagtccctaagcctcatagtcctattggtgattggctgattgctttatattcctagttgatttatatgtcgatttgatctattggaagctataggactgacttcggtatcatattccaggagaaaaccgtggcggttcttctagtaatggtaattttttttgttgtgcattcaatgctgatggatctatctttgtcaatagcagctctgataatcgtgctagagtttactcggtcttgataaatgtttcttgactagattatatatataatgatgattcagttaattagagtagatacttccttggttacaggtttggggtgctagtaagaccaataagaatgatttagaccagccaaatcatgagatggatgttctggctggacatgagaatgttgttaaattacatttcttatcatatatgttatatttggtacctgctcatatttttaaattacatttcttatgagatcctaattttcttatcttagtcattttctgtggttctttctagtgcttgtgctggaagatctggacgaaaatgttccaaattttaagaattcttggtgtgctttctgctgcaattattcgtaaaagtttccttataatgtttttgacactcaataacatatgtatttgtctaggt

SEQ ID NO: 165458 - DNA, 1221 bp, Arabidopsis thaliana landsberg
acgatgaagaacaaagcgtttggtcagattatggatgatgcagagaatcccgggttcttcaagatccttcgaagtgcagatttatcgtctgaaatcatggtgattctcttaattttctcatactttatcactgatttttcttgtaagcttatccttgaaagatcggatcttctggttcttacaaggttataatgggtctctgaagtagatgtggtctcattaacttagatctgtttgttcttggtaaaattttgctctgtttttttttttggtctttcttcgcttctgatttcttgctaggtttgtgtgtgaaatgatcggaccaaatcaattcatgtaaaaaaaaaaaaaacttgaaactttggcctcaatgtgcttggtggatgtgaagttttcagtgattgccagtgtaattgcatatttcaactctttcttgacaaatatttttcttgttgtatgtggtaagagagggatccctctaaacttcatcaaaagcatctcggaagaagagttatcggctaagatgttgttaaaagtgtcatggggaagttcttggcctatcaaaatttgtagaaacccaagcttctactttatggagaaaaagggatgggatcagtttttgagcgacaatggattaggtaatgatgagtttcttaccttcacacaccaaggaaatatgtgctttaccgtggacatctaccaaatagacggtaaagagctacttacaccacgcagatctgcaaccattgcttctagttccggtaaatatttcatctatgtgattgctttcttgatgcttaaggagaagaatgaagaagaagacagtgcttaatttactttttgtggttgattttgatgaaaacaggtcggaacaagagagaacaaaggaataacatctacaaagatgtgaaggaggaagaagacatagagtcttggtctgaatcgagctatcctggtcacaaaacagctgaatctacaggaagaagacaaaggcttagcttgagtaataagaaagccaaggaaactgagaaatcaaagaagaagaagatgaaggtggaaagtattagttacgattctcaagatgacagtttgtctcttgttccagaatttaccctcaccataaagaaatcatacctcattttcttggaagaccaaacatgttacaaaatgtcaaactggtttatataaatgtgattacgaatcaatagaaattgtgattca

SEQ ID NO: 165459 - DNA, 1876 bp, Arabidopsis thaliana landsberg
atggttccatcgttggaacgaggaataagcatcacgagttcattcaatcttgatagaatgtttgattcctcaccgggaaaagaacaacaacaacctcatctcgcgaaacaaccatgccggagagtcaaactcaagacagcctcggtggaagtcccgtggagactagccgcccgatgacttctcgtctgatttctcgtagacaggacaagcaacaatccggtgattaaagaaaaagtttcattatttctgttcgtttaagaactaagaacgctagagatatatatcaaaaagcttacaattttgcgggtttacatattgtagagacggagatgatgaaagatagattcacgaaattacttcttggagaagatatgtctggcggtggtaaaggtgtatcttctgctttggcactatcaaatgccatcacaaatctagccggtaaaaaattagctctatagttttttttagttatcttcctccacaagttacataaaatcaatctatggttttgtttaatttttatgtgtagcgtcaatattcggggaacagacaaagttgcagccgatggcaccggatagacgagcgaggtggaagaaagagatcgattggttgttgtccgtgactgatcacatcgtcgagtttgttccatctcaacagattagtaaggaaggagtctgcaccgaggttccatttcttgaaacttataattaactatcaatttcatattcatcaacatcagagataatattctgattcaatgactatgtctagattatggtgacaagacaaagaggtgatctcctcatgaacatccctgcccttcgcaaactcgacgccatgctcattgtaagtgtgtccttgtatatttataacccatatttatatacatgtatgttatgcaataattttgattgaaggatattgaaacatgttaggatacattggacaattttagaggacacaatgagttttggtatgtatcgagagattcagaagaagggaaacaagcacggaatgaaaggacaaaggacaagtggtggcttcctccggttaaagtccctcctaatggcttgtccgaatcagcccgaagaatgcttcattttcagaaagattcagtctcacaagtccaaaaagccgccatggctattaacgcgcaagttctgtcagaaatggctatccctgatagctatatcgagtctcttccaaaggtgatcttccttttttgtcttaaaatcggtatatagtttggatgatttacttgcatttacttgaaaatatcatatactattttaagcaaatcaataatggttattaagaagacttggattattttcagaatggaagagtaagccttggggattcgttatacaagagcataacagaagagtggtttgatccagagcagttcttgtcaacacttgacttatctacagagcacaaagtgttggatgtgaagaataggattgaggcctcaatcgttatatggaaaagaaaacttcatctaaaagacaacaaatcttcttggggatcagctgtgagcttggagaaacgagagttgttcgaagagagagccgagacgatcttggtcttgcttaaacaaaagttccctggtcttccccaatcttcccttgacatttccaaaattcagtataacaaggtaatgctcacatgttattgctttattttgttattccgatatgatcggacaaatcatcatctaggaaagattctgaaaatattggtggtcatgaatcatatatagaattttgatataacatttgttagtaaattttaaataagattaacaacacttactaaccgtactttggtgtatattatatggggttcatatgtcacttatgtgtctaactatagg

SEQ ID NO: 165460 - DNA, 743 bp, Arabidopsis thaliana landsberg
gatttgcatacgcataataataaccaggtagatgattcacaatcagaagaaaaaactgatacagacaagaatatgacaataatgtttaacatcttggggaaaaagaagcgcgtgcagcttgagaatttggtgctcaacaggcggtcatttgcacagactgtagagaatttgtttgctctatctttcttggccaaagatggacgagttgagatcattgtcgacaaaagtggttctcatttcgccagtaagatcacaagtccactctcttgtgtctggttttgatatttaattcgtttcacttatacttgatctcctaatgtgtcctcagtgccgagaaatgcacctgatgcaaacgtggtgatgtcgggtgaagtcatttataaccattttgtgtttagattagatttcaaagattggaaggtaataaaatagaatctcatttcgttctctagattgttaaattatgtcctgaagatgtctgatttatgttgatgtgatgatatatgtcaaacagttgatgtctgaaatggtgccactgggcgaggagctaatgccacacagacaaactgcagttgcttcatcttcttgtcccgctgcatcagcccctgcatcagcagacttcacacaagatactcagacaacaccaataagaaaactatcgagaaaccgagggttggttgtacaagaagaaactgttgtagaagatactcctgacaaagagggcgatgggactcgaaggagat

SEQ ID NO: 165461 - DNA, 2419 bp, Arabidopsis thaliana landsberg
  unsure (1)..(2419): unsure at all n locations
gcttgagttcgtttcaaggactaccaacgagattgtgcacatcatggtttcagtgaggtacaacttctaggcaccttcttcagaggagttgattggagataccagatggctctagatgctgcgagcaatggcaacttcaatacacgttttccaggtgatgctacaaccctgatagagaaccttgcttgcagcaacagcaccaagaatgcttattttgagaggaagaagattgctggagctatttcaggaaatcagatggcagaggtgaatgctaagctggattcagtacattacttgctcatagggaagaagcatgttcactttggagctgaaggagagattattgagcctgagcctgagtaagaggaatgagttttctacatagatggttagggatactggaagtttgggcagccatagggcaactttagtggcaccaggtttacagggaaccaaggttcctccaactacactccaaagcctcctttccagaagacttttcctcaaagcaactttcagagcacctatggaaattcaacttaccaagccccccctccaccctcatcagagacaagaatggaatcgatgcttgaccagattctggagagccaaacaaagcttgttgtgcagtttaatggcaagtttgatgctatctacacagatcttaatggaaagatcgacaatctgagctctcatttaaagaagctagatgtacaggtagctcaaactgcacaatctatcaagtgacaagaggttttttttctggtaatcctgatgctaacccaaggaagagctgcaatgccatcttgatcagagaaggagatgatgtgtgagaggaattggacactgaagacgagttggagattgcagttgcagaggatggtgtcgaccgacaccctcctgtgtcgatcgacaccataggggatgctcttctcagagacgactaaatacgacggtgtcaatcgatacccctctagtgtcgatcgacaccatatgggacgctcttttcagagatgacacaatacgacggtgtcgatcgatatccctctagtgtcgatcgacactggatccggactgcaccttgtcaggtgcaagtacctatgcagctcaagccggtttacactcctcatgtcccctatccgaggaggcgtcgttctaagcaagagattcatgctgctaagtgcacaaccataatggagaagatcctccatactcttcctaaggatgcttctgagacatcttctacctcactcaacaggtatgtcaagcgacttgttgacaaaggaattagctcaaatgaagctaagctgattaccagagacattagtgcaatcatgctaactaaggccaagaaggaaaaggcacagagagtagacatagctgagtacatccgcaccattactcctggtcagaccactgagaagcttccagatccaggtagctttgtccttgattgctctatctccaaaagcagattcagcctctctttgtgtgacctgggatcaagcatcaacctcatgcctttaagtctgttgctgagagactaggcatgactcactacaagcctactcgcattactcttctcattgcggatcgttccaagcgaatccctgaaagcatccttgaagatgttcctgttaaggttggtaactctgttatacctgctgattttgtggtcctggactatgaaaaggaacccaaggatccccttatccttggaagagcattcctagttacagctggtgctaggtttgatgtgaagagagggagaatctctctcaaggtttgtgattcggagatggagtttggcatggatggttcaaagcttactaagcctatcagttgcattgcttttagcataggcacacctcctcagactgctcagaatcccaccatagagccacacacaatgctcctattcgctcagctcgccaacgaaagttgcagagcaatagtgtcgatcgacacccctacccctnnnnnnnnnnnnnnnnnnnnnnnnnnnnnnnnnnnnnnnnnacattctcttcagcccacaccacttgaggatctttgtgataagttctcttctctcttctcctactttatcttcgattaattctttagattctttgaagacatcttcaaaagataaaaagcctagagttcctcgaaagcttgtttctcctgttgttcttgcaggtgacgagatgagtgtcgatcgacacacccttgagtgttgattgacacctgtagctgcttcaaccagatccgtttacacacctccttggaaggcgaggaggcagcaccaatcctccaccactccacccacatcctgaactccaccaaagttaagctattgactcaaaacaagcgcttagtgggaggcaacccactggtttgatttttcattttccctttctttcttttctttcatttt

SEQ ID NO: 165462 - DNA, 1646 bp, Arabidopsis thaliana landsberg
atgactatagttaaaaatgatttagatgagctcattcccactagaactataacaagacatagaatgtgcattgattacaggaaactaaatgttgcaactagagaggaccattttcccttgccattcattgatcaaatgttagaaaggctagctaaccatgtttattactgttttcttgatggctatagaggtttctttcaaattgcaattcgccctaatgaccaaaaaaaaaccactttcacctgtccctatggaacctttgcttttaagagaatgccttttggtttatgtaatgctcctgggactttccagagaagcatgacttcgatattctcggattttattgaggagataatggaggtattcgtggacgatttttcagtctatagatcctctttctcctcatgtttgttaaacttgtgcagggttctagaaatgtgtgaggaaaccaatttggtactcaactgggagaagtgtcacttcatcgttcaggaaggaattgtgctagggcataagatttctggtaaaggaattgaagttgacaaggcaaaaatcgatgtcatgattcagctgcaaccccctaagacagttaaggatatcaggagcttcctcggccatgcaggattttacaggaggttcataaaagatttttcaaagactgctcgacccctaaatagactgctgtgcaaggaaactgagttcaactttgatgaagattgtctcaaagctttccatttgataaaggaagcattggtgtccgcccctatcgttcgagcacccaactgggaccacccatttgaaatcatgtgtgatgcatccgattatgcagttggggctgtcgtaggccaaaatattaatggcaaacttcacgtcatctactacgctagaagaataatggacgaagctcaaacaagatatgcaaccatagaaaaggagtttttagctgtggttttcgcctttgagaaatttagaagctatttggttggctccaaagtgaaggtctacacagaccatgcagcgctaaggcacatctatgccaagaaggaaaccaagccaaggcttctgaggtggatactattgcttcaagagtttgacatggaaatcattgataagaaaggtgttgaaaatggagttgcagaccatctctccaggatgagaattgaagattcagtcccgatagatgatactatgcctgaagaacagcttatgttctacaacctggttaacaaaagcttcgacacaaaagacatgctggaagaagcatatgcagttgaagaagaaaagttgccctggtatgcagatttagtcaattatttggtaagtggtatgatcccctagagtttggatgcatataaaaaaagaagttctttagagacatccaccattactattgggatgagccgtacttgtataaaaaggggaatgatgggctattcaggaggtgtgtctctgaaggggaagttcaaggtatactgagacattgccatggatccacctatggagggcattttgcaaccttcaagactgctcagaaaataatgcaagcaggtctatggtggcccacaatgtttaaggatactcaggaattcatagcgaaatgcgatccatgcaaaagagttgggaacatatctagaaggaatgagatc

SEQ ID NO: 165463 - DNA, 2504 bp, Arabidopsis thaliana landsberg
gacggatttaaagaaagggctctcgcaagctggaatgatactacagactctatccctctcgcaaggaggattcggaattgtcgcaagtcaatggctgcttggaaacgaagaaacaggacaaattcagcagaacagattgaacttctcaaaaggcggttagactatgctctatcaaatactggttttacaactcaagacatccattgtatccgacaagagttgagtcaagcttatcaggatgaggatatgtattggagattgaagagtagaaccaactggaagaattttagtgatagaaataccaaatatttttaatgcttcaaccaaatcacgtctagcaaggaacagaatcctatcaattgaagacaactacggaaactttcatcatggtgattcagatattggtaaaatagcagagggatatttccaagagctgtttactacaacacgagacgatcatgttaactaccagtctgtttttgagggatttcaaccacgggttactagtgagatcaacgatgatttggttagagcagtttcagatgaggaaattcagacaacaattttcgccattggagaggataaagcaccggggcctgatgggttaactggagccttttatcagcaattttggccagatatcaaaggagcagtcactcaggagatacgggattttttcaatacaggagaaatgggtgaggaaacaaatcacgccaacatttgtctaatcccaaaaccggagatacctacctcaatgagtgactttaagtccattgcattatgcaatgtaagctataagatcatgatctcaaaaatattagtaagccgtctcaagcatcatctctcaggcatcgttacagagaaccaaacagcatttattccggggtgtaatatcatggacaaagtgatcatggctcatgagatgctacactcgttgaaatcaagaaagagatgggctagatcctacatggctgtaaaaacagatatctcaaaagcttatgattgtttggagtggagttttttacaagacacaatggttcatatgggtttcaatatcaaatggatcaactggattatgaagtgtgtcagctctgttactttttctgttttggtgaatgggtcaactcacagattcattaaaccaagccggggaatacgacaaggcgacccgctttcaccgtatttgttcatcttatgctctgaagtactatcacatctccttacaaatgtaacttcggtcaacaaactcaagggaatgaagatcagcaacacgggaccaacaatcaatcatctactatttgcggacgatgctttatttttctgccatgctcatcccaagtcatgctcaacaatcatggagattttaacaaggtatgaaacggtgtcaggacaagctgttaatcttcataaatcggctataacgtttggatcaagagttaagcagcaagtgaagacgcaacttagacgaatactaaacattcacaatgatgggggaggaggtaaatacttgggtctgccagagcagataggtggaaagaagaaggagattttcagttatattgtcaaccgtgtgcaacagaaaaccaaaggctggtcaaatcgtttcttgtcagatgctgggaaagaaatactaatcaagacagttgcattatcattaccagtgtacaccatgcactgcttcaagttaccaaaaggaatttgtgatgatatcaatagtcttcttgcacgatattggtggagtaagagtccatataagaagtcaatgcattggttagcatggaagagactgacaataccaaaaaatgaaggcggtttagggttccgagacattacaagtttcaacaaagctatgttagctaagcaagcatggaggatacttcaatctccaacatcgcttctctcccgtcttcttcggggaaaatactttgaaacaactaacattttaaatgcaggtacaggacgaaaaccttccttcatttggcgatccattctggaagggcgagacttacttaaacaagggatccgaatcctaattggagatggcaaccaaacaaacatatggacagatccttggctcccaacacacccatcaagaccacctcaaaaacgagacgatgctatcacaaatctcactcgagttcaacaactaatacaagacggcacaaacatgtggaataaagaaatcattgaagatacttttgttgaagaagatgcaagactaattcaacgactgaggttacgctcacggccatctcctgatcttttgggatggaactatacgaaacatggcgagtacacagttaaatcgggttactggttatgtacacacctaccagatcaagtacaagattttgttccgccaccgggtttaattgagttcaaaaaagcaatctggaaactgaatacggcgccaaagctccgacattttttgtggcgcatcatcacgcattctttggcaaccgacgaaaatttggaaagaaggcatatcacttcagattctcaat

SEQ ID NO: 165464 - DNA, 1492 bp, Arabidopsis thaliana landsberg
atgatcatgtacggaggaggaggagcagggaaggacggtggatccaccaatcacttatcagacggaggagtgatattgaagaaaggtccatggacggcggcggaagatgagatacttgctgcgtacgttagagagaacggtgaagggaattggaacgccgttcagaaaaacacaggtttggctcgttgcggcaaaagctgccgtcttcgatgggccaatcacctccgaccaaatctgaaaaaaggctctttcaccggtgacgaagaacgtctcatcattcagcttcatgctcagcttggtaacaaatgggctcgcatggctgctcaggtataacaacaacttatacatatatacttggtgttacctgcgttacacgttaactaatcttcatgcaatttattatagttaccgggaagaacagacaacgagattaagaactattggaacacgagattgaaacgacttcttcgccaaggacttcctctttatcctccagatattatccctaaccatcaactccatccacatccacatcatcaacaacaacagcaacataaccatcatcatcaacaacaacaacaacatcaacaaatgtattttcaaccacaatcttcacaacgaaacacaccatcatcttcccctcttccatctccaacaccagcaaacgcaaactcctcatcatccttcacttttcataccacgactgctaacctcctccatccacttagccctcacactccaaacacaccatctcaactctcttccacaccgcctccaccaccactttcctctcctttatgttcccctcgcaacaaccaatacccgacccttcccctctttgccctcccgcgttcccaaatcaacaacaacaacaacggaaatttcactttccctagacctccacctctccttcaaccgccttcatcactcttcgcaaaacgttacaacaatgctaacactcctcttaattgcatcaaccgcgtctcaaccgcaccattttcccctgtttcaagagactcctacacttcctttcttacattgccttacccttccccaaccgctcaaaccgctacttaccacaatactaataacccttactcttcctctccttccttctctttaaacccttcttcttcttcttaccctacatcaacttcttccccaagctttcttcactcccattacactccttcttccacctcatttcataccaacccagtttactccatgaaacaagagcagctcccttcaaaccaaattccccaaatagatggcttcaataacgtcaacaacttcacagacaacgagagacagaatcataaccttaacagttccggtgctcatagaagaagtagtagctgcagcctcttagaggatgtcttcgaagaggccgaagctttagcctctggaggcagaggccgacctccaaaacgaagacaactcacagcttctcctccgaaccacaacaacaacaccaacaacaccaacaaca

SEQ ID NO: 165465 - DNA, 1076 bp, Arabidopsis thaliana landsberg
gggggaaagaccccaacaacagaaaccgcgagcagacataaaacgcccaagaggggccacttttagaagaggagaccgagggcgagcacaaaggggggacagcgagccggccccagaagacacacgaaaccacaagggcgaggaacaccagcagcacactcgccccctggtcgagtaacattgtagccattcttaccaatcactctaccccctggtcgagtaaccatagcttatgccactcaatgacattactcgaccccctggtcgagtatcactacgccacaacacctgaccaccactcgaccattcactctacaacattactcgaccccctggtcgagtatcatcactcaccatcatcaccatcatcaccatcactcgatcaagcactcgaccacatcttcaaagtctactcaaattcgcactcaaccagacaagttgagcacaaggaagagaagaggagaagaagaagtgtttggtagcggcccggagcttcatccgatcacgaagcccatcttggcccattatcactcaatgggccggtcgattaggttccccgcctatctactatcattttattgtgttttgtataaattggtgtttgagggttttgtccagggacatcaagtcaacattgagtttttgcttcagttttattttctgttttactctatctgcgctgcttttgcttctgcaaacctgtaattcgagatttttccaagttacattccgcatttgatttcatctgtcatcttgtttctctaatcttcatatatttacttatgcaatattatcgtttatctgcattatctctttgagcatgttgtctgagtagtgacatagagttcttaaggatgggatagaacgattgaggaatccttagtttgtagaatggttaagttttagaattgattgaatcccatcaggactagttgtgtttactgcttatttctttttgatcaactcgaattcgatccaaagcatttccgaacccagaaggtgtttgatgaatgcttgatccactagttcctgagatatgcgtctcaatcccaagggattggccgtttagagcgttt

SEQ ID NO: 165466 - DNA, 910 bp, Arabidopsis thaliana landsberg
atggagataatccatcagcaagtacaaaggaagaaggagaagatggcccgactggctgatcttcaaaggcagattgacgaagccactgaagaagtacgccatcttgctcaagacgaacaagatcgaaggccccaacacagggagcttcatcaagaaggcttattcaacgaggatggatggtatgatgattttaatgatgatacctttacctttgatgatgcttctcccttggcagcagaactgcaggctatcccatggcctccatcatacaagccacctcagcttcccatgtatgatgggcattcagacccgaacagtttttgatgagtatgaagcaccatatcttcatatggaggaatgcagctgtcatggccaagtccttcgtcatggcagttaagaatgtggcccagacatggtattcttcacttcggccaggaactatcacttcatggcagaagctcaaagacatgctggtgacaagtttctagggcttccagacgaagacagtcacagctcaggctctgtttcaatgcacgcaagatcatgaggagtatctccaggcatacgtccaaaggttcttgcgtctgagagcacaagcgcctacagtgcccaatgaaattgtcattgaggccatgatcaaggggcttcgtccaggacctactgccgagtattttgctagaaaacctccacagactttggagaagctgcttcaaaagatggatgaatacatccacgctgacaatgacattcgtcaaagaagggaggaagcctacaggttctctaagatgaccaggggcttcagagggagaatccacccaaggcatgtcaggtcaatccactccacccagaatgacgatagaggaagtcaacaacaaaggccacaatattcctcgcaagcttcggggcagca

SEQ ID NO: 165467 - DNA, 3573 bp, Arabidopsis thaliana landsberg
  unsure (1)..(3573): unsure at all n locations
agtgtccgttccaggatatctagcatctggttacatctcctgttagtgttcatcaacacagtctcttgaatgtggagaaacacatctatgatgttgtagaagtggttatctgcagtgacttttggtctcaggagtctccaagaaggtcatacggatggtataacactcggtgcttgatatggatactccttggggaacggaggtcgaagaagtacaaattatgattctgataacaatctgttacagtgacagcaactctcatcagctcttttctctctttgtaagttctcacgaagaagctgacgccttccttctctctggaggctagacccctctctagaatcccccacaatctatccacagtactactcgcgcagacgcataaataagaggagtaacagcaacggtagttgtagaagtgatgatctcgcggagcgcctccatcaacagcttcgaactttttgaatctcttgtagtttaaatccactttgtctcctaactccatgatctctttctcgaagatatcaataacgaagtaactgtctttaccaaaacgaacgatgtcacccactttttcaccttccgatcccggtttagactccggtacaaggttttgggattcatcttcttcctgctcagtagaagaacctgcgaaaactttctcctcacgtctcatatattgattagcagattttgacctaaattcgtctgcaagtaatactctaggtttacctgctcgatcatcatcagagtcgctgctgcttgcaccaatacctttatccctaccttcgaagagattagtaatattagaactatcattactcatgattttgcttttctcgtgagctctgtttctgcctctcctaagtattttattgtggatctttaagcgagttgttaagctaatgtcatttaggattaggaaaagcttaaaccctaagaattaaaggataagttatatnnnnnnnnnnnnnnnnnnnnnnnnnnnnnnnnnnnnnnntgttttcttatttggtaactgttttaacaaacttcttatgattcatttccttaatatgattatttttctaatcctaaatatactgcttatttgttattattagttataaatataataatctttcaatcttaatttattttttcattcaataggactaaagaattattaatacattgtttgccctaaaaaaaaaaaatcaaatcgctccccgggccttaaaaggcttgtgttggtagagaattaggagaatgggcccaagtcacaaaaaatatttacaagcttttcaaataaatcaaacatattccgagaaaacatgtaattcaaacattgatatgtgaatagtgtgctactatttaaaatgatggagataacaaaactaatagtaaggaagacagagtaataaccatgtcggaagcatcttgtcttgcttctcctttgctctacagaaagaagaactctcttgttacttatgtccaattcaatcccaaaaccaccaaagtgaaatgttttttttttttttggtgcagccaattctggaatccattctgattctttctacgcttcgcttattgatagtgccactcataaagctcagctgaagcaaatccacgcacgtttacttgttttaggtttgcagttcagtggtttcttgatcaccaagctcattcacgctagctcttcctttggtgacattacttttgcacgccaagtgttcgacgatttacctcgtcctcaaatattcccttggaatgctataatcaggggttattcaaggaacaatcacttccaagatgctcttctcatgtattccaatatgcaactcgctcgtgtttctcctgattctttcactttccctcatcttcttaaagcttgcagcggtttgtctcatcttcagatgggtagattcgttcatgctcaggtgttcaggcttggatttgatgcggatgtgtttgttcagaacggtctcattgccttgtatgcgaaatgtaggcgtttgggatctgcgagaactgtgtttgaaggactgccattgccagagaggacgatagtctcatggactgctatcgtttcagcttatgctcagaacggtgagcctatggaggctcttgagatttttagtcagatgaggaagatggatgtgaagcctgactgggtagctcttgtcagcgttctcaatgctttcacttgcttgcaggatttgaagcaagggagatctattcatgcttctgttgtgaagatgggtcttgaaatagagcctgacttactcatctctctcaacaccatgtatgcaaaatgtggccaagttgcaactgccaagattctgtttgataagatgaagtcacctaacctgattttgtggaacgccatgatctctggctatgcgaagaacggttatgccagggaagctattgatatgtttcatgagatgatcaataaagatgttagacccgacaccatctctataacatctgccatttcggcttgcgctcaagtaggttctcttgagcaggctcgcagtatgtatgaatatgtaggcagaagtgactacagggatgacgttttcataagcagcgcattaatcgatatgtttgctaaatgtggaagtgtagaaggcgcaaggttggtttttgaccgaacacttgacagggatgttgtggtgtggagtgctatgattgttgggtatggattgcacgggcgggcaagagaagcaatcagtctgtaccgtgcaatggagcgtggtggagtacatcccaatgacgtcacttttctggggcttctcatggcctgtaaccattcaggcatggtaagagaaggctgggtggtttttcaaccggatggcggatcacaaaataaatccacaacagcaacattatgcatgtgtcattgatcttctcgggcgtgctggtcatctggatcaagcttatgaagtgatcaaatgcatgccggtccagcccggtgtaacggtttggggagcactcctaagcgcttgcaagaagcatcgccacgttgaactgggagaatatgcagctcaacagcttttctcaatagacccatccaacacaggccactatgtacagctctctaatctgtatgctgcagcacgtttgtgggaccgtgttgcagaggtgcgagtgagaatgaaggagaaaggattgaacaaagacgttggatgtagctgggttgaagtaaggggaaggttggaggctttccgagtgggtgataagtcacatccgagatatgaagagatagagagacaagtagagtggatagagagtagattgaaggaaggtggatttgtggctaacaaggatgcttcattgcacgatctcaacgatgaagaagctgaagagactttgtgcagccacagcgagaggatcgcgattgcgtatgggcttataagtacaccccaaggcacaccactgcggatcacaaagaatctgagagcatgcgtaaactgtcatgctgctacaaagcttatctcgaagctagtggacagagagattgttgtgagagatacaaataggttccaccattttaaggatggagtttgttcctgtggtgattattggtaa

SEQ ID NO: 165468 - DNA, 2128 bp, Arabidopsis thaliana landsberg
  unsure (1)..(2128): unsure at all n locations
tccgcctattcacccccctctaggcgactttcaattggtatcagagccagtgcttcattagagcctaaccgctcgaagtgatgtcgggagaacacgccaagaaggagatggtgaccggcgagaagcccgccacaagccatgggaaagctccatcaagagagtcccgcaacaagaaggaggaatcacctcctcacaagtcgcatcggagtggcgaaaagaaaaagaagatgaagaaggtggtctactacgagaccgattcttcgtcgccatccacttccggctccgacgcgccgtccgtaacttctaagcgccatgagcgcaagaagtatagtaagattcccctatgttatcctcataattcanagcgcgctccattactttccgtaccctaggcaaaccaccatattttgatggtgaagattattgtatgtggagtgataaaatgaggcaccatctaacctcactccacgaaagcatttgggatattgttgagtttggagcgcaggtaccaaaggtggggggcaaggactacaattcgaacgaggccgcccaaatacaacactttaactcccaaacagcttctatactccccacctctttatgtcgagaggagtataataaggtgcaagggctaaagagtgccaaagaagtttgggacgtcctcaaagccgcgcatgaaggggacgaggtgaccaaaatccccaagcggaagacgatcgagggtgagctcggtcgattcgtcctcaacaaaagagaagagtcgcaagccatgtacaaccggctcaagacaatggtgaaccaagtgcgcaacctcgggagcaccaagtgggatgaccatgagatggtcaaggttattcttagatcacttgtttttcgtaatcccactcaagtgcaactaatccgtggagacccttgatataaacagatgtctcctgaggaagtgattggcaagtttatgagctttgaacttatgatcaaagactccaaacacattgtcaacttggagcaaggcgccacctctacacccgaggtgcaactcgtcgcattcaaagcgacagaagagaagaaggaggagtctacaccaagtagacttccaatcgacgcctccaagatcaacaacgaggaaatgacactcatcatcaagagttccgccaaatcctcaagcaaaggagagggaaggactacaagtcccgctccaagaaggtgtgctactagtgtggtaagtccaatcatttcatagcaaaatgtcctatatctagtgacagtgaccgaggcgacgacaagaagggagaagaaaggagaagaaaaggactacaagaagaagggcgcgatgcccatgtttgtcgggaatgggattccgacgaaagctcaagcgactcctccgacgacgaggacgccgccaacatcgccgtcaccaaggactcctcttccccaacgtcggccacaagtgcctcatggcaaaggacggcaaaaagaagaaggttaaaaccaactcctccactaaatatgaatcttctagtgatgataatgctagtgatgaggaggataatttgcgttccctttttgccaaccttaacatagctcaaaaagaaaaattaaatgaattagttagtgctattcatgaaaaggatgaccttttggactcccaagaggattgtctaattaaagaaaacaagaaacatgttaaggttaaaaaggcttatgctcttgagatagagaaatgtgaaaaattatctagtgagctaagcacttgccgtgagatgattgacaaccttagacatgaaaatgctagtttaaatgctaaggttgattcacatgtttgtaatgtttcaattcccaattctagagataataatgatgatttgcttgctaggattgaagaattgaacatttctcttactagcattagaatagaaaatgaaaaattaattgctaaggctaaagaactagatgtttgcaatgctaccatttccaaccttagagataaaaatgatattcttcatgctaagattgttgaacttagttcttgcaaaccctctacatctattgttgagcatgtatctatttgtactagatgtagagatgttgatgttaatgctattcatgatcatatggctttaattaaaca

SEQ ID NO: 165469 - DNA, 1415 bp, Arabidopsis thaliana landsberg
atggtcaaaccgcacttcctccggaaaattataatcttagagcatatatatgatgatgatttgccacgactctctcgatcacctagagagacaaatcgacgtactccacacatgacgcatgtgacagcttcacgtcagacgtgctcagaatacttcgatacgacgtactcatttgagaagagcaaattttgaggtacgaatggatggcaactttcaatgtatagaagaatctcgtagtgagattgatgactctcctacgtctgtaggttctagttctgctaatgctccggaaatgataaagttttttaataagccaagtgaaaaagatggggagaagtagtgattatttgtattaaaaaattttaaataagaattaagtttttctttcatgtatattttatatgttcattaaaatattttcatcaatgtctaatacaaatttacttgaaatatcaggaacgaattgtcgagttgcgttcacttggaatcgagaatcttgacgacgaagagattgcagagttcatgttactagaagaagaagcgaatatggaagaatgcatagctcgtatgttgcaatattacacaagatgattttacaaacaacctatgacatcatatgggggaagaggatggctaattgttcgagatcaaatttacagtaatgaagtttcatgtcagacacttatccgaatgagttcagaggcattcacacagttatgttaaatattacatgggaagtatggtttacaaagctcgacgaacataagcctcgacgagagtgttgcaatctttctaatcatttgtgcctcaaatgatacacaacgtgatattgcattaaggtttggacatgcccaagagacaatttggcgaaagtttcatgatgtgcttaaagcaatggaacgattggctgtagagtatatacgcccaagaaaagtcaaagaacttagagctatctctaatcgtttgccatttttaatggatttattggtgcacttgatggaacacatgtacctgttatggtgacaccaaggcgagaaggtcttcgatttataaactgaaagggaattgcaagcttcaatgttctaactatatgcgatcttgacatgcttttcacatattgttttgtcgggatggcaggatctacccatgatgcacgtgtccttgcggctgcgataagtgatgatccactatttcatgtacctccagatagtaagtattatcttgtagattctggatatgctaataaacgtggatatttagctccataacgaagagaacatagagaggcacaagatatcatctccaataattttttaacggtgaaccttttcgaaacagttaagaaatgtataataggtggcatgtgtcattacgttctgttattgaacgaacgttcgggttatggaaaaaaaaat

SEQ ID NO: 165470 - DNA, 2449 bp, Arabidopsis thaliana landsberg; identical to SEQ ID NO: 29571
  unsure (1)..(2449): unsure at all n locations

SEQ ID NO: 165471 - DNA, 1362 bp, Arabidopsis thaliana landsberg
acttaaaggcgatgacctacaaaggggcagggcgattcacctcaaggaaaaagttaagcccaaggtatgttggcccgtacaaggtgatcgaacgagtaggggcggtgcatacaaacttgaccttcctccaaaactaaatgcgtttcacaacgtcttccatgtgtcacaattacggaagtgtctaagtgatcaagaagaaagcgtggaagatgtacctcccgggttaaaggagaacatgacggtggaagcatggccggtacggatcatggaccaaatgacgaaagggactcggggaaaatcaagggatttgttaaaagtcttgtggaattgtggaggccgtgaagaatacatttgggaaaccgagaataagatgaaggccaattttccggagtggttcaaggagatgggtaaagatcaacttgatgcggattcgaggacgaatccaattcaagggggggagacttataacgcccgcgatcctcaataggatcgttgactaggacttggtccgagagaagaaggtggagtctcggacaagtgagaaggagctggccataagctcggacaaaggggaaatcatgcaggctaagctaggatcgtaaagaaatcacttgggtcagctcgcccaaagctcaagctcagccggaaggagtgacggttactcaggtcgagtgacagtccagctcgggcagctggacgagtgacgattgagctcgaggtagctggacgagtgacggacgagctcgaggtagctggacgagtgacggacgagctcgaggtaactggacgagtgacggactagctgagcggttatgggcgaagagatacaactcttcggaaaggtgcaactcttcggaagggcgcaactcttcggaaaggtgcaactcttcggaaaggtgcaaggaacggatgtgttgattcgggaagcatccattcgccccctatataagggagggcgcccaggaccattccactcaccacaacacaccgaaaacacaagaaactcaccattaaaactctctctctctcgggagaataaatagtcttatgattcggtagccgggctgtggccggcaataaagaaggagggtcgggatcgacctaaccttgagaaggaaggtaagggatcctacactttgagtctaagggttctaggatgtgagttagtagtcggatccttgaaaggatcaactagagggctgggtagtatccgggtcatgtgcatcctacacaagactcggtccgggtagggatcggctgaggcggggacgcggctcggcggaggaccggcgggtcttaactgcacctgccgagaatcggccggactgatgcgcgatcttcccgctctactgaattctctcc

SEQ ID NO: 165472 - DNA, 900 bp, Arabidopsis thaliana landsberg
aataaggatttattgtttttctcttcacctcaacctcaaaatccatatgataactcttctcttgtagccaccccatataagcgttttccgaaatatttgccaaccagaatctgtacaacgctcggtggattggtcttccttcagaaatggctaagaaaaaaaacgcgggtgatttgtaaccctgtcagtggagattatataaccttacccaaagtgaaagccactggtgttggagaaagctattttggctttgatccgatcaccaaacagttcaaagtgttgtgtatgacgtggtcacgttatggaacacccaatactcaccaggttttgacattggagactggaaaacgtttatggaggacgatccaagatccaatacttccccattatcgtagttttgatagaatatgcataaatggtgctttgtactacggagcttattttgaagaatctcaatcttctaagatagtttgcttcgactttaggtttgagaaattcagctttattaacatagctgatgaaggcatgttccgtgggagttataaatggactttgttcaactacaaaggtaaattaggtgcacatcaatattcaagaaacggcgaacttgtattgtgggttcttgaagatgctgaaaaacataaatggtccaaaagtatatgcatattgccacctatagtccacaacaacaggattgttggagtgacgggtacgggagagattgtgttttcaccttacgcgtgctatctgcccagcccttactatattttcttctacaatatccagacgaagacttgtacaagagtgcatgttaagggatttgaagagtttaagcataattttactctccttcacacttttctagactttgttgaggatacgaagtttatgtaagtgatc

SEQ ID NO: 165473 - DNA, 1736 bp, Arabidopsis thaliana landsberg
ggagcacttgctgagaactagaaacctatgatggctccatgtccacaacagcagaagcactctgttcttacttctctctgttttgcatctttgaaaatttcgctttcctggaaagatgaaatataacagtcttgtcttttgaaacacatctctatctacgtgtatgttaccaaaggttatttttctctctttaaatcaatgaatatatttggtaaagaaaaatgtattggtgagtagaggaagagcaagtgtcccactttacacccttatttctcattcaatacaactccttttttgacgtatgagtatactattttgtagtactctttaccagatttccaattcactaatgacccgacaattccattcagccgtttggccggaatttggccggaaagtcaccggaaaattttatgtcaaaaaagttccaacaataagctgtggagacggctaaggatccaggaaaggaatgtcaacaatgtgatggtgtgagttcagtcaaggcagatcttccgaaattcttgaactcatgttaaatgcttattccaataaacagtgagcacaaacaacctcgtctaaactcaattcgtctctccatctctttccatagagtcttagctcgactcagatctccagcttaaaccaatccttttatcaatatattgtatgtaactacattaggctcagaacctagctttttcatagaagacatcatctttatagcgccttggatattgttcagcttgcataacccattgatatacacattataggtataaacatcaggaggtcacagataaccttagttttcttcacagtcaagtcagcatatcttataataccactatgaaggtttaattttatgcaaattggaagaagttaagaggatcgtggtttggaatatccgtagttggggcaaacaaggtggattgatctcagagacggacatgacaagtgcagttatagttatgctgttgaggattttagattatttctacaatacacccgaaacacagttttttggtatgaaatctatgatgttaactcgggtgattggacaactcttgatgtcattccacgttggcgtatatattgatcttcccctagcgtttctcttaagggaaatagttattggtgtgctaataaaaggagctccgaatgtaacaagaatcacataatctattttgattttacaagagagagatttgggccgcttctgcctataccaatttacgttgaagctaatggctatactaatataagggactctatctagtgttagagaagagaaacttgcggtgttatatcagcgatgggatataacgtggacggggatatggattagtaataagattgagcctaatgcagtgtcgtggagcaagctatttttccaatgggtaggataagaccactcgaggctgcatctggtactttcttcgttgacgaagagaacaaactcgtggtgctttttgataaaggcgagagtatacttaaccccactcgtaacacagcttacatcgttggagaagatggatacatcaaaccagtggatctcggtgagtctgtacacaaatattgctttccacttgcgtgctcttatgttccaagttctgtgcaaatctagcaacctgcaccacgaggaagagtttctgtgttttgtcatgtcgtatcaattgatgttgtctttttaaagagttgtggcttttccatgtagtagccgcatgaactttttttat

SEQ ID NO: 165474 - DNA, 1282 bp, Arabidopsis thaliana landsberg
atggcgagccagacgggtcagaaaattcggttggtgaggtgtcccaagtgcttgaagattctacaggaagacgaagatgttcctgtttatcagtgcggtggttgttccgccattcttcaaggtaactttctttccatttcgattttgcctctgattataatgtgaactctgtccctgaatctggctttgttctactcctggttgtccatctgtttggatgtctgagctcaaaccagttgtgttttgtggcatgatctctttcattattaaatttggttgttgcttctttgattcagcgaaaaggcggaacattgctccaagcagtacaccaagtgcaggagagacagagagggctcaagccaatgagccgcaaagcgtacctgaaaccaacaatgtgtccagcagctcggggcaggacacggttctgccgtcatctccaggtcgttccgtggaccaagagtatgagaaaggtaggaatgcatccatggagtctacggagaaggagcttgatgacttagagttatctaatggagatgggacaaatgaaattcaagagcaggaatgttcacttggtgattctgagaagaatgaaagagaagacaactccagattggagtctcatatgatgaacaccgtagcagaagctgcaggatctggatctagctctggaagcttgagcgttgatcatgtggtggctgcaagagcgagtaatccatccggtaactctgagatttcaccggatgcttcccccgtagaagagaagcaaagccaacttgacattcttgcaaacaagactccttctgcttatgatgtggtggctgcaagagcgagtaattcatctggcaatgctgagatctcacctgatgcttcccctgttgaagagaagcaaagccaacttgattatcctgcaaacaagacttcttctgcttatgatgggagtgagtcttcctctgacgaaagggaaggccaacttctcgatgatgacgaacaatggaatgctcttcagaaaataagatcaggcaaatttgagatgcatagataccctgggtataaggagcaaggcgctagttcctcctcccctttctctgagaataggcgcaatgggattaccacatacaacgagcggcatcagaacaggtctctacagctagagggaccaggagggcgccttggcagacaagggaggagacatgtgacagaacaacttcggcctgacatgcctttctatccgagagaatcatacacacgtggaagcccttccatccgtcacatgatgagtttg

SEQ ID NO: 165475 - DNA, 1979 bp, Arabidopsis thaliana landsberg
caacctttaagaagaaagaattttaaactaaattcacttcttcaaccacaaatggagaaaaaaggtcaataataaacaaatgaattataaaaccccactaggcttctctcagacaaaacacacacacactagtttcctccattgacactatcccactaccttcaaaaatcccaccttttctgttcaatcaaatctctctctcttgatctctcttgaccaatcgagagcaaaaaaaaaaaaaacgtttttgttcaaacatgaagatgaaagattaattgcacatagagactacttttgattactaccgttctcttccaccaaactcgtttctgtctttaattttcttatttttgtttgtgaacattaaagtctcacaaaaaaaaaatcattcctttgcttatttctcactgttcctttgcttcttcttcttcttgcggttgaagtcatttcttcttcttctgccacttcgattgctttaaacttggagattaagattacacatcaaataattcttctttgtcttcctcgtgatcatcgaggaagcttgatctcttctatggaatggagaatttgactctcctccttaggatctgtcttgtttcgtcggttttagttgctgcttcttcctcaggtatgtttatacaattatttgttttcactttttcaataattgggattagattagacccatatggatcaatttggtaaatttgcattcttttttgtgcattatgtttgctaaattctcaactttgtttttgttttaataaactctgctagtgatgaaaaaaggaaactttattattgcaaacacaatgcgattttacaatgtgatttttttttttatgctttcgtgtaaactaaaattttgttataaatggtttaaaactcaggatcggaattgttatctccgttatcatcaccaccgtctccattacccgaaacttcaaaagggtttggtcaagcaccgagtaattcacctgaatctcacaaatccgacaatgtgccaccgtctaaagcttcttctcaaccgtctcttcctcctttagctgatttggcagctccaccaccgtcagattccgtcggaggtaaagcaccggccggtgtgcctgttgtctttgttcctaatgctccaggtatgtaacttggattggattgaaatgttgattctcttcacagacaattgatcgaacacttggcagtcattttgaaccactagaattgtgtactgaattttcgatttttattgggttttgattcgttcttcagctccagctacaatacccgttaaggatttgcccgtacgttcgcctccggttcttcaacccattacaccgattgcttcaccacctcgattcattccaggagatgcaccaaaggagcctcctttctcaggtagagttactccaggtatgtgtatatactaccaattgaaattttgaaactttagcataaatcttgagtctttaacttgcaatgtcgtctaatccgcagccctggtttcgtcacctgtttcggatattcctccaattcgatctgtggctctgcctccgcttacagcgagcaatgtacttcttagaaatgcttctaacaatcgcaagcctccacgtatggaaaagtcaattgctcgtggtatagtaccatgttcagctcacctcttacttcaatcatatgtggtatataaatggcacagactcatttgtggtttttgaatcagatgcatcaccgcccacaatatgtataggcattgctccaccagtagttccacgtcatacataagtttacaccctcgagctcccatgggagctggctgttggatgacattagtcacagtgtcttgaaaatgtgtctctttatcctgtgatatctctctatagccatgcagagcatactttgactgcaactaagggatctcagaccaagaaatccgccaacgacccacccagttgtccccatagaatatctggctgtctcaacag

SEQ ID NO: 165476 - DNA, 5330 bp, Arabidopsis thaliana landsberg
gatgatgccttgcaccgtgcaaatcgatacatcgaaatcaaagaagagaaggccgcaatggtggaacgccaacctaagacatccaccccaaaagagaaagctcgcgacaaacactatgaaccgcaccagcactatgatcgtgactacgctaaaaacgataagggaaagaagggctcggcattcgccatcaacaatcgagaccaacaacaaccgcacaaaccttggaacaactactaccgcgactctgacgcgaaacgttcttattgtgaatttcacaaattcgccggtcattccaccgacgactgccggcaacttcaacttcttctactttctaagtttaagaacggcagcattgaagtcgaacacgatcgacactgcctgaattctcacagagacaacgctgacggaggtgatctcaacgatcaacacaaacgcgatgatcgagaacgtctacaagagcccgcccgcatcgagcaagttcaggaagatgaacaacttccaggccctcccaagcgaacgcgcaatgatgaagcacctgttccccgatgaacgattcacatgataatgggcggtctgacgtcttgtcgagattctgtccgttccattagaaattatcgtcgcaggcggaagtacaacgcggcttgatcgccagtagcacacctgcggttgacaatactaaaccaatcaccttcacagaggctgatgcagctggcctaacaggaccgcataatgatccactcgtcgtcgaactcataatcgatgaaagcaatgtcaccaaggttttgattgacattgacagctctgtaaatgtcatctttaaagatgtcctcatacagatggaggtcgatctgcgtgcaaccgaacacaatgttcagccgttgactggatttgatggagacacggtgatgacagtcggtacgatcctgctcccggtttacgttggaggcacaatgcattgttttaactttgtcgtcgtcgataagcctatcgtttacaatgtcattctgggcacaccatggctacataaaatgaaggctgtcgcatcaacttaccatcaatgcctaaaaattcacgaccacacgtggaatctacactttgcgtggcgatcctttaaccgcgcgcacatgtttcatcgttgaaaagcagcttcgcaacgcaagagcttttgttgttaccggacccacctagccacgagatgctagactggctccacgcaccgaatccgtcattcaggtcaatattgacacgactgatcccactcgttgtgtcggtgttggcgtggacctcccactttccctcaaagaggaactagtcaagttcctttgtgataatgcagcaatgttcgcatggacgatcgatgatatgcctggaattgatcctgacgtcacttgccacgagcttaacgtcgacccaactttcaaaccgattaaacagaaatgaagaaagcttgatcacgaccgtacaaccgcgataaatgaggaagtagcaaagttacttaacgctggttctattgtcgaagttcgatatcccgattggctgagcattcccgttgtcatagaaaagaagaacggcaagtggcgagtctgcgttgattttactgatctcaacaaagcttgtccaaaagatagttttcccctcccacgcatagatagtcttgtggaatcaaccgccggaaatgagttgttgtcctttatggatgtcttctcgggatataaccaaatcatgatgaatccggaagatcaagagaaaacgtcatttatcacgaataggggcatctattgttacaaagttatgccattcgggttgaaaaacgcaggagcaacttatcaacggctggtcaacaagatgttcaacgaaaatctcggaaaaacaatggaagtctacatcgatgatatgctagtcaaatcattaaaaaaggaagaccacgtaaaacatctggaagagtgtttcgcgattcttaaccaatatcatatgaagttgaatccggcgaagtgcacgtttggagtcccatccggggaatttctcggctacattgtcacgaaaagaggaattgaggcaaactcaaatcaaatcagcgcttttctcaacatgccatctccgaagaatttcaaggaagtacaacgactaaccggtcggattgcaacattgaatcgttttatttcgaggttgaccgataaatctttacccttctatcaaatcttaaagggtaacaaggaatttctttgggatgagaagtgtgtggaatcgttcggacagctaaaggcgtatctaacttctccacctgtattgtccaaaccggaggtagacgaaaaactctatctatatgtctcagtttcgaaccatgcggttagcggagtcttaatccgagaagaccggggagaaaaaaaaccaatttactacataagtaaatccatgacggatcttgagaccaggtatacgatgatggagaagcttgcacttgcagtagtaacctcagctaggaaactttgtccatattttcaatcccatccaatcaaagtgttatcaaatcagccacttcggactattctccatagcccgaaccagtccggtagattagcgaaatgggcggtggagttaagtgaatatgatatagagtacaagaatcgagtcgccatgaaagctcaagtcctagccgattttttaatagaattaccgatacccggagggcaggaccagccgcaaaatcagacttggaagctgcatgttgatggatcgtcatcaaaaaatggatccggggtgggaatcaagttagaatctcccacttcggaaatccttgagtagtcatttcgattgttattcaccgcatctaataatgaagcagagtacgaagcattaattgctggacttaggttggcacaaggagttagggccgatgaagtggtcgcctactgtgattcccaactagttgttaaccagtttaatggtgattatgaagcaaaagactcacgaatggaggcatatcttgaggtggtcaaagacttggctagaaactttaggaaattcgaactcattcgcataccacagggagaaaacaataccgcagatgcactcgcagtcctgacatcaacatccgatcatgaagtcaaaagaatcattccagtagagtgtatttcggaaaggagtattatggacaaaaaggagacattcgtcatcccaagatccctagctgcagccagagatcacggcgaacctactattgaattaccacctgtcaaaaggcgaaagtcaaaagaaacaactgtacctaagtctactgtgcaggaagatattgggatcagactaattgaagaaatcactcctggccctacaatcgaagctgaaaccgaaccgtgggttgacgaggatgtactagcaccaaatgaacatcccgaaccagaagctcgagtgtttcacgaaattaaccaaattccggctaaagattggggggctgattggagggggccaataaagcattacatcgttacatgcaagctcccaaagaacaaatggcaagctaggaaaatgagattcgttagcgcgaaattttgtctatcaaagaattctttgtatagacgaggtgtaagtcgagattgttttgagcgaagtacatgaaggcttgtgtggaagtcattcctcggaaagggctatggctttcaagatcaagagaatgggttactactggcctactatgatcacggactgcgttaagtatgctcaacgatgcaaacgttgccaactctatgcaccactcattcactaaccttcggagttattctcttcgatctccgccccgtaccctttcatgagatggtcaatggatatcattggaccattgcataggtcgacccgaggcgtacaatatctactggttctaactgattatttttcgaagtggattgaagttgaagcgtatgtgaatattaaagattcggcagtaaagactttcatttggaagaacatcatttgcaggcatggcgttccatacgaaatagttactgacaatggaccgcaatttatttcgcacgagtttgaagcattttgctcagactgggggattaaagttagttattacactatgcggtatccacaagggaacggtcaggccgaagctgcaaataagacaattctaagcaatcttaagaaatgtttaagtcatttaaaggggggatggtatgatgaacttcagctagtcttatgcgcatatcgcacaactcctaggcgctcgaccggtgaaaccccgttttcattggtttacgggatggaggcagttgtaccagccgagctcaatgtgccaggacttcgtcgaacggaagctcctttgaatgaaaaagagaattctgcaatgctcgacgattcgctggataccatcaacgagaggcgagatcaagccttaatccgaattcagaattatcaacatgcagcagctcggtattacaattcgaaagtcaaaagcagacctttctttgtgggcgattatgttttaaaacgtgtgttcgataacaagaaagaagaaggagcaggcaaacttggaaatcctcctcgtcttacagaatacctcgacaccttgattggcgatgtcaagaatgggcatcatacaatccgggatgcgggcaaattctgcgattctgagtttgatccaatctccggggtgagagttgagggtgtgtaactcccttgatatcacattgactgtaatgcccctgaccttgactatacggccggacgtgcagtctatcgagtaaaatgcgagatcaagccaagaaaaggcaagatcagtttggccatttgatgtggcaagtcatgggtaaggagcattgcaatggatcaagtctacgggtaaaggaatgactctccatcagacggactaagcttagctacgatgcgactatcggtaaacctcgaaaccattaagctagcccttagacctaggatagcttaagaaaaccttagttttaggaaaccttagaaggactaggaaaccttagaaggactaggagaccataggggaatccatttgggcagtgggatatgagtatgggtcgtgaatggtcaaggtattgatcgaagaatgcagataagtgacgataacgagcttacttggttaattctggcatggaacgtgttatagacctaaggaagccttgatttatgtcatggaccctcatgagacattggagatggagtgagccctatcaatgctcttgcggtccagtgacagatcgtgggtttcgccggaataaagaaacggacggccaggattgaactgtggctcatgtttatccgttaaggctcaagcttatccataattctggtcatccttatcctttagg

SEQ ID NO: 165477 - DNA, 890 bp, Arabidopsis thaliana landsberg
tttggaattgaaggtaccaatggagttggtggatggaaaggccagggtaactatcgggtcctctcatggctgggtagctactttgaaagacgatggaatagtgcgtctccaagacgatctaaacctggttgcatctgatacagatccgaaacgcattcccctgcctcctcttgtgactctgcctcattgccaaaccaaagttgtcaccaacgtcgccatgtcttcttcttctcctgaggatgaagactgtgttgtcgctctcaagttcttaggacctcagctcagcttatgtagaccagctcaaagaaactgagtggaccaacatcagaatcgaaaacccatgtttctactcatcccctgttatgttttccaagaaagacggcacgtttcgaattcttggatctggaggtcacctcattggatcatgggatctccacaaacacaagaacaaacccaagattcagaggttgcgattcaaaaaccttcccgagctcaccaagaccaaaagggagctcttgcattcgtgttgcacgagcgaacacttggtagagtcaagaaccacaaatgagactttcttggttaagtggtataggaaggacacatccaatggcgtggtgaaaatgaaaacaagagctgtaatggtcttcaagctatacgaagaagggaaagctgtttacactcaagacatcggagatctctgcattttcctgtcaaagtctgaacccttttgtgtcactgctagctcctttcccggcatgtgccctaacgaagtccacaccttggatgttgacgaacacgcacttgtcgatctgtctgattcctccatcattagtgggatttgtacattcgggtccccttactattttccacctccaaaaattgactcttag

SEQ ID NO: 165478 - DNA, 786 bp, Arabidopsis thaliana landsberg
tcaccaccgttaacatctacgccgtcccaatttctttaggttttaggacttctccctcagatagtatccttttgggtggagcttctaccagagatttagaagttttatgtccggttaaacaattgatgtttaagattctacacaagttttgtgggtttggatttcttctagatcgtgacctttcattttctcgggttgttatggagtttcagttggataaagttttacaagagatgttgcttgaggaagaggaagatgatattcctgtagttatatttggatatgccagcgtttagttcatcaatttgatataagcggagtgtgttgggacgatttctgaatccagataaccaacgaatgtctaaatagattctagagatgcctcaaatctagcgcatgtacaatagagtcaggggtgtttctttgtcacgagatagctttcagttcatcttcaaaaacgaaaaagatcttatcgaggtgcttaagacatgggtatggacccaagatgattagggtgttgttatggacatgcagattgaagatcctccgccggactatctcaattttcttttttctcttgatacgacttcgcatatacccgttaatcagtatactaggcctacaatttcttcggttgctttgtatgttggtaaggtgattgatttcacctttaaccaacgtgaggcacaaattcaggactttgtgaggatacaaaaactatttgatgtttcgaagcggctaagaaattctagagatactcaagtgtggtgtgggtcaaaaaaaagt

SEQ ID NO: 165479 - DNA, 1475 bp, Arabidopsis thaliana landsberg; identical to SEQ ID NO: 9701
  unsure (1)..(1475): unsure at all n locations

SEQ ID NO: 165480 - DNA, 1181 bp, Arabidopsis thaliana landsberg; identical to SEQ ID NO: 863

SEQ ID NO: 165481 - DNA, 2514 bp, Arabidopsis thaliana landsberg
atggatattttcgtatttactatggtcagtgagtggagaagcaaagaagaagaatgaaaatttgaggaaggcatgtttggttgctgtgtacgtgttaaaaaaaacatgacgtacacggaatttgtacgtccactaagcgagactttcagtttgaagtccactgagatcaatcccataattagttgccgggaaagatgttagtgatgatagatagtaaacgccctcatgtctacattgatgaagaggaggagaacaacaaaaattgtgatggatatgatgattatcaaggtgacgatggatctatgggggaaaataccctcgatcctactatagacggtagtggcgaagattacgattacaacaagtggaacgatgtaattgtagaagaatatagaatagggaatgttgaggaggacgtcattctcactcaatagattgttcaacatccaggaaaattcagttttctattggcagagtgtacatacacaagtcagcgtgtacttggcggagataatatttctcactcgggtgaccgtacacaccccgtgactccaaacagtacgtgtcaacatggtttgtaccaacgtacgtacactacagaatgtgtagaagatacaaactgcgaaggtaacacggataccaatattaatggtatagaccaagccactggggatgatgttattgaccgtggtattggagcttccgcaagtgggacactgaatgataatcggctagttactgtagttgaggtttacgaagtgtataatgtattttcttcattacatggtggcgagtaagagattctcgataatgatgttgctccggtattcgatgatttagccaattttcgatccgatgagacacaagttaaactcagtacgacatgtgagactttgtatgtagggagtgtttttaaaaacagaaaagtcatacaacaaagaatgtcttatctcgcaatcaaacaatgcttttgctacaagcaacctaggtcatgtcctacaagattgaagatgatttgcgttgatgatacttgtccatgacatttgactgctcaagtcgtcaagaatttagaatgtttcaaaatcacatcgtatgaacgtcttagaatacatctcagccattgcaaatattggtttattattgtatgaataaatttttttaataatttaattcacaagcaaagatgtacgtatattattacacatgtacatactttaatttactaacaaaaatgtacgtacattattacacaaatacatacataacttttcaatatgatgaacaaatattatttcaccatatatttttatttaattattatgtatgtatggagattatggagatataagaatacgtaataaaatagcttaagtttagagtcaaattatttaaatgttaaattcgttgacggaggaggttagatagttattacaaatcgtaccatatacatcccactaaataattttgtgtacgtacactgtaaattgaatatacgtacacagaagaaatttaataaagtgtataattgtaattttccagtcatcttcaacctgtgtatccttttctgcaaacctaattttgcggccatctttagcagttttctcaaaatctcattttttatacgttttaattactatttatatataaatcttgtaaacttagaatatctttagtttaaaaagctaaattgtttgaatctctgagatttattttttcaatttttgttcatctctgaaaacaagaaatttcttcctcaattttggagtacaatggagaggtgtcgaaatatgaagaagtggataatgaagtttgatcttctttctacttctctctcaaatctctccatctctttctcttttccttcttcggtttcttcatttcagttttttttttttcaaaactgaactgcataatctaaaccgaaaccaactgctgtgcggtttggttgctcccattaacaatggcctggaccaaaaaccatcgaaaagacaaacggtgaaaaccatatctcactttatcaaactatgagagcaattcttttttcatccacttatgtgaaaatttcttttcttttatttaaagagacgtaattcattattatatagtcacaggctgatacttgaatcacttgcgcagagaatgcactcccgctcaatcgatataccatcctaaatctggatcatttctatttcctaaattttatccctccgcttgaacagagcttctattatggctaaagaaagaagaaacggtaaatctatatgcttcaattcatgacatcgtctagtttccttcccatgaccaagagcccacgcagttgtaccacaagagtatacttttgagtccttggttaccattgtgaatctatcccccgtggttacttgcatctgcaaaagtgaagcaacttgcatcataacaattcatgctcttcaaaacaatttctactgcaacacctaccaaaatcatctaactaaactgacaaatctaagcaaaaagtccaagtctttatcaaag

SEQ ID NO: 165482 - DNA, 1779 bp, Arabidopsis thaliana landsberg
  unsure (1)..(1779): unsure at all n locations
atggtgaattatggtagttgtagcgaacattatcctgttgataggttagtgggaccaaatccaaaaatagatacaaatgtaggtaccgttcagatggtgaatgatgcttttcgtgaaaatatacactcgtttgatgggaatagtgatagagtagaggaacctaatttagaagcacgaaagttttttaatatgttagatgcatcaaaacatcccttatataaaggatgtaaaaaggatcattcgtctttatctgctgcaaccaagttgatgggtatcaaagcggattataatttgtccgaggattgtgtgaatgcgattactgattttgtgaaagatttattatccgaagatatcttgcatcgggaacgtactacgaggtgcaaaaattggtagctggtcttggtttactgtatcaagtgatagatgtgtgcattgacaattgtatgttgttctggagagaagattcatatcgcttgacatataagttttaccgcaaacctnnnnnnnnnnnnnnnnnnnnnnnnnnnnnnnnnnatacaagcagatgtggtattaaccattatcagagaggttgtagaggttatatcaaattaagcgcacatccgggccaatgagatggcatgtagagcaaacaatagaaggaaaaattacgcatccctcagatggagaagcgtggaaacattttcaaacagtgcatcctagttttgcttccgagagaaaaaacgtatatcttggattatgtatagatggattcaatccctttgggaagcatggacgtcagtactcattgtgacctgttatcgtgacaccttataacttgcagccatcattatgcgtgaaacgagagtttatattcttgaccttcctcgttcctggcccacatcatccaagaagatcactcgacgtgtttctacaaccacttatatacgagttacaaatgttatgggagattggtgttgaagcgtttgatgtttcatcctaacagaatttgtcatgcgtacgacacttttgtggaccatcagcgacttccctgcatatggtatgttatctggatggacaacacatggaaggttatcgtgtccatattatcaagataacactcatgcattccaattgaagtacggacagaaaacttgttggtttgattgtcataggagatttttaccgagtaaccatccgtatcgtcaaagcaccactttgtttacgaagaacaaaaaagtggtttatgggtcacctccagagttagatgacacatatttgctaactcaattacgagattttggtgctgctacatcaattgaggttggtggtaatgggcatgatcttgttgacggctatgagttaatcacaattggcataagaagagaattttctgggaattgccatattggaaggatcttttgttgagacatcatctagatgttatgcacattgagaagaacatgcatgacaacatgatgaatacagtcttaaatgtgccaggtaagacgaaccataatttaaagtctagactagacttgcaagacatttgttcgaagaagaagcttcatattatggtaaatggaaaatgaacaattcctgcgttccggttagatgcaatctcaaaggaagaattcttcgattggataatgcatggtgttgatcatggggaagagaagcaaacgtggtgggaaaggtatggcggtgcaccatgcgggttcgacgagcttcttaagtcgtacacacgaattggtaagtaataaactcttatttgatttcatattttattttagtttaact

SEQ ID NO: 165483 - DNA, 364 bp, Arabidopsis thaliana landsberg
ggtcggcgtatggcccttccgaacgattacccggggcatgcgggctccctggcccacgccctggaaataaccggcgagcggtggacgctgctgatcgtccgcgacgccttctggggagtgtgccggttcgcggactttatcgaccatctgcggatgtcgcgggcggtgctcaccagcaggcttaagtccctggtcgcggccggggtgatgacgcgggtcgccggcgagcgccatctcgagtatgagctgaccgacaaaggcaaggccctgtggccagttgtcctgtccctgatgagctggggagacgacttctacgctccgggtggcccacgacgcctgttcggcacgccgccgacgcgttgag

SEQ ID NO: 165484 - DNA, 424 bp, Arabidopsis thaliana landsberg
  unsure (1)..(424): unsure at all n locations
atggatgcggaattagaacctgtagctcttacacctcagaaacaagacaatgcatggaagcattgtgaaatttacaaatatggtgatagacttcagatgcgttgtctctactgtcggaaaatgttcaaaggtggtggtataactagggttaaggaacatcttgctggtaaaaagggnnnnnnnnnnnnnnnnnnnnnnnnnnnnnnnnnnnnnaggctctttttgcagcagtgtattgatggaactgtgagacgtcagaggaagagacataaatctagttcagagcctttgtctgttgcttctttacctcctattgaaggagatatgatggtcgttcaacctgatgtaaatgacgggtttaagacgcaaggtagttcggatgtcgttgtgcaaaacgagagcttgttagggcagacaaagcaag

SEQ ID NO: 165485 - DNA, 1593 bp, Arabidopsis thaliana landsberg
agagaagaaaaaagtctgaagctgaagtatctaaaaaactgaaaaatgtgtttgagattagttatgaagacgaagatgatgatgatgaagaagatgacgatgagtataatggagctgatgatgttgatgatgatgaggacaatggaaagttatcgaaaccaaagaagagaaggcaatactcaaaagtctggaacgatttcatagtgattaaaaaggtttatcatttgggaaaaagtgaagaaagagctatgtgcaagcattgcaaatcagattatgcgtacaatgcacacaaaaatggtacgaatacatatcgacgtcatttgcaaatatgtaagctcgtgcctagaaatggtgatattagacagatgatggtgaatgcagaagcaaaattgcaagctagaaagatagatcaatctgatttctgggaattggtagctaagacaattatccagcatgatcttccattttcttatgtggagtatgagagagttagagaaacgtggaagtatttaaatgcggatgtcaagttttttagtcggaacacagttgctgcagatgtttataagttttatgagactgagacggataagctgaagagagagttagctcaacttcctggaaggattagtttaactatagattagtttaactcatgaatgttatatgtgtcttacagcacattaaattgacagaaattgaaggactggggaattgagaagaaagttttctccattacggtagacaacgcgggtaacaatgacacaatgcaagaaattgtaaaatctcagcttgtactccgagatgatttgttgtgtaaaggagattttttccatgttagatgtgcagctcacattctcaacatcattgttcaaattgggctgaaagggattggtgatacattagaaaagattagagagagtatcaagtacgttaaaggatcagaacatcgtgagatcttatttgtaaagtgtgtggaaaacgttggtattgatctgaaagctgatttgttgttggatgtggcaactaggtggaattcaacattcaagatgcttgatagggctctgaagtatcgagctgcatttggtaatctcaaagtcattgatgccaaaaactacaaatttcatcctacagatgctgaatgacatcgactacagcaaatgagtgactttttagagtcgtttgatcaaataaccaatcttatatcaggttcgacatatccaacttcgaatttgtattttatgcaagtttggaagatccaaaactggttaacagtgaatgagtccagccaagatgaagttatcagaaacatgattgtcctaatgaaagagagtttgataagtattgggcagaagtaagtgatatctttgcaatcgctacggtattagatccaagggtgaagcttacacttgcagattattgttttgcagaactagatatcagtattcgtgagaaaagaatgaaacatttgcgtgctcaactacgtaaactttttgaagtttatgagaacaagtccaatgcggtatcacctacaactgagtctcgtgaagatgttacacatgatgatgaaactgcaaaggggaattttagcaatta

SEQ ID NO: 165486 - DNA, 463 bp, Arabidopsis thaliana landsberg
agaaaatccgggtttacgtttttttggggggaaattacgggtttacgtttttggcgggaaaatcacgggtttacgtttttttgccagaaaaattacgggtttacgtttttggcgggaaaattacaggtttacgtttttggcgggaaaattacgggtttatgttttggtgggaaaatcacgggtttacgtttttttggcggaaaattacgggtttacgtttttggcggaaaaaacacgggtttacgttttttgcgggaaaattacgggtttacgttttttgcgggaaaatcacgggtttatatttttttggcggaaaaattacgggtttacatttttggtgggaaaatcacgggttttcgtttttggagagaaaattacggttttatgttttttggtggaaaaattacgagtttacttcttctcaatttcatcgcttgtatatttaagaaatttggaaaaatat

SEQ ID NO: 165487 - DNA, 412 bp, Arabidopsis thaliana landsberg
gatccaattatacatcattacacgaaacgtataaattcaaaaccgaaaccctcaaaaatcatctttcattgcccagaagttttcatcacaatcgctgaatcgtggattaatggcgccgaaggcagagaagaaaccggcggagaaagcaccagcaccaaaggcggagaagaagatcgcgaaagatggaggaacgagcgagattgtcaagaagaagaagaagacgaagaagaaccagagacgtacaagatctacattttcaaggtattgaaacaggttcatccagatattggaatctctggtaaagcgatgggaatcatgaacagtttcatcaacgacattttcgagaaactcgctcaggaatcgtctcgtctcgctcgttacaataagaaccgacgatcacgtctcgtgaaat

SEQ ID NO: 165488 - DNA, 3001 bp, Arabidopsis thaliana landsberg
acagacgacatgaccggcataggagagatgttccttgcagcttttttacaagctctcttccagacgctggtgtctgaacctttcaggagcttcttcaagaggcgagaactgaatgagaatttcctcgagaggctcagcactgcgttgttgacaataactgctgttctgatagatgcagaggagaagcagattacaaatccggtggtggaaaaatgggttaacgagctgagagatgttgtttaccatgctgaagatgctcttgatgatattgctacagaatctctgcgtctcaacataggagctgaatcttcttcctccaacaggctgagacagcttcgtggcagaatgtccctgggagattttcttgatgggaacagtgaacatttggagacccggcttgagaaggtcacaattaggctcgagcgttttaccctacaaagaaatatcctgggtttgaaagagcttactgcaatgatacccaaacaaaggttgccaacaacatctcttgtggatgaatctgaagtgtttggtagagacgatgataaagatgagataatgagattcttgattccagagaatgggaaagacaacggtattaccgttgtagctattgttggaattggaggggttggaaaaaccacactttcacaactcctttacaatgatcaacatgttcggagttattttggaacaaaagtctgggctcatgtctcagaggagtttgacgtttttaagatcaccaaaaaggtttatgaatctgttacttcccggccttgtgaattcactgacctggatgtacttcaagtcaaattgaaggagagattaacaggaacaggcttaccgtttctgcttgttctagatgatctgtggaatgaaaattttgcggattgggatcttctacgccaaccttttatacatgctgctcaagggagccagattcttgtgacaacacgaagccaacgtgttgcatccataatgtgtgccgtccatgtacacaaccttcagccattatctgatggagattgctggtcgttgtttatgaaaactgtatttggtaatcaagaaccgtgcctaaatcgagaaattggagatcttgctgaaaggatagtgcacaaatgccgcggtctgcctttggctgtgaaaacacttggtggcgttctacggtttgaaggaaaagtcatagaatgggagagagttctaagcagccggatttgggatcttccagctgataagagcaatctacttccagttttacgtgtaagctattactaccttccagctcacttgaaacgatgttttgcctattgctcgatatttcccaaagggcatgcatttgagaaggacaaggtagttcttttgtggatggcagaaggtttcttgcaacagacgagaagcagtaagaatctagaagagctcgggaatgagtacttttctgaattagaatcaaggtcacttcttcaaaagaccaaaacaagatatataatgcatgattttatcaatgagctggctcagtttgcttcaggagagttcagctcgaagtttgaagatggatgcaaacttcaggtttcagaaaggaccagatatttatcgtacctacgagataattatgcagagcctatggagtttgaggctctacgtgaggtcaagtttctcagaacttttctaccactcagcctcacaaattcttctcggtcatgctgcttagatcaaatggtcagtgagaagttacttccaacgctcacccgcttgcgtgttttgtctttatcacattacaagatcgcgaggctgccgccagattttttcaagaacattagccatgctcggtttttggatctctctcgcactgaactcgagaaacttccgaaatccctttgttatatgtacaacctccagacacttcttctctcctactgttcaagtctgaaggagctgcctacagatattagcaacctcatcaatttgcggtatcttgatctgattgggacgaagctaagacaaatgccgcggagatttggtagattgaagagtctccagactcttacaacatttttcgtgagtgctagtgacgggtcaaggatttctgaacttggagggcttcatgaccttcatggaaaacttaaaatagttgagctacaacgagttgtggatgttgctgatgctgcagaagcaaatttaaacagcaagaaacatctgagggagatagattttgtctggagaactggatctagtagctcagagaacaacacaaatcctcacaggacgcaaaacgaagctgaagtgtttgagaagttacgcccacatcgtcatattgagaaacttgccattgagagatacaaaggaagaaggtttccagattggttgagtgatccttcgttctctagaattgtgtgtatacgcctcagagaatgtcaatactgtacctccttgccatctcttggtcaactaccatgtctcaaagaacttcacatttcaggaatggtcgggcttcaaagcataggtcgcaagttctacttcagcgatcaacaactgcgtgatcaagaccaacagccgtttagatcacttgaaacactgcgatttgataacctgccagattggcaagagtggttagacgtaagggtcacaagaggagacttgttcccttctctcaagaaacttttcatactgagatgtccagagctaaccgggactctacctacctttcttccttctctgatctcacttcacatctataaatgtggcctcttagatttccagccagatcaccacgaatacagttacaggaaccttcaaacgctaagcataaaaagcagctgtgacactctcgttaagtttccctttaaaccatttcgccaatctcgacaagcttgaagtcgatcagtgcacatccttgtactctcttgagctctcaaatcagcatttgcgtggtccgaatgccctaaggaacctgaaaatcaatgactgtcagaacctgcagcttcttccgaaactaaacgctgtgcct

SEQ ID NO: 165489 - DNA, 439 bp, Arabidopsis thaliana landsberg
ggatttcgagtgtccgtattgcaagcaggcgttcccgatcctcagaaacctcctggccgggaaggaagcctccatccgcctggtctaccggcactttcaggccccgcaggcgcatccgcacgccgaaatggccgccgaggcggctgaagccgccgctgcccagggcaggttctgggagttccacgacctcgtcttcagccggacaggcgagctcgatgggaaactcctggccggcatcgcacaaggtctcggactggacctgccccggttccatggcgatctcgagacgcatgcccaccaggcgcgcgtcctgcaggacctgcaagccggtcgcgcccgcggtgtccgcggcacgcccggtttctacctcaatggcaagttcgtcgacacttcgtacggattgcatcacctgcgcgaaacggtacgggaggcgctgggt

SEQ ID NO: 165490 - DNA, 2340 bp, Arabidopsis thaliana landsberg
atggagaaatcacaacagtacgttacaatacaacagccattgaatctggatgttgagcattatggctactgcaaggtgtcaatcgtacaggctatccaaagggctgaaatggatgcgtggttcgcagtggaagaaggatggaaagctccgatggtcatggatgccaaggggttagaaataccaaaatctaagaaggattggactactgaagagaagacagctgctaagaacaactcaacggccttgtcaatcatcttcagatcattgccaatgagtcaattcacgcgtgtgcaagggtgcacatcagcaaaggaagcatgggacattctggaaacaacctttgagagaaccagtaatgtgaagaggaccagattggatattttagcgtctgaatttgaaaacttgacaatggagaatgaagagtcgattgaggagttcagcagtcggctgagttcaatttcccaggaagctgtcgtcttgggaaaaaggtacaaggacaagaagttggtcaagaagtttctcagaagtctgcctgataggtttcaatatcacaagtcagcaatcgatgtgccacttgattctgatactctaaagtttgatcaagttgtgggaatgatgcaagcatatgaattgcaaatgaagaagaaggaacgttcatcaggaaagagtctggctctcaaggctgctgaagttccaccaattgtgagtgaggatcaggtggggttgatagttaagagattcttcaggaaaatggaacgaggacaacgcagaggtaatcgatcagacagacgacctgatatgagcagagattcgaagaattcagagaaacagtgtgctgaatgtgaaggatttggtcactacaagtctgagtgtcctacgctgaagaaaaagggaataaggtgctatgggtgcaaaggatatgggcataccaaggctgagtgtgtgggtaatgaagaagtaaaacagaagtcatacatcacttggagtgaaagtgattcggatgacagtgaaggaggagaaggagagattctcaacagtctggtagctcagtttggtgtgattgagaatggcaatgaagaaatagctgagaatggtacattggagaatgtcaaccaggagtctgaatctgagtcagacactgatgaacaagatctatcattcgagaagttcagaattctgattgaagacttggtccaaaagaaaaaggacaacgaagtacttagtgttgagaaagaatcactggcagtgcaagtagcaaagcttgaaaaagaactctcttaggaaagaaccaagtctgaaggtttggaaaaacagctagcagaacaactaaggaacatcaagatgttgaataacggaaccaaggatttggataaacttttaaccatgggcagaacatctaatgttacgtggggtcttggatacaatgaaggaaatacaaaaggtgagactcagtttatcaaaggagccacttcaaaagataagtctcaggtcaaacccacaaccgctgtttggaatcagtttcgctctaagcctaaacgagcatctcaggcttacaacttgagacaaacttacttcaaacctgagttcagaagcaagagaacaggatgctggtactgtggaggtatgagtcactacaaagcagactgctacaactacttgaaacatgttgttcagactaggaggaattatcaagtgggtgctcaaggaagacgagtcagacaagtgtatgtcaagaaagaacatctatagtgtcatgttactcaaacatcagcgaatgcagaactcaaggatctgatgtggtgctttgatagtggatgctccagacacatgacaggaacactagacaatcttgctggatataaggatgtgccatctaggaaagtcagatttggagatggaggtcatgccttgatcaaaggaaagggatatacttccggacaagccttgcctcatctaaccgatgtatatcatgttgatggacttaaggcaaatctgatcagtatcggtcaactgtgtgacgatggtttgagtgttttctttacacaaacggaatgcaaagcctttgacaaacatggatttgtaaagatggaaggacaccgtgctgcaaataactgttacatgtggaatccagaagagtcatgctacactgcatcacagatcgatgaatctacttcagaagatcaatcgctagtgtctctgctagaatctgatcatatgggtgaagccatgagttcggttcagcagtttaccatatacacaatgagctggcaggctccattcaagttcacaatcaacaaggtatgcaattgtttagcttggtatctgaccagtctgtatggc

SEQ ID NO: 165491 - DNA, 277 bp, Arabidopsis thaliana landsberg
gtcattggcgttatggctttgcttgtttgtataattttgagcagctaaggagaatgtggcaaagacactgaaagatatgaaattgattaaccctttatggctctgcttgcttgtatgaatgtgagcagataaggagaacgggccaaagacagtgaaagatgttaaactgataagcgcgggtagaatattggagaacaacacaacggctggagattgcaggagtcctgtccgcaacttctcaggtgctgtcaccacaatgcatggtataattcaacat

SEQ ID NO: 165492 - DNA, 540 bp, Arabidopsis thaliana landsberg
gatttgatactatccgatgttatgatggacaaaatggatggttacgctttcgcaaaaaccctttcagaacaggataagtacaatcatatacccattatatttttaacagccaaatccacacctactgatcgtctgaaaggccttcggcttggagcaatagacttcatttcaaagccattttcatttgaagaattaggtcagaaaatcgaaaccatacttgataatattgtaaggcaacagaaggctatactcagcacatccattgcagctctgaaaacaagtaaaggcaaggaggctgacaatatggctcagtcttcgctgttgaagtatgaacaaaattgcaagttattgaaccttacggccagagaaatagaaatagcccggctgatacttaaaggaaaaacatataaggatatcgcaaaagagctgtttatttcagaaaagactgtgacaaagcatatacaaaacatctttgcgaaagcagaggtttccaataaagtagagcttataaataaattgagcaaataggctacaagccac

SEQ ID NO: 165493 - DNA, 262 bp, Arabidopsis thaliana landsberg
  unsure (1)..(262): unsure at all n locations
gagacanagncaaacagacacangacagcnagacanagngcacaccgaacgccaaccaagangcgacncgcgncccgaagaaccaaaccacagcggagcccaaacacgaaaccncaacccgacacccgaaaacccaaaaccgaaaagccaaccccgaaaaccgaaccnccaacccgaaagccnaaacccgaaaccgaaaacccgaaaccangaacacagaaaccgaaaaccnaaaccagagagccaaaacnnnaaaacccaa

SEQ ID NO: 165494 - DNA, 4632 bp, Arabidopsis thaliana landsberg
atggacgtcgtgtttacaccaattcaatcggaggaccctaggtaagacagatacaacagattaccaaccgatatttgacacacaccgtaaagatccacttgacaatgggccatagaatgagttaaatatcaaggtacttttatacagaccaacgcatcaactttatggcctttaattatgtttatggcttctctatactagacctaatgatttatgaaatgtctttgcaatgtttttccaaaattacttattatgccacttttcattttgactttgaattgtagaatacattggagaagattgctgaatctcagtccttgttacatcacaccaccgaacaaacctttatacaaaaagtgctacatagtttaataagctctaaaaagaaggtcaaccttagaactaaaattgataatggtcacatgtgcctagttatattggacatgattttgtagatactttatatttgtaggcaatttttcttaacttttttctcaccatcttcgtgtgtaattcatcattcagggtaccttggagacgactgcgacatctcattcagtgtttgagcctcaacccaaagtcaacattgatgatgatcatatgaaggtatacatttttaactagtttcaatttatggtttgcggtccttgctttattggacactggagaggggttttgcatctctcagtccttgttagatcacaccacccaataaaccttcatagaaaaagtgctccataatgtaatattttctaataagaaggtcaaccttagaactaaactaaattatgcttgcatgtttcctttatattggacaggagtttgtggatacattacaatttgcaagtaatagtttcttatgtttttctcaccacctttgtgtgtacttcattattaaggacaccttggagacagctgctgtaacaccccgtatgtggaagtaggagtctagagaagtgagccggactttgaacctttcgcgtgagttaagtaccatggaagggtaagggaaaggagaagtccatggaagaaaaaaaaacttaactggaggacaaagacgagaaggaaggtaattattttaccctcgcttcaaacccgtcaatgaagccctccaagttaaaagagaaagtggaactcacgaacagagtttccaaggaaccaacgagatcctttcgatccacgactgtatcttgagaaaggtaatcagatatccaagtccgtatgtgaaccaaggatgctcaactcagatcgaatcaaaatgacttgatccgcgagagtggttttcaaagcattgagaagtaagaagaaatccgattagaaagaaaataatcagatggagatgggagattcaatgatcgaaagattgagttgaattacccgattaagtttctaaggtcaagagcttaagaatcggaagaagtttctaaggaaagggaacttgagaatttttgagaggaaagatgaataaaatttgtctaagtgtttgggagttgagaagtgaaggagttagagttacgattaatatagaagtgaagaaaggcgagccatgcaagccaaatgaagagaacttggtgaccaagtcggctcgcgtagagctgaagggaaaaagcttggcgcccaagttctttggtcggaagccatgcaagggaaacaccacttgtcgatgccacgcggccgatcccttttgcatgtgcgagaggtggacacgcgctcatgccaagtgtcgttaagtttaagccatgtgtcttaggactctagctcaaaaccaacaatcgatcactctttttaaggctactctcctcacttccgaacattcctttagagaaaataaaaagaacttagaatttcaagagttttagagagagtttaagagaggtttaaaggagaaggcggaggagattcttgaggagaaagtcgaagacaccaaaatcgccggtgaaacccttccaaagccttaacctctcgatccgttccttgtttgtgagttcgcgtgactacttttcttgctgcattttcattctagggttcatcattctcgaatttggttgcatgcatgataagctacgatcatttagaaatcgtcacttgttatatttctttggatgattaaaattcggctaggttaataatgaacctcatatagatatcatcacctatcatgcttaattttttttttaaaaaccggctaggttgtttgctgcatgtagatgatccctaaggctttgtttgttgattgcttgttcgtttgtgtgcattcatacttgtttgtttgtgttgcatgtttattttctttgcatgtgagtcttgtaagtcctgcttaagtgtcgtcatcttcaaatccatgtcggatgagaggtgtgcattgtttgtataagtgatcttggatgcggaatccatggatcgtagagaatctagtttagggtgatgtcatctcctgcctgtgtgttgagccttcgagtctcggtcccaaggaaacatttgttggttagtcttggaacctaggccgagattgcatgacgatgcatttgggcttattggtatcctgggtgggttcaataagtcatgatgttgttggtttcctgtgtggattcaacgagtggttggtcgggttgacggatccatataggaaaactcaacttccgaagttttgtaaggaggaatggagcacatggcccataggtcgagtctaggttatatcgagtcttttgtcttgcttgtattgcttgtgtgtttatgtgcttttaacgtgttactctgattgtttgttgcattcttgctttgcttccgttcgttaacccctctaggttgttagatttgcataagaatggcttacagttgccgtaggttccatgttgcattggcccgactcactgagtaatactagtttactcatgattctacttgtctttcaggttacccgtagctcaatcgttagagggaagacgaacgttaaggccgccagactagggtatttttatgttgcttttgtaaaacccgttttggaactcgcgtttttcctttaaagaaatggatccagtttgcaaaatgaattttggtgattttagttcgattaacgtttgtttcaaattgttttgcaaaggcggatgtttcgtaatgatacaaggctttgtccaagtcgcacaatacctcgccgcaagggttggcaagcctacgcagtgaatccagtggggagatgactagatgcgagttggccgaggacttggaaccccgggtattttgccgagttgcgagtggttctctccatttgtgacgccctcccgggtcggccgtggttagtccggtcatggccaggctagggggcgttacagctgcaaaatcacattcagtgttaaagacgcaaccggaaatcaacattgacgttgatcatataaagttatacatttttaacaaatttcattttatggtttgcggtccttgtattattggacatgattttgtggttactttataatttgcagacaatatttcttagattttttagaccactttcgtgtatacttcaaaatccaggacactttggatatgtctatagcatctctttcagtgttagtgcagcaagcggaaataaaaatatactatggtcatacaaaggtacacatgtttaactagtttaagttttggtatgcggtgcttgttttattggacaatactatttggatagtttttaccactttcttgttattccaggcactcgttttggctggggatcgtgtatttgataccagttccaaacctgacaaagacacccaatcatctcatctcccacacataactccaacaatgggggtacaagaaaggagctattgcttaccatatcatatatgtccatagatggactctatatataatgaattaattactcagataacatagaattgtatgtttattcctagaatatcatacatcttttttttattactcatatgtttttggtacttgtgtaattacagttaacaccctgattagttttaattaaatattatttttaattcgtttttagctaaaaattaaataaaaaaaactgattatacatgtcattaacataatccacgtcattactcatctcaaacagcaaaaacgtttcggtttcttttttttaagcattactgttcatcagcggaaaaaaaaactgtcgctttctttctcgacgggaaaacaattcctgagacctaattccgtcgccgttttctctttctctcttctgttccggacgaaattcttacgacggaattgcatttcttatccagtaaagtcacatccctatcaagtcgcatttgaagtgaacttctcaaaggtccagtaagtctatatcctaactgtatttcgaattttcgacaagattccgacatctaagttcaatagcaagtgattcacgcgacctttaaccgttttccaaaaaccatcgtgatgttattgatggtttttaacgatgcttattccggcttcttttcgtcgtcgttgattgacatatggtggctgatttgttagatctgtttgattcgatggctgagttattgtttgtttgccgactgatttatgatttatcaatgcatatgtgtctgagtttcccatatcctgtggttgagtttgttttatgttttgtataagtta

SEQ ID NO: 165495 - DNA, 556 bp, Arabidopsis thaliana landsberg
atggtgcctggaattttccaacaggctctattactacagatatggatcacatattttggcgaataccctcggatataaattcatcttcttcttttccatggataagttggtatatttaaaaagcgcaaaatgaaaagattcatgagaaaattgataaatctcaatatgagctcctacgtttagtggacacggaagcaaaagcatgacaaacagcgcaagctgagctatgttcagaaaaccatggatttttaaacatggaaaatattacccgagataaagttgttgtttcaacttgtttgaatggagttaaatgctaccttgatggttcttggaaaaatagtgataagtgttcagggttagggtggtattgtcagtcatctaatggacagccatccataatgggagccgtttacacccggcgaggcctatccccacttcataccgaaaaacaatcctctctatgggctgatgagatgatcgcaggagctgaccaccaagactactcgttctttcagaatgttcagatttagtgaagatggtgtgttccccaaacgaa

SEQ ID NO: 165496 - DNA, 781 bp, Arabidopsis thaliana landsberg
ttgattctttcatgattctcttcagaaacaaacacatcttattaccaatctttgctttcatagcgatccctctcgcagccttacacctctccttaactcttacctcctttcgccttaaaaaccatgtctttcgtttagaagccttagctaacgttgtgcatacacggtttgaagctagacagatttggcaagagtctagagaagatgctgtctcgcttttacatctcaaattccggtatttcgtcccatcctttaacctctcctgtatggcctccataactgtcatcacatcaacttccttctcacaccaaggcataaacccatctctgaagtcgtcatttgtttcagtgaagtcttcttggatgcgagtaacagcaacttccatcatcgtctatggtctgctcttcctctactcaccaattcccatgtttctatcagctctcgttggttatacacctacattgcagtatctcatcacgatcttctgtctcggtgttgaggtatacgtaatggctataacagggcttgggtttgtcgtctctgtattggaagaaagatacggttttgatgcgattaaggaaggaaccgctctgatgaaagggaggaggataacaggattggctttggcgggtgtatttgtgtttctatcgagtttcattggtcatgggatggagaagttggcgaaggagctagatatggacgtgagctcagggtcgtggtggaggtcggtggttgtggccggtgggtgggatgggtggaagctggtttgtatgtatggggc

SEQ ID NO: 165497 - DNA, 910 bp, Arabidopsis thaliana landsberg
gagggaattacaagtttcgaaaatcttcctgaagaactaaaaagggagattctgttacggatgtctcccaattcccttgtgacatgtagccgcgtctcgaagaaattggcatctatgatccgtacgaaaagcttcaaagaactctacctgagccgatcgatgagatgcccccgagtgttgttcgccgccaatggtacaataacacctcatgtgttgtttacctcgtttcaagaaaaggagaaaccactcttgtcttctggagaacaacggatcatcacctctcttcaaggagaatttctgttttctccacccgtccgtgggttgatctgccttgtagaacgagaatcagctcgaattgtgatatgcaatcccggtacgacaaaatttctggctttaccaatcgtcgaagcagatgaaacaacgaggatcataactcatttaggatacgatgaacagaaggatgtattcaaggtgttatgtacaaggacaaagcccgaaactccacatcttgttttgacggtgggatcgggtaaagaaccttggcgagagatagagtatgcaaatttccgcacacagtaattggtgctggagtattttacagaggaactttatactatcttggtgcttttcactcaaaaagtatcataatgaccttcgacgtcaggtctgaaacttttatgcccattgcatcacctcatggagtcgatttgaataaaggttcctgaagacttgtcaataacagtcaacaggggggatttgcgttagtgaatgaatcaagaggtttcgtttacccatcgaatggcggcaatgcttatcttgaaaggtgggtttggaatgtcgatacaagaaaatggtcgatgaactccatcctgattcgtaaatggaaagattatgctcaagacaatgaaga

SEQ ID NO: 165498 - DNA, 621 bp, Arabidopsis thaliana landsberg
cgccggcggcggcgatgaatataggattccggaatgggaaattggtttacccaacggagatgatttgactccgttatctcaatctctagtcccgtcgattctcgcgttagctttcagcatgatcccagaacggggccgtacaattcacgacgtcaatcgcgcgtcgcaaatcacgctctcttcgttaagaagcagtgccaatgcttcgtctgtgatggaggaggtcgtggatcgagttgaatcgagtgttccaggatcagatccgaagaaacagaagaaatcggatggtggtgaagcagcgtcggtggaggattccacggcggaggaaggagactccgggcctgaagacgcgtctgggaagacatcgaaacgaccgcgtttagtgtggacaccgcagctacacaagagatttgtggacgttgtggctcatctagggattaaaaacgcagtgccgaagacgattatgcagctgatgaacgtggaaggacttactcgtgagaacgttgcgtctcatttgcagaaatataggctttaccttaaacggattcaaggattgacgacggaagaagatccttattcgtcgtcggatcagctcttctcttcaacgccggttcctccaca

SEQ ID NO: 165499 - DNA, 834 bp, Arabidopsis thaliana landsberg
atggaggtcaagttattgaacgataagggtgagagagatatgtatgagaatttcgtagagcgatacgctatcaatatcatcacagctactgagaagcttgacaaggtcataatatgaaaccgagtacgtcttccacttcaagaaactatctgcaacggtcaaagacatggtcccaaacattgagagattcgcagaaacatacatagatggattcctactgtggaacatcgaggtgcgctacaatggcttctacttcaagctctgcttctgctgtcgctgagtgtgttcagaactttttcacttccatgggtgctctgaagctcaacatggttgctgttgattaggtgtatccattattgtctgatccccggcgtctcttaataaaactcgaagacttgcttcaaacatgtgattggtgaagttttgatgatgttcagacacatacttgtacttgtaagatgcaagttcacacagctgtttcgaattttgaagtctcattgtgttagtgatgaataagagataatcaggaatctgtgagatattacattaaaatcaaatgcataagtttttgatataaagcttaaaaacatttgttgtttgagtacagagacatcgtaattccagacagaataaaagcttttagtcataatcatcatacaaagaagtagcaataacactcttgacaaacaatcacttcatgtatctatgcaggaattttctgtggaagtcattcctgattgtatcattgatgaagcgcttaagagctttcatttcaccacgtgcctggtttttgaatacaacatcatcatcccacctgaaaagagacgagtaatt

SEQ ID NO: 165500 - DNA, 476 bp, Arabidopsis thaliana landsberg
ggttatgttatgtgattgaagaatgctgagctcactccggcgggggattcgaatctgctgaaggagtcggagaagatgattcctccataaaatgtatgtcggaatatggtggtcggtctagagatttgccaagcctaccaaaatctacgaggaaagcagcgtccgagaaaggttctccgacaaaagacatatcatcagacaaaactaaacgtcgctcttctaacaaagggacatcgtcatcgtcgaggagaccaaaggaagccactgaagaacaagacgagttgtcttcttggcctagtggattaccggaaattccaaagaaatcgaggaggaagaagaagtcgacaaaagaaaccgcggttaatggagggtcatcaagatcgacaagaagatctgatgtcgataacatgtcggaatatatgtctgagactggttctgtgagatctatgcctcaattcgacaatagagatgatttt

SEQ ID NO: 165501 - DNA, 1329 bp, Arabidopsis thaliana landsberg
ctaataattcctctaagcctcacacgggaggagatattaggtgggacgcagtgaattccttgaaatctagaggaatcaagcttggaatcagcgattttcgtgttttgaaacggctaggctacggagatatcggtagtgtttatcttgttgaactcaaaggggcaaatcccacgacgtatttcgcgatgaaagtgatggacaaggcttctcttgtgagcaggaacaagctgttgagagctcagactgaaagagagatcttgtctcagcttgatcatcctttcttgcctactctttactctcacttcgaaactgataaattctattgcttggtgatggagttttgtagtggtggaaatctctattccttgagacagaagcaacccaacaagtgtttcacagaagacgctgcaaggttagtatacaaacagagtctttagaaacagaggaaaagtacatcttaagggtttgtttttttggcttataggttctttgcatcagaagtgttattagcattagagtacttacatatgctcggaatcgtataccgagatttaaagccagagaacgttctggttcgagacgactggtcacattatgctctccgatttcgatttatccctccgatgttcagtcaacccaacacttgtcaaatctttcaacggcggtggaaccaccggaatcattgacgacaatgcggcggtacaaggatgttaccaaccatccgcattcttcccacgaatgctccaatcctcgaagaaaaaccgtaaatccaaatccgatttcgatggatcgttaccagaactcatggcagagccgacaaacgtgaaatcaatgtcttttgtcggaacacacgagtatttagcgccggagattatcaaaaacgaaggtcacggaagcgccgtcgattggtggacgttcgggatattcatctacgagcttcttcatggagcaacaccatttaaaggacaaggaaacaaagccacgctttataatgtaatcggacaacctcttagattcccggaatattctcaggttagctcgacggcgaaggatttgatcaaaggtttattggtaaaagagccgcaaaacagaattgcgtataagcgaggcgcgacggagatcaagcaacatccattttttgaaggtgtgaattgggcgttgattcgtggagaaacaccgccacatttgccggagccggtggatttctcgtgttatgtgaagaaggagaaggagtctttgccgccggcggcaacggaaaagaagagcaagatgtttgatgaagctaataagagcggtagtgatcctgattacattgtttttgaatatttt

SEQ ID NO: 165502 - DNA, 291 bp, Arabidopsis thaliana landsberg
aagggctacgaggtgcttcttgccgtcgacggcgaggaagccgtcgcccgcgcgatctcggaagcgcccgacctcgtgctcatggatatcggcctgccgggcatcgacggctgcgaggcgacccgccgcatccggcagacgccttccggcgccaccctccccatcatcgcgctcaccgcccatgccatgagcgtcgacgaggcccgcgcccgggacgcgggctgcaacgacttcgataccaagcccgtcgatctcccgcggctcctcggcaagatggagacgctgctctcc

SEQ ID NO: 165503 - DNA, 1359 bp, Arabidopsis thaliana landsberg
aacaaccgacagctttttggttggattcttgttgcaaaagacgtatcgggaagtaatttaagaccaccagtcgactacactgaagttggaaacactacaacattgcttatcaaacaagaggggcctgcatatttttggcagcccctatgtcctaatggatatcatgcggttggtctatatgtcactacttctcctatgaagccctctttgggacaaaattctataagctgtgttcgatctgatctcacagaacagagtgaagccgatacatgggtatggaggataaaagatatgactatttctagtttgagaccggccacgagaggagtagaggcgacaggtgtgttcacagggacattcagctgcaaacaactaaactttcttcctcatccccctcctttattctgcttaaaaaatacaaaatttgacttgtcaagcatgccaagcgaaaatcaaactagagttttgtttaaaacgtattctccttggatatatttacacccaaaagaagatttccttccttcctctgtcaattgggttttcgctaacggtgccttgctacacaagaaaggaaacgaatccatcccggtcccgatacatccaaatggttcaaaccttccacaaggaggttgcaatgatgacttgttttggttagattatctagtcgataaaaaggctagagaaaaggttaagaggggagatttagagagcactaaggtgtatctacacatcaaaccaatgtttggagctactttcacagatattgtagtatggctattctttccctataacggaaatgcacatttaaaatttttgtttatcaagagcctgtcgctaggaaatattggcgagcatgttggagactgggaacacgttacattacgcatcagcaacttcaatggtgagttatggcgtgtttacttttctgaacacagtggaggaactttagtggatgcatgcgatctagagttcatgcaaggtggaaacaaaccagtagtatattcgtctcttcatgggcatgcaatgttctccaaacctggagtcgtgttgcaaggtggcggcaaaagtggaataaggaacgacatggcaagaagcgacaaatgctttgacgcaggtattggatatgaagtgattgcgggacctggcgtggttgagccaccgtggctgaattattttaggaaatggggacctcgagtccattacaggattgacatatttctcaactctgtcgcaaagattttgcccatctttttacggaaaggtttgcgaaaactcatcaacaaaattcctttagaaatgcggggtcaagatggtccaactggtcccaaagttaaggtgacttggaccggtgatgaacaa

SEQ ID NO: 165504 - DNA, 1162 bp, Arabidopsis thaliana landsberg
ttagggttaccgttgagggagagagttctcaatctcgttgacttagccatgaatccggaacagaaacagcgcgaatgcatagtctgccgtgaaaaagagccgtcgttcatccacaccgtcatcaaaaccggcgctttccggcgactctgcaccgattgtttgctcaaagagtaccgagaacacttttgctctgtttgtttcaatctcttcgacaacgccgttcctccacaagctcgtatcatctgcgtcaattgcccatcaagcacccacctttcttgctcaactcagccgccgtcttcctccgccgcatcttcctcctcctccgctccaccaccagcttcttccttcacatgccagccatgttctaaccccaatttcaccttcttccccaaatctcgagtcaatgaagacgtccccgatgaaacgcctctcactccgaaatcggcaatggctcttgtcgcagctggaaatatctcggtggctaatatgaataaagcggtggctctgttaaaggaagaagctcttaagaagatcatagcagctaaaacggccaagttgagagctaaaggtgcattgacgaatcttcaggatattgttattcgacagagtaaggtcaccggcaagaggaaggaagatgaacgctgattttctaaatcttgatagcaattttactggtacgtagagcttttgtgtgatatatcgcttctagggttcaaggaaagactacttttttgcggttattggccatttatcttggtgaattttagttcatattcagacgtgtttgatcaaatgtctcccagagaaagctggagactttgaattaggatacattagggcttttattttgtacaatggtgtgtgtaagactcagtgacattcattcatattaatcggttccatcttcaatctttaaaagtatctgtatgatttcaagagttcatcttgttgtgtggctttactggtttggagattttcatggaaggtttgatatttttagagttctccagctagtgaattaggttttgattggcacttatccaagaaagtgataatacgttgatgttttggtttggaagttgtgataaagcacacattgaaaaatgttttggatgattcagagttctcgagccaagaaatgataatgcgttgatgtttttgc

SEQ ID NO: 165505 - DNA, 1033 bp, Arabidopsis thaliana landsberg
aaaatttgttcttggtcagctcgttttttatcttatactggaagattgaacctaatcagctcgattctttggagtatttgtaatttctggatgggagctttccgtctacctcgggattgtatcagggaaattgataagatgtgctctgcttatctatggtcaggaggagagctaaatacatcaaaagctaagatcgcatgggcgtttgtgtgtaaaccgaaggaagaggggggtctaggtttaagatctctaaaggaagctaacgatgtttgttgtttaaagttaatctggcgcattatatctcatgctgactcattgtgggtcaagtggatacaaagctctctccttaagaaagtttctttttgggcggtaagggaaaatacaagtctcggctcatggatgtggagaaagatccttaagtttcgtgacatagcgaggactctttgtaaagtggaaataaacaatggtgcccggacttctttttggtatgatgattggagtgatttaggaagattgattgaaagtgcaggggatcgaggagccattgatctggggataaataagcacgcaactgtggtagaagcttggggtaaccggagaagaagaagacaccgcgctaacttcttaaacagagtggaggagcgacttgttctgtcctggaactcccgaaaccaagccgaggactgtgcactttggaaagggaaagagaataggtttcgaagcatcttctctaccaaggatacttggaatcatattcgcacagtttcaaataaggtggcttggtataaaggggtttggtttgctcaagccattcctaaacacgctttttgcatgtggttagccgttcacaataggctctctacgggagacaggatgacactttggaacatgggggtggatgcgacttgtatcctatgtaacaatgcgcttgaatctcgggaccatctacaacacttgtttttccacggactggcaaaccatcatcaacaacgtctcacgcaactggccggatcgcgtgcaggctaagaggctc

SEQ ID NO: 165506 - DNA, 2946 bp, Arabidopsis thaliana landsberg
ggatttagcaaaagttctgggctcgtcctacaaaatttagcaaacacatggtgataataagattctatgcttgaaataaaaatggaagaagagcaccccattctcacatgcatcttcttgtgagaagcttacatactttaattcaacctctggtttattatgcctttcaacttcttgacaaggaaaattctgcaagtagagaagtatagaagctttcaggaatataaaccatgtaaatctgaatgttttcaaagactccacatggcccctttcacctactttaacgaaatcggtaggttctgacaccaaatattgcgagaaaaatgtcaaaaagtaagtgaatgatggtacatcatgtctaatcaaaaagtaaacaactaatacatgagaataacagaccaaaggtggatgaatgagatagaacgcaaacatgaagctttaactgccttaaacaaacttaaccataaagatggagactttgagacctatgtcatgataccttgaaccaaaaataatttgtacctgtaagcacattgccgcctcgagtgtattttttatgcatgctagatacagccgtaatgagtttgcctggaacatcaaagacccatcagaagcaaattttaaacaatatctgcagtaaatcagtatgcgatagacgttgtttaaaagaattgtttctaaactggacatgtttgaatgaaaaacagtctttgtcaagtatgagaagaatcaaaattagaattacagtcaaagttcttaccatgtcctagaaatgatgttattctactcaagacttgcaccagacttaggattttatctttcttttcgatgaatctttatgggctgaaaaaataatccaaacataaacaaaaaagcatctttagtatcatagaattttggttaccaacttttttacactaaacatcaacaagaaagcaactttaggaacaaaatgtctacaagaaaacaaaaccctgttttaactagataggaagagaacaaaacaaaaatcaagtaacagcaagatcccggaggctagagtttctatgtaatcaactcgaagcaacaataaggcaatgattattgagagacccaattagagaaataagccaatctactgaaagtctgaaacttttggaaaatgtgagaaagagaaatcaattagagtcctaggaatcaatcagacagatcaaaaggcctaaaaccttgatcgtgagcaattgcataccttggagttggacgacttggagactcgtgagaggagagatcgtaaggagatttagagatcaacgatcggaaaattgaatcacgatcaaattgaccggataagtgaaacgaaatgcgtcaaaaccgaaccaaaccagacacgccgaccggatctggtacattctaaaatggaatgttcattgacccacaaataccagctagattctgcggattgaaccggtgaaccgagttgctctacttctaagttctaatctacaactacaagctactctatgttcagtctcattttatagtggtgctcattttattgtaacagtttttttaaaacatggagttgcgttcatctcttattgctgaaatgctttactttctccagttcttatctatgaagttggctactataaatccaagaatggagtacagtgctaatgatatactatccacagaggtacttgcgctttaacacatctgtttatgttattttattaatttataggaaagactggctctgcttcttgtagaatgttctgtatctgatgagtagtatatgccaacagagcaacaactgtaagcaaaacaaaacaaaaagcaacaactgtagggtgaatgaaactcttgtcgctagagagatggagttcgtgcggttagtatctttggtttttgtttgatttatgtggtgatatcagatttgttttggaggtgttttctaatggtgagattgtgaaacagagatggaacttatgtgcgtctcaatggtcatttgaagacttttcagggtgaaaaacagcttcttgttttctctgtgaggtatgttttgtatttttggttttgaaatgcttttgattcatttaccattggaaataggttttggtatgttctatataagctttgttagatatatgttaaacgtacttgagttgttttgtggtgcaggcctattatggatttcaatgaggtcacttttcactacattgagtgtatacacttctactcccagaactctgaatcacaggtacagaaaatgtaatatggcaaatgattaaattgtgatgttgtatttcacaatttgcaatcgatcgactctccctctctgacttgtgctttctcaataaggacaacaagtcggtgatgtcactcagtcggttaacaccacatttcaaggtggatcaaacacaaaccaggcaacactattgaaccctgtatgttgaattcaccaagtttttttttttttggttttcttcatgacatttgtttctgtacttagaaatagaatctcattattgttgctcgtttttaggtggtttcttctcaaaacaatgatggcaatgggcgcaagaacttggatgatatgattctagactatctaaagcaacctgcttgcacgtgagtttgaattttctcattgctgcccccattgctccacttaaaaaactggtctaataatagttatctgttcactgcagtgcaagacaacaggggatacatatcgatgaaattgctcagcagttgaagatcccaaaaaacaagctagagtatgctttttttctttctttctccttataacatctatctctctttattacattcagagttgttgagctcatgagtttgctttgttttttttactgatgtgtttataggggcgttgttcaatcactggaaggagatggtctaatatactcgacaatggatgagtatcacttcaagcacgtggagctt

SEQ ID NO: 165507 - DNA, 188 bp, Arabidopsis thaliana landsberg
acaggagaacgccccctgctgaagtaataccagtgttcgatactgggtcattcatagcatactaaccttccctattcattgcgggctggttattgtcagcaccggtttagcttcgatgtgtaaaagagaatcgtccaaacgagtattttacaagagccgacaggcattccattaataacagaccgttt

SEQ ID NO: 165508 - DNA, 859 bp, Arabidopsis thaliana landsberg
tacatcagaagctgtttaattttctagggattaaaaacgacgtcgtcggaaacgggagagaagccgtcgatgtttattgttccggtggaaactatgatcttattcttatggacatggacatgcccatcatgaacggtattcaggtaactaaaaatttagattttactcattaacttcttcgttactttggacactaaaatttggttactacctacctagaagaagaatttctatggtgcaatatttttttcttttaacttttcaaaacatttttagaaaaaaagattaaaaaatcttaggcctttcaacaaaaaaaaaaagattaaaaagattgtctttatgtgaagttcgttttcatcttatttttatttgagaattcttccatcttaaactatttgtagccttgtatgtagtgaaaaaaattcactaaaggtataatttgatttgtcaaaatattttattagagtttatagaccctaatatatattacgtatatttttaagaaataaatatgctaaaaaccggtcctggattgttattttcagaacctatgaaacataaatagctgaagaaataaaagtttttatgtggcctatggaaactttatttttaaagagattattggttatatcaaaataattacattatggatccttttcttctcttttgattgaatattgaaatataggcaacaaagagactaagggagatgggaatagagagcaagatagcaggagtaacaacacgagctaacgaaggagagaagaaagagtttatggaagctggccttaatgattttcaagagaaacctcttaccatctctaagcttctctctattcttcataaacttaatttctac

SEQ ID NO: 165509 - DNA, 731 bp, Arabidopsis thaliana landsberg
aaattatcaccagaattggacacgcccccaaacactaaattttaacaacttgcattcgtgattaacagttgcggatattctgttatggagagagccgaaaatagcagcaacattggtgataggagtgagcatcttatggttcttaatggaagtagtggaatacaatttcataaccctaatttgtcatgcttccatgacctccatgctttttttcttcatttggtctactgcttctgattttctcaattggtatgtttatatctttacttgattaatcttttttcaatttctcatgatcaattggttcaaaaatatacaaattacaagatttccttaccaataaaacgacaattaaataaacaaaattgcagggaaagaccaataataccagaagttgtactagacgaatcttctttcaaacaattagcaagaagcttccatgttagattcaaccaaatcctcacaaagcttcttgacgttgcttgtggaagagatcctcctctcttttttctcgtaagatattatatagaataataattttccacttatatatatatatatatatatatatataactttggattcattattattttgcttaaattggttactatatttccagacaacgatctcgctttatatcgtatccatcatcgggacatatttcaactttgtgaatcttctcttcataggtaagaagaattaagtcatgatactcaactatatatgta

SEQ ID NO: 165510 - DNA, 1462 bp, Arabidopsis thaliana landsberg
cacatccccttgtctggtgcaacaacggagaaaacaaagataaatactgcaaacgggagtccaggtgcagagtttgctcttatctgttagatgacgacattggctattatttcctacgcgaagacttgggtcagaatgagcgtatcttttttcataaagagtgtatcgaaccgataacaaataatccttatcatcgtaaacatccgctccaagttctcgtatctgatatttaaagctaatcacaatatgctattgttgttgtcgtcgtaaagaattgaatttctattgctctatatgcaatttttgcatttgtgcttactgtgaagcaaaaccaccactccttacgatagaccacaaaaaaaggcacgaacatacgttgtcttattttcctagagaagcttccattacttgcaatgtttgtgctttggacgagcgaaggtattttctatatatttgccatcaatgtgattttgtagtccataaagaatgtatatattcgccgtgcatcgtaaaaatatctcggcatcaacaccgcctatcatttgcttcatcgtttcttcctcggaaatggttttgcggggtttgtcgcaaaaaggttgatgagaactatggaggatattcttgcgtgaaaggttgttattatgtttctcattctcgatgtgctttacgtaaagacgtatgggatggaaaagaactcgaggaagaaccagatgaaatatataaagatcttttgccatttaaagagatagctggtgggattatacaacattttagtcataaacatcaaatgagactccacaaatatattgataaaaagattgaggataacaaacattgtcaagcatgtgcacttccggtttataattgtgatatttttagttgcatggaatgtgagttcatcctccatacagtatgtgcaaatctttcactgcaaaaagaacatgtaatacatcctcacgccctcttcttacaagtgggacatatgttcagttgttcagcttgccagcgtcaaagcaatagtttcacatacatgtgtcaaatgaccaattgtaatttccgtttagacgtaatttgtgcatccacatctgagccacttaaccatcattttcatccacatcttttgtttctaccgtctgattttggatctacaagaatctgttcgatttgcaaagtacgctcacaaacccgtttcgattgtggaaaatgtgactttgttttgtgtttttactgcgctcctataccaatgaaatttaggtacaagcatgacgaacatcttctcactttttcgtatgaacaagatgcgagtagtgagcactggtgtgatgtctgtgaaagaaaaatatatctcaagaatggaatttatatgcccagtgaatgagacatccccctccctattcaatgcttacttgggaaggaaaagtaaatgttaccaggtaaagagatgattatatatggtggagaa

SEQ ID NO: 165511 - DNA, 111 bp, Arabidopsis thaliana landsberg
tccgggcgcaaggacattgcgctggcaaccagcattagttgctccaagtattacatctgttatgtccctggcccgcatgtcggggctcagcatcctttgtacgttgccccc

SEQ ID NO: 165512 - DNA, 837 bp, Arabidopsis thaliana landsberg
agagaaaacacaacaaaacaggtgattggattgaaaaaacacatataagatctaaaaatggaagtagaaactatgaaaaaaaaaacccaaagaaagacaacacttaaaatagaaactctaggaaagaaatcaggaaccatagatgcaagcatcagcaacagaatacaagagatggaagagagaatctcaggtgcagaagattccatagagaacatggatacaacaatcaaagaaaatgcaaatccaaaaatatcctaactcaaaatatccaggaaatccaggatacaatcagaagaacaaacctacggataataggagtagatgagaatgaagattttcaacttaaagggcaagcaaatatcttcaacaatattatagaataaaacttccctaacctaaagaaagtgatgcccatgcacatacaaaaagcctacaagaacttcaaatagactgggccagaaaagaaattcctcccgacacataataatcagaacaacaaatgcactataataaagatagaatgttaaaagcagggggggggaaaggtcaagtaacatataaaggaaggcctatcagaattacaccagacttttcaccagagactagaaagccagaagagcctggacagatgttatacagacactaagagaacacaaatgccagcccaggctactatacccggccaaactctcaattaccatagatggagaaaccaaagtattccacgacaaaaccaaattcacacaatatctttccatgaatccagcccttcaaaggataataaaagaaaagaagcaatacaaggactgaaatcacgccctagaacaagcaagaaag

SEQ ID NO: 165513 - DNA, 165 bp, Arabidopsis thaliana landsberg
atgaacaaacatcaatgacatttaaattacatttataccttcagcttgacagaaggtaaaaacccgagagtgacgtgtgaatgattaccagtcagtgtgaacagtacgcaggtactgttcatctatccataggcacgggacatcaatgataacaatttataaaca

SEQ ID NO: 165514 - DNA, 2110 bp, Arabidopsis thaliana landsberg
gctttgattacttttgattctatggttagggtttatgatttgggtttctctgaatgctctaaagttgttgtctttcatggtgaacgtgacctttctccagaccaggtaaaaacccttgacgttttagcttctttcttgcacaaatggtgaaatttaattagttagatgcaaatgcttaagaattagttagatgcaaatccgtgtgttcattttgaggattgtgttcttatcttcttagtagtgttgaatcatatagtttgatgactataagtgtgttgaattcttcatgtgtagttagttgattgctgtgatttgaaacaagtactctttttaggcttcgtcattttttagtgtcctgcatcatgattgttggtgtcaatagattgttcttcttagctgtattgaatttgactaagtttctttctttttcatgggaaaatttcatcagatacaacaattcctcggacttggatattctaagcagtttcatcatggaaagatgtcagcgattcgaaagcaaagtttcttgcttccgttggtggaatgtgagtttaacttaacatctgcgtttgaagaaatcattcccttggttgatgtcaaaccaggtcatcggcctcataggtcaaccggtgctgcgatctcaacagcattaggactgctcgagggatgttctgtaaccactggttctcggattatggttttcacatctgggcctgctacaagaggccctgggatcatcgtggactctgatttaagttattcgatcagaactcacagagatattatcactggtcacgtgtcttattacgataaatcttgcgggttttacaagaaactagcgaagaggctctgtgattcgtccgttgttctcgatgtgttcgcttgctctcttgaccaagttggagcagcggaactgagatacgcagtggaaatgtctggtggatttctcttactgggagagacatttgaatccgagcaattcaaaaaatgtctgagacatatattcatccgcgatgcagatgggaacctgagtatgtactttgatgtgtctttagaagttgtgacgactaaggatatgagaatctgcggtgcacttggtccggttgtgtcgctaagacagaagagcgatatagtgagcgaaaccgagatcggtgaaggcggaacatatatgtggaaaacgagcactgtcacgaataagacttgtgtttcattcttctttcatgtgagcaacgaacagaatctaaaaccgcagccaggttctgcgttcttcattcagttcattactcggtatcggtatggaaatggagcaatgaggaaacgggttacaccggttgctagaagatgggttgctggtaaatcgccagaaatctcgtcaagttttgatcaagaaacagctgcgtcagttatggcgcggcttgcaattaaccgagcagaggagtgtcacgctagagacgttattacgtggttagataacggtttaatccggtttgcttcacggtttggagattatattcaagaagatccatcttctttcaggttgactccaaacttctccctttatcctcagttcatgttctatctacgaagatcacagtttcttgacgtcttcaacaattccccggatgaaaccggtttcttccggttaatgttaaaccgggaaggagtggtaaactcaatcatcatgattcaaccaacgcttctccggtattcattcgacggaccacccgttccagtcctcctcgatatccggtcagtaactccagacgtaattttgctattcgattcatacttctacgtggttatccaccatggatcaaaaatcgcccaatggaggaaactcgagtatcataaagatccatcccacgagactttccggaaccttctggaagcaccggaaatcgatgcggcgcagttagtgactgatcggattccaatgcctcggattgttcggtgtgaccagcacggtagtcaagctcggtttcttcttgccaagctcaatccttcagtaactcagaaaacagatcataccggtggttcagatattgttctcactgatgatatgagtcttcaagatttcctagaagatttgcaatctctggcagtgaaaggc

SEQ ID NO: 165515 - DNA, 630 bp, Arabidopsis thaliana landsberg
  unsure (1)..(630): unsure at all n locations
ctggcgatgggcctgacctttgccatcgccctgacgctggtggtgttcgcgggcgccgaactcttcaccggtcacaccatggtgatggcggccggtctgatccgcggcacggtcggcttcggcagcgtcgccaagtcctggaccatgacctgggtcggcaacctgatcggggctgcgggccttgccgccctgttctggctgggcggcggcggcgccatcctcaagcagggcgccgatctcgccttcagcgcggcggccgccaagatgcatgcggcgccgctggcgctgctggcgcgcggcatcctctgcaactggctggtgtgcctggcgctgtggatgagcgtccgcaccaagtcggacgccaccaaatgcatcgtgatcttctggtgcctgttcgcgttcatcgcgtgcggcttcgagcattcggtggcgaacatgacgctattctcgctcaccttgttcgcggcccatcccgacaccatcactgtgagcggcatgttttataacctgctctgggtaacgctgggcaacatcatncgcggagctctgttcgtggccggcggctatggcctggccagcgggcgggcggctgaagcggcgcgcatccgccccctggctgtggcagcggaa

SEQ ID NO: 165516 - DNA, 2430 bp, Arabidopsis thaliana landsberg; identical to SEQ ID NO: 65929

SEQ ID NO: 165517 - DNA, 740 bp, Arabidopsis thaliana landsberg
tcaaacttcaagaacttctctgatttgcgtcctaaaaaaacaaaatggtttgtctttgttaagctactgaggttgtggaattggcctcctaattacttcggggaagaacctactatgattttagttgatgagaaggtatgaaacttctatttacagttttgatttctataattgttgttatttaccggatctcttgaatataaacattcatgaaagatttgattagatgtttaaatatgttctcaaggacactgaatcgatgcattgtctcctctacatgctaacaaagaagaaatgatttctacaataagagaaggacaatggtatcaactctcatacgttgaagtggttgtagctaacacacatgaaagattctcttttacgtaagactacaatggaatatgttgcgcctaagataagatgtcatttcattgagtgttttgatttctatcgaatcaagaatgcagttcatgttaaaaagatatttgttgttggtgagtattttagtttttgttttgtacttatactcggctaactaaaaaaaacagatataagttaacacttggttattacaaaattttcagatgctatgggaatcattgaatcagtctcacaaatcgagaaaatactttagggttctaagaattgggaaagtgagtatgaatcgagataccttactttcacaattaaagatactctgtaagcttttaaactataatacattcagtatgatttataga

SEQ ID NO: 165518 - DNA, 1986 bp, Arabidopsis thaliana landsberg
tcgaccgttgtgcatgctattaagtcagtcatggacaattatgagtctgtgtttcaaatgccaaaccaattaccacccgctagaaacagagaacacgctataactgtgcaagatggtacttctcctattaacctccgaccgtataggcactcatttagacagaaaaatgagattgagaagttggtcaaggagatgctggattcacagatcatccgcccgcgtattagtccatattcaagtccagtgtcgctggtaaagaagaaagatggtggttggcgcttttgagtggattacagggctcttaacaaggtcactataccagataggtaccctattccggttatagaggagattctcgatgaatttaaaggtgctgatgtgttctccaatctagatttaaagtcgagatatcaccatatacgtatgaaagcaagtgacgttgagaagatagcctttaaaacccaccaaggccattacaaatttttggttatgcccttcgagctaactaatgctccctcaacatttcagagcgtcatgaatgatttgtttcgaccctatttatggaaattcgtgctggtgttctttgatgacatcttgatttacagttaggacatggagactcacatgaagcatcttgagatagttctacaactactacagttacacaagtttttcgtgaatgctaagaaatgtgtatttgggagtagcaagatagcgtatttgggacacattatatcatcacaaggagtggaggcggatcccgagaagatagaagttatggttaattagcctcaaccaaaatctgttacagaactgagagggtttttgggtttaacgggctactacaggatgtttgtcaagagttatgggctcatagcaagacccctcatagatctcttgaagaaagatggcttcaaacgggaggaaaaggcgactcaagctttcaacaagctgaaagaggtcgtcactcagctgcatgtgctagtactacccgatttccagaaggagtttacagtagagactaatgcctcatgtactgagataggggttgtgctttttcaggacaaaagacccatcgctttccttagccaggcattttcaagccaaggattagatccgtctacgagagagagctactagcaataatgatggctgtaaccaagtggaagcattacttaacaggtaatgagtttgtcattaaaacagaccaaaggagtctaagacactaattagatcagaaagcagtttcttcgattcaacagagattggcttctaaactggtaggactgaagtacagaattgaatagaagccaggtgtggacaacaaagtagctgatgctctatccaggaaatctcaaacgaaagagtttattcaactcaagctgaaggctccacagtctttggatatttctgccttgaaagaagaagttaaggcagatccagagttaaacaagatcatggcagagattgaacataatttgtagaagagtggggattacagtgtgcgagaagggttgttatacagaaaaggacgattagtcattcctaaaggatctcccttcattccaaagctactacaagaattccacaccagtcccatgggtgggcacgaaggagctctgaagacctttaagaaactaacaagtaaagtttattggcgaggaatgagaaaaaaggtagtgaagtttatcaaggactgccaaatttgccaagaaaacaagtattccacgctctcacccgctggtttactttcaccattacccattcctcagcagaaattggtctgataacagtgtggatttcgtcgagggtttaccaagaacaaaagggttcaatgctatattggtggtggtggtcacgaccttctgaaaacaacttttcattgcttagaatcatacttttaccagcaatttctttacctgaagtgtttattagcaagggtgctcaactgaaagaattttgggatctttagcttaaaataggggt

SEQ ID NO: 165519 - DNA, 1874 bp, Arabidopsis thaliana landsberg
ccagaggcttggttttcagacgcctgtgaagtgtgtgcctctttcgtgatcaacacgcgacctaagggctacttggccccatggctctgttatgttagggttaccattgtttcaggtcatgatttgatttccaaggataaaaacaagactccttcggtttatgtgacagctactctaggtaaagtcgctctaaaaacgaaagtttcttccggtacaaacccgtcatggaaccaagatctaatctttgttgcatcagagccgttagaaggaactgtctacattaggttaatcgacagagaagacgaacaacacgaaggatgcatagggacgttgaagaagaagctgacagagatgactccgctcaaagttccaagttccgcaccggctttgttctacgacattgaaatgccgactgaagtcaaaccggctggcgattcgaggaggttcgctagcagactcaagatgaaactagccactgatcaagcttatcacgtcgccgaggaatgcacccaatactcgagcgacaatagagcttttgtaaaagggttatggcccggtctgctcgggaaattagaaatcgggatcttgggagcaaccggtttaaagggaagcgacgagaaaaaacagactatcgacagttacgtagtggctaaatacgggaataaatgggccaggactcgaaccgtggttaatagtgtctcacccaagtggaacgagcagtattcgtgggatgtttacgagaagtgtacggtgttaacccttggaatctacgataatcgacaaatcttggaggacaagaataaggcgaacgatgttccgatcgggaaagtgaggattccattgaaccgggtacaaagtgactggatttacacttgctcgtatcctattctgaagttgggaagcagcggactgaagaagatgggagagcttcagctagcagttcgttttgtttatgttgcgcaagggtatgcacggtattcagctcctttccgttggatgttaccgaaagctcattacaaatctccattgtccatgtatcagatcgacaagttgagagcacaagctgttgagattaattgtgcgaatcttgcgagaacagagccggctttgagaagcgaagttgtgtcagatatgttgaaaccaaagagtaggaacttcagtataagaatatccaaagataattttgataggctttatacagtcgttaagatggtcttgtggtgtgtttcggtcattgcatcggtcagatccacgacagcctgtactccgaaattcattgcgcttggagtcagttttgtgtttcttttttgggagtactacatatattggttgtgacttcgtggctagttgcgtattgcattggctttgcattgtggtatacttttacggaaatcctcaagtccccgaggcaaacatataactggttgttttatcggaacgtcactccgcctcctttgattctcgtcgatttgaagctacggaaacttgactcgatcaacctagacgagttagccgaagagtttgactcgtttccgtcgtcggagaacgatttgaacattcttaggatgaggtacgataggttgaggaagattatggagaacgtcatgttattaatgggggatgctgctacacaaggcgaacggttactagcggcttttacgttgcttgagcggccattcgttttgattatcttattggccctctgttattgctccatgctcgtcgtttgccttggttgggatctacatgttcgtaagtgtttgattttcgtatttatttgctactgggtgcaactaccgtggttccgcaataatttacccgatgggagcctcaacttcttccgaagattgccgagcaacgaagacctcatgttc

SEQ ID NO: 165520 - DNA, 833 bp, Arabidopsis thaliana landsberg
ggcatgaaagggaaaaagccgtcgatagaaatagcgacctcgaatccttcacttccagaagatttggtagtgagctgcttagctcgtgtgtcgagattgtattacccgactctctccttagtctccaagagcttccgctccttgattgcttcaccagatctctacaagactcgatctctgttaggtcgcaccgagagttgtctctatctgtgcttacgatactctcctgaagataaccctcgctggttcactctctgccgaaaacctaatcgaagaaccctaagcaaggagaagaatgagtcaagtggcaatcttctggttccgatcccaatcatcaactctcctcctctggaatggtctagcatcgtcgctgttggttcacatctctacgccattaacggacctatcgaagatgctccatgctctaacgtctccttccttgactgtcgatctcacacttggctcgaagctccaagcatgcgagtggctcacaccaatagccaacttgatgggaagatgtatttagcaggaagctccgagaatgtagattctttgaactgtattcaagtgttcagcacaaagacacaaacttggaagcctgtgccgttccaaaagcggatattcggagtcggagatctggaaggaaagatttatacgatctgtaggacagagtgtggacagggtgtgactataaagccaaaggatttaacatgtgacgtggtaggattttgtggggagaaggattggtcttctgtttgtatgataggaaacatagtctattattatagacccagtggggagtttctatggatatactctggaaaaggggctct

SEQ ID NO: 165521 - DNA, 418 bp, Arabidopsis thaliana landsberg
  unsure (1)..(418): unsure at all n locations
atggagcgcaacaagaagaacgtgtgggtggggctcttcgtcctcatcggcaccgccgcgctggtgttcctggccctgcagccggcgaacctgctgacgttgagcttccagccgacctaccggctgaatgcacgcttcgacaacatcggcgggctgaagcccaaggccgcggtgaaaagcgccggcgtcgtcgtcgaccgtgtggaatccatcacgttcgacgacaagaccttccgcgcgagcgtcacactggccctggaaagcaggtatcaattccccaaggacagctcgctgaagatcctnnnnnnnnnnnnnnnnnnnnnnnnnnnnntcgggctggaacccggcgccgacgaaaagaaccnnnnnnnnnnnnnnnnnnnnnnnnnnnnnnnnnnnnnnnnnnnnnnnnnnagcc

SEQ ID NO: 165522 - DNA, 508 bp, Arabidopsis thaliana landsberg
atgcgagttttagttattgaagacgacacaacgttgggccatgccctgcaagagttcctggtggatcagggctatgcggtcgactggctgaaagatggcgaccaagtgcagggggcggtggcaggccaggcttatgggctgctgctgctggacctgaacctgccgggtatgggggggcttgaggtcttgcgccagttgcgcggcagtggccagcaggtgccggtaatgattcttaccgcgcgcgatgcgctggaagaccgtgtcgatggcctcgatgccggtgccgacgactatgtcaccaagccgttcgaactgccggaactggcggcccgcgtcagggcttttgcgcgccgcggagcgggccaggcacaacctttcatcgaggccggcccgctgcgtttcgatacggtcggccgcgaagtgcgcgtcaagggtgaacgcctggcgctgtcggtacgcgaactgtctgtacttgaaatgctcatggggcgagaggggcgtgttgtcg

SEQ ID NO: 165523 - DNA, 1594 bp, Arabidopsis thaliana landsberg
tcataatctctagtggcccgagccaaattcagacccgacgaaagagtcgccggtctctgtcacctgttcgtcgaacacttgaaaggaccagccctggattggttctcaagactcgagggaaattccgtggacagtttttaggagctatcgacgctcttcctaaaggaatattcggtgctaatcgatcttggcacattagacgccgatctgtggtcattgtctcagcagccgaatgagccacttcgagacttcctcgtaaaattctgatctaccctagccaaagtcgaaggaatcaacgacgtagcggctctctctaatctgaaaaaagcactatggtacaagtccgaatttcgaaaggagctaaacttgtccaaaccacagacaatccgagatgccttgcaccgagcctcagattacgtttcccatgaagaagaaatggaactactatcaaaaagacacgagccgcctaagcaaacgcctcgtagtgataaatctcaactcagcgctccgaaccacaaaaagggcgctcaaggcgggacattcgttcaccatgaaggacaatatttctccggagcccacaattatcaagctgatacacctcgaggacaaggacaccgtcgaggtctcatacaagaatcctacacctgtaaaaaggaccaacccgcggaaaacgagcaggaatactgccaattacataaaagctatggtcatgatacttgcacatgtgctacccttggggcaaaggtggcagctaagttcctagccggtgaaatcggtggaggcctaaccatcgaggacttagaagcagagaaagccaaaaccgagcaggtcaatgctatggcgaatcccaagcagatagtccttgcggcgaacctcgaagaacccaagagaggcagaggtaatcgcgaggtggatgacaacgaaccagaagctgcacggggaaggatcttcacaattttaggagattcagctttctgtcaagacacaacgacatctatcaaagcttatcagaggaaggccgactcaaatcgtaattcgacacgaccgtttaacggaccagatgacgaagtgacttttcatgagagcgacactaacagcttggaccgtccgcacaatgatcccttggtcattacactaactattgggtatttcaacgtcgaactgacacagggagcacactagacatcatttttatgacgaccttgcgagaaatgaagatcgacacggcacaagtcgtaccggctccacgacctgtgctcagtttttctggagagacttccatgaccctcggtaccatcaaactaccagtcctagccaaagggataacaaaaatcgttgatttctctgttacagatcagccgaccggcacaccattatcggcacgccatggctaaatcaataccaagccttcgcctggacttatcacctctgcctgaaatttcccacaagcaacggcgtgaagaaaaatgcccgaatttgcttcatggaagcacacaagcttagaaagcccgtcaccgaatcaacagccgacgcaaatcacaagaaggctaagctgggtcgagccaaagaaaaagcagtctccgagcagttatag

SEQ ID NO: 165524 - DNA, 355 bp, Arabidopsis thaliana landsberg
atgaacgctcggcacgcctccactaccggtacctcgcacctgctgctcgaccagcaactgtgcttcgcgctgtatgcggcgaacctggcgatgggcaaggtctatcgcaagctgctcgccacgctggaactcacctatccgcagtacctggtgatgctggtgctgtgggagcgcgacgagctcaccgtctccgacatcggcgagcgcctgcacctggactccgccacgctcacgccattgctcaagcgcctgcaggccaatggcctgctcgaccgcgtgcgctcgaccgccgacgaacgccaaatggtgatcagcctgaccgccgaaggccgcgcgctgaaaaagcgggccgccg

SEQ ID NO: 165525 - DNA, 892 bp, Arabidopsis thaliana landsberg
gatggccatataaggtgatcttgttgctgcttatctgcagaaacatctcttctctaatatccttaaagatgtaagctttattaaagattgttgcttttttgtgtgtgtgttatgtatgtttagtatgtgtgatgatagtttgatgtttacttctagggagagttcttggttgatcctcgaagagcaattgcgaaagcttatgagaatacagatcaaaagattttagcagataatagaacggatttagagagtggtggttcgactgctgtgactgcgattttgatcaatgggaaagctttgtggatagctaatgttggtgattcacgagctattgtttctagtcgaggtaaagcaaaacagatgagtgttgatcatgatcctgatgatgatactgagaggagtatgattgagagtaaaggtggatttgtgaccaacagaccaggttaagagcagcttttagtgatctttcattatataaggttattagatataaggatgattctgatgtttgtgaattgaacaggtgatgttcctcgagtgaacggtttgttagcggtctctcgtgtctttggagataaaaaccttaaagcatatttgaactcagagcctgagattaaggacgtaaccattgatagtcacacagattttcttattctggctagtgacggtatttcgaaggtaaagttgcgaattgtagtctggatttgagtaaaggataaatggtgtttattgaagtgagtttttggttgaacaggtgatgtcaaaccaagaagcagttgatgtagctaagaagttgaaagatccaaaggaagcggcgaggcaagtagttgctgaagcattgaaaagaaacagcaaggatgacatatcttgcattgttgtccggtttagatga

SEQ ID NO: 165526 - DNA, 1431 bp, Arabidopsis thaliana landsberg
ctttcaagctgtttagtgcaaaatccatggctaatcaaaggcagactcatgtgcaacagatgtcgatggcagcaaatgctagaagaaaaaagctgctggatgatgatgtgattatctgtttggctgacagttcctgggaaattctagatgttagcggttcagatgttacgaattttggcttagctaaagtggcagaaatctgcaaatctctccgagctgtggacattaggtattatagttgcttgctaagaatttagtatgctttctctatgttttctgtataagctgtttcctttgagatgggaacaagataagctagccacacatatgtctgattgtgttgggtatcgtttgagttttgcaacctgggatagtttatttacttgtagctctggtcttgctggatctttagtttggggcttctgtatgctggatgggtggtgctcgttagctctcaagtatcatataatttgccttattttgttatgcagccggtgcaacaaaatctcatccatgggcgtcttagagcttgtacaacactgcagatcattggagactcttagatgcgggtatattttacttctctagctaactgcagtgaactggcttttagtgtgttgttgttggggtggcttgtctttttgtttatgacttagtaagtgatcatttgggtaaagtaagatagaattgaacccagtgtgtgggtttgcctagggctaccaaactttataaaacaggcaatgagagaaaatttaatattgcaggggatgcccaagcagtgagtccacggcacgcagatctttgagtatttttaagccaaacttgagtaatgttgaaggagaaacatgggaagaaatagacacttcagagattggccatggtggtcaatcattgcgttggcttgtttgggtatgtatcgtccctctgacagactgactaataagctaccagtaaacaaaagaatctactttctccatctgtgtctcttgccactcagtgtactcatttaatttgctttttctgcagccacgaattgataaggattcactggagatgttatcctcggagtgtccaagaatagtggtaaatcccaagccatcacttgtcgcgtacagagcagacgaggttcctcgagaagcactaccagatgttgcactggacgaaccatttgtcaaagatattgatcctaagacgtgggttgttactggagttgtgcagaagcccacatctttcccgttaagcaatgaactgtcaatagcagagaagttcagactagcatttgcagagagagatgcaagaatggcccctaaacgtgcaaagaatgcaaggcaacgtcaacgtcgtgctgagagggattggatgatgtcaagcgacgaagccaaagcaatggtttttgcatcaaaggctaccagatctttgcacaagagttaa

SEQ ID NO: 165527 - DNA, 453 bp, Arabidopsis thaliana landsberg
atcatcaccagaaaatcgctaccgaagccatcgtcaccattgtactattctattctgctgctagattttgaaaattgaaacttcagatgatgtcatctcgtttaatgatttttgtctgggttccatgtatagtatcttaatgtttagttttcttagatcaatatatatttgtacttatcttttcgttaccgcaccgccattgtcgtcgccatcgccactgacaccgccattgttgccatcaccaccagcaccgccactgttgtcgtcaccatcgccaccggcaccgccactgttgtctcactatcgtcaccggcaccgccactgttatcatcactattaccatcggcaccgccactgttgtcgtcaccatcaccatcggtactgtcattgttactattaccatcatcgccatcttcgccaccatcacgctagccaacacttttctctttttat

SEQ ID NO: 165528 - DNA, 1851 bp, Arabidopsis thaliana landsberg
  unsure (1)..(1851): unsure at all n locations
atgaaaaaacccaaattgtcgaaagtggaaaaaatcgacaagattgatctgttctcttcactatggaagcagagatcggttcgtgtaataatggcaatagggtttctctatcttataattgtctcagtagagatacctctcgttttcaaatcctggtccagcagctccgtgcctcttgatgctctttcccgactcgagaagctcaatagcgagcaagagccccaagtcgagattatccctaatcctccattgaagccagtttcgtacccggtttcgaacccgaccattattaaccggacggaccttgttctgaacaaggtccgtgaacatcatcggggtcttctctcaagtttgagatttgattcggaaactttcgacccgagtagtaaagacgggtcagtggagcttcacaagtcagctaaggaagcttggcagctaggtcgcaagctatggaaggagcttgaatctggaaggcttgagaaactagtggagaagccagagaagaacaaaccagattcatgtccacattctgtttcgttaaccgggtctgaatttatgaaccgtgagaacaaattgatggagctgccgtgtggtttgacattgggctcacacataactttggtggggaggccgaggaaagctcatcccaaggaaggagattggtctaagttagtgtctcagtttgtgatagagcttcaaggtttgaagactgttgaaggagaggatcctcctaggattctgcatttcaatccgaggcttaagggagattggagcaaaaaaccggtgattgagcagaatagttgctataggatgcaatggggacctgcacaacgttgcgaaggatggaagtcaagagatgatgaagagactggtgagtgtagatatgttcaaaagcatttatctttcatctgttgtttttcttggtgtttttgttggggatactaattagtaagaatggttgtagttgatggtcaggttaagtgcgagaaatgggctcgggatgatagcattacatctaaagaagaagagtctagcaaggcggcttcatggtggcttagtcgattaataggtcggagcaagaaagtaactgttgaatggccatttccattcacagttgacaagcttttcgtgcttactcttagtgctggattggaaggctaccatgttagtgtcgatgggaagcatgtcacttcctttccataccgaactgtaagtgatgttttgccctggcttaaacatgttgtggtttgattagtgattggtgtgaactgatggttgtctatgtgcgtggttttttggcaatatatgaagggatttacgcttgaggatgctactggtctaaccattaacggggacatagatgttcactctgttttcgctggctctctcccaacctcgcatcctagtttttctcctcagaggcatcttgagctctcgagcaattggcaagccccatcacttcctgatgagcaagttgatatgttcattggtatcctttctgctggtaaccattttgctgagaggatggctgtgaggaggtcgtggatgcaacataaactcgttaaatcttccaaagtagtggctcggttctttgttgcactggtaagtttagactaatttacaagtgatctgatcttggtcttctaggttaannnnnnnnnnnnnnnnnnnnnnnnnnnnnnnctaaactcagatgtttatttgggcagcactcaaggaaagaagtaaatgtggagctaaagaaggaagctgaattctttggggacatagatatagtcccttacatggacagttatgaccttgtcgtccacaaaaaagttgcaatttgcgagtacggggtgagtcccgctg

SEQ ID NO: 165529 - DNA, 1440 bp, Arabidopsis thaliana landsberg
aaggtttaaattatctacctaagaaacttagattaatagaatgggactattttccgataaagagtttgccttcaaacttttctacaacgtacctagtcaacctacatatgcgaaaaagcaaacttgagaagttatgggaaggaaaacaggtacataattattttcaatatggttttttttttcatcaaaaggagtgctctaaatactagtaattgtgtttccttatgctgtctttttttgtttgtccagccacttggtaacctgaagtggatgaatttaagtaactcgagaaacctaaaggagctacctgatctctcaacagctactaaacttcaagatttgaatctcactagatgctccagcttggtggagattcctttctctattggaaacaccactaatcttgagaaactgaatcttgtaatgtgcactagcttggtggagctgccctcctctataggaagccttcataaattgcgggagttgagattacgaggatgctcaaagctagaggttcttcccaccaacatcagcttggaatctctcgataaccttgatatcactgattgctcactcttgaaaagttttcctgatatctccacaaacattaagcatctcagcctcgcgagaactgcaattaatgaagtgccgtcgaggatcaagtcatggtctcgtcttcgttactttgtagtgtcatacaatgaaaacctcaaggaatctccgcacgctcttgataccatcacaatgttgtcgtctaacgatacaaaaatgcaagaattacctcggtgggtcaagaaaatctctcgtcttgagacgcttatgctagagggatgcaaaaacctggtaacactcccagaacttccggattccttatcaaacataggggtaataaattgcgagtcactagagaggcttgattgttccttctacaaacatccaaatatgtttatcgggtttgttaactgcttgaagctgaataaagaagcgagagaactcatccagaccagtagtagcacttgttcgatcttacccggaagacgagtgccttcaaacttcacttaccgaaaaactggaggttccgtgcttgtcaatttgaatcaaagtcctctttctacaaccttggtgtttaaggcttgtgtcttgctggttaataaagatgataagaaaaaggaggccaatggtacgtcatttcaggtatattatcgtataatggacaaacacaaattgggtgttattgttccatggagatctgcacacggctttgttgtgcctccaattttggcggagcatttgctaacctttgaacttgaagcggatgtgaaaaccaacgagtttttcctcgagttcgaagtcaaccgttacgaagtggtgataaaagaatgtggagtactccaactctaagtccttccatttttttggaagactggttgggacgcactt

SEQ ID NO: 165530 - DNA, 1064 bp, Arabidopsis thaliana landsberg
cttgccacgagaaaataaatgatcttgataaatggatcaaacctcctgtggttctcatgcataatatgagcgattaagagcttctttggggtgcatctttcatgcctcggaggaaagagtacccgtttaatcgggtccctaaaatcgcgtttatgttcttgacaatgggtcctttgcctcttgcaccgctttgggagaggttattaaagggtcatgagaagctttactcagtttatatccattcacctgtatcttcttcagctaagtttccagcttcctctgttttctaccgtaggcatataccaagtcaggtaatagctcttaatctaccttgcaagatttgtaggaaaacttgtgattcattgactagttggtaacttgtttttatatctaatttttattggattatcttcaccattgggcaggttgcagaatggggaagaatgacaatgtgcgatgcagagaggcggcttcttgcaaatgcgctactcgatatctcaaacgaatggtttgttctcctctccgagtcatgcattcccctattcaacttcacaactatctacacgtacatgaccaaatcagagcatagctttatgggttcatttgatgatcctggtgcatatggccgaggccgctaccacggcaacatggcccctgaagttttcatagaccaatggagaaaagggtctcaatggtttgagattaaccgggagcttgcggtttccattgtcaaagatacattatattaccctaaattcaaagagttttgtcaacctgcttgttatgtggacgagcattatttcccaacaatgttgacaattgagaaaccggccgccttggctaaccgaagtgtgacttgggtcgactggtcgagaggtggtgcccacccagctacatttggagcacaagacatcaatgaggagttctttgccagaattctcaaaggtgacaactgcacttacaatggtggctacacatccatgtgttatctctttgctagaaagttttctcctagtgctttggagcctttggttcaaattgcacccaaacttttgagttcttga

SEQ ID NO: 165531 - DNA, 471 bp, Arabidopsis thaliana landsberg
atggaaccgatcgagtacaatgtatgtgagacttctaaatgtaactcccacgtcgacgaccatggatggaagaaagtcgtgtcctcgaagagcattcggaagcgaaaaccagcggatcaggcggccagtggaaaccaacctaccggtgaggacgttttccgttcatttgaggagaaaaatgctaatgtggaggtgaggaatgaaaatctgaaggcgaaggaaagtaaaaagtcaaaacccaaagaaagagatgaagcctatagtgtctatcgatccttcagatcttgcggcttacctcctcgaaatgatcggtaagtcagtcgatgcatgcgatgtgtaactctcatctagatggataatccatatatcaaaattcattttttctccgctaaataaaaactatcatattttgtttgttaagtttggttatagaaaaaatatgcgtttgagttggaggtccgttgtctcttt

SEQ ID NO: 165532 - DNA, 1011 bp, Arabidopsis thaliana landsberg
gatgcaaccgataggtctcttttataacatcaagaggtacacatgataacagggagggatgtcacctgatgttatcaccagagggtttgtagcatcagaggaggagtttctcggcttagtgcaggagcaatggaagaccaagccacagattgcttctgtgggagcttgttgtttggttggtattgtttgtaatggattgttgtatgttgcaaacgcaggagattctcgggttgtgttagggaaagtcgcaaatccgtttaaagagttgaaagctgttcagttatcaacagagcataatgcaagtatcgaatctgtgagagaggagttacgtttgttgcatcctgatgatccgaatatcgtggtcttgaaacacaaagtttggcgtgttaaagggattatacaggtctcaagatccattggtgacgcataccttaaaagagcggagtttaatcaagaaccgctactacctaagtttagggttccagaacgttttgaaaagccgatcatgagagcggaaccgactataacagttcataagattcatccggaagatcagtttcttatatttgcctcggatggtttatgggagcatctaagcaaccaggaagctgttgatattgtcaattcttgtccacgcaatgtaagacatatcacaacactcttcttgtcttgtttttttgtctggtttgaattggttttgttgtttgttgaatttgtggtgtcttgttgattctttcagggtgtggctcggaagttagtgaaagctgcattacaagaagcagcaaagaagagagagatgaggtattctgatttggagaagatagaacgtggcattcggcgacactttcacgacgatattaccgttattgttgtcttcctccacgctacaaacttcgctactcgaactccgatctctgtcaaaggaggtggtctcctctcagcccataatcccgttttatagatcattttttttctccttatttgaaccagaatttgattttgtttgcttct

SEQ ID NO: 165533 - DNA, 1875 bp, Arabidopsis thaliana landsberg
  unsure (1)..(1875): unsure at all n locations
agccgtgtccaaaatgtcccacgaaaactaatttgaatgttttgctttcttcttcttatttacttactatctggtagtgacacagatggatcatctttgtttttttgtttacaccaatgcagttccgtttatcgttgttcgacatgaatgcttcttcgacttcgaagaaggttggttgtgatgatgatttttgctctttcatttcgcaatcggatagctgtcaannnnnnnnnnnnnnnnnnnnnnnnnnnnnnnnnnnnnnnnnnnncacaagtgatggaaagtttataagggacatgttaacacttgaacaagttactggagatcttaaaactggaccacttggtcaagaagttgtattcgggtgagctttaatatcttccttatcttttgtttgtggtttgtgatttattttttctcataagggcttttctttgagaaaggtgtggaagtgatcaatctggacaacttgggaatggtgagtcagcagttgatggtgttatgggatttggacaatcaaatacctctgtcctttcacaactagctgccacgggcgatgcgaaaagagttttttcgcattgcttggataatgttaaaggaggtgggatttttgctgttggtgtagtggattctccaaaagttaaaacgactcctatggtacctaatcagtaagtgatatgtcttctcaagtcatttattctttacatcaagaagttagagtaggagtagtttctgttgtatgaccgctaacatgtgttgctcaacaattttaggatgcattacaatgtaatgttgatgggaatggatgtggatggaacttctcttgaccttccacgaagtattgtgaggaacggaggaaccattgttgatagtggtacaactttggcttactttccaaaggttctttatgactccttaatagaaacggtaactttctctgctcatattcatattagtgcatgtttatttctagtttgtgtgaatatcacaatcctgacatgagattttcttgtgtagattcttgctcgtcaacctgtaaaacttcacatagtagaggagaccttccaatgttttagctttagtacaaagtaagactttccctaccgtgtttatttccaaaccattcttcttttagatacctataaagcaagcctttcttaagtattatgcatcattcattacctatatatgctaagctcttcctccttaaactcgcagcgtggatgaggcgttcccaccagtaagttttgagtttgaggactctgtcaaactaaccgtttatccgcatgattatcttttcacacttgaggtaagtcaatagaacagaaactttgcttgcgagatttcaacaaaacgtttcgagatgtttcgagtttcgatgatggaaattgtctctttatttttgctaacaggaagagttgtactgctttggttggcaagctggtggactgacaactgatgaaagatcagaagtcattctcttaggaggtaaagttcaaaattctaataaaatatttctttccatatcactcactctagaagatagtcatttcgcttatctttttgtagatttggtgctctcgaacaagttagtagtatacgatctggataacgaggtgatcggatgggcagatcataactgtaagtatctctagaacccaaaaaagtagcaaactctgcatcctttctttctcatacaaacaaatgcttttcatgttttaaggttcatcaagcatcaaaataaaagacggatcaggaggtgtttactcggtcggcgcagacaatctctcatcggctcctcgtttgttgatgatcacaaagcttcttacaattttgtcaccattgatcgtaatggcttttacttccttagcatag

SEQ ID NO: 165534 - DNA, 3568 bp, Arabidopsis thaliana landsberg
ttcgagggcgtacttgccttgttagattgttatacttatatgagatatgctatgaggttgtgaataaatccttgctatattatgtatatatattgatacgtgatttggtatttgattttctatacttgtttggggcatggtaaactacttatatatagttctgcatgaggttattgtttccaagtggtattcatggtttacccgataccatcatgcttagagtaagctgttgccttcctttttgtgttgtgattgtgtctgtaagtcttgatcctgagtggtcacttacatgatggcacaaaactcggagcgtatgccgggtaatgcatgacgatgcattaaaatgatgttctggttataagcctttgtggctatagctcgggtgttcacaattgtgtgtgtggtaacatacatgtggtgtgggtgtgcacgtacgtgtggtgtgggtgtgcatacgtgtgaagaacacgtatacacgcatgcgggagtttgtgctgatgttgtggtgcacttttttggtaaggttggcagtatgctgggcccaaggttcatccatttgtctagtttggttgcatgttctggtattattataagtatttgataatacgtttattacgtactctatgatctctgatggataagtttacctattaagttgattaaaccttagaaatttatttgtgcatagacccagctcactgagtaatcttagattactcatgattctacttatcgtacatgtaaccatagtgggatgaccatagcgggaagacaaacactagaaaatgccagaaataggatgttttacgttgcttctgcaaaattacttgttttatgtaaatttgaacaaggatccgatataaagatatatttttcgggtaactctttgccaagtatatgctatatactatgcataaagcgttttcttaaaggcagccgagtgtttaatgatataagacctagtccgggtcgctcatctccagaatatctcgagggttggcaagcctaagtggtgttcctagtgggaggagggtcgattataatttggtttaggaactggattcatctggaacctctactaagttgtgatcgatcatcttcactgtagcgtaatagggtcgcccgtggcttgtccgaccatagggcgattcgggggtattacaggcagcctctcacttccgctcactttctcttccgaaaacaattggcgcgagttgagcttatataggcaaggaaatggcgagtcagcgcatgggcgagtcaccaatccacgggtcatccgcccgagatgacacacgcgccgttctagaggatgagcgacacgtggccacccaaacttcagctccacgcagctcaaatttggctacaggtaactttgcttgggccccaagttagccgagccacgcgtccttggcgcggtcaaaggtcggtcaacttccccaactttgcttgggccccattcttgcccaaacttacccatctttgccctttgatagtctattatgttttgggcacttaacgtcaattggccatgtattcaggcaattgtttaaaattcaaactcttgcccgtggtcgatgtccttacgcgggtcagtataacgtcagtctgcgtctaccgagcggggacatgtcgtgcagataatccccccagcgcttctttaccttgtacgaggggttcttctaccattccttcttatggctcccgttcctaaggctggttgtagagtatgtgacgtcttatcaaatcgccctctctcagattacgacgcggtctctaaggcatttgctcgagattttaatacagagttataaaacttcctgagaaacttcctagagatccgacgagttcccaaatccagggtggatcggtactacatttctcctacaaagaacaagaaaattattgatgggttcccaagcaaggatgaaccttacattaaccacttcttcttcgtggccctcgaatatgctgttcacgacgacttcctcgggacagttctgacgagatggggaactttgggtagttgtgactaaaatattgtttgtgcccgaagtgacttttatgaatgtgctaattgtgtttttcttggttgcagaacgcactaatctgattcctcgaaccgattccagaggacttcattttggcctatcacgcattatcagctaggaagtgcgactggttgaagcactttttccgagatcaaattcaccaagcgtttcgattgtttcacggtgttccttgcccttccagctctaagtattcagatcatcgcactcaattcttcgtggatatgcagtcaaccatacttactctgaggaaggtctacacgaagccgaaagaagataaagagaggcttctggccgaggagaaacattttgccgaggcgggtttgttctcaccgtgggattcccccgatgcggctcaaaaccgggatgttattcccaaggcgacattaccgattgcattggggtctgccgaggcgtgagaggccaatccgcttacctctgcgcctgtacctaaggtagtcgttgcactgccggcgagtgacaagttggcggacaagcgtattcgaatggacgactcggcggcgaaaaagaagaagaacaagaagaagaaaccctcgagcgacgaggcggagtgggagcttccgatctttgaagatcgagtggcctatgcaaatctgcttgggggctgcgttggtcctttgctccctcctccagatactcttcttgagtcgcggaagtttgccgagacggtgtctcacttcttccaggtacgtgcattcttttttcttctcctcgtgtgtcgtttaggttctgatcccataaaatttgcttttgcctactcttcaggccgtcgcgttgattaaccggatggagcattcaaacgactcggccatgcagacttatatggaggaggtcaataagttggctgaggctgagtttcgagcgtagactgccgagtgggagagagatgaggcgctttcaaagccaccgcggtgaacccggcgaaggaggaggcctagagagaggcctttgtgaacaaagagaatgtcgtcagaatggccaagctcaatcttaagacggattctgaggttgtccgtcttaagcgaatgctggccgaggcgagaggactctacgacaatgaggtggctcgggccgcccaaacggtgaagcgtgaaacttcggaagtttttatcaccaaacttaaggtcgccgaggagaagatatcgctgctcctgggagttaacgatcaattcatttacctgtcccaggtgcgggctaatgcgcaactgatcatggcctttgagcatggtggggctctggcgaccgagaagcatcaggtcgaagaatggttgaaagatttcaccgatgctgaggctaatctaaatcgtttcatcaccgacctaaaagagaatctcaaggctcctgctcccgagcctactcctcttactcccggtggacatagcccggttgaggctcttgctgacgagatgggggtcaccgatcagtctgggtcgcttgtgccagccgagggagttcaccgatctgaagagctggattag

SEQ ID NO: 165535 - DNA, 660 bp, Arabidopsis thaliana landsberg
atggcttctacatttcttcaaggccatactcaaaaactcacccttcctttatctcatttcacttccacacataaaccaactcttagattccaaaacatatatattggtttcccctccaatggaggtcaaagccgccgtttgatcatcagatcaccaatcacggtcgccaaatcaaacagcaagaatgattctcacgatgataaaaagcaattaaggccattgaaaatggcggcgggagcatccctagcactagcttgcgccataagtatctttggctttaagataaataatatgagctacactgccgcggcagctgcctatccaagctctgccgacatgatcatatccgggaagccgacttcagccgcatccgctacttccggtatgtatcctttcccagctaaattcgcattgcggtctctctttgaagttagctcaatgcttgcttcggctaaacccattccttctcaaaaaccattcaatcttcacaagctcccttctttgccttcaaaggacgatattgactccatcaaggtacaatctgcaaacatataaatatttgttcaaatagtttagtgtcacgtgagatcttgaacctttaagactagctaggagtattgttgaaccactaccaacagctggattattcgggtttgcttt

SEQ ID NO: 165536 - DNA, 1297 bp, Arabidopsis thaliana landsberg
gtggatgtgaagctggtttatagcaacggatatgctttcgatgtattaccaagaggagctggcaaacaaggtgctttgacatatctacttgacaagttggatattgaaggcaagcagccttctaacacacttgtttgtggtgactctggaaatgatgctgagcttttcaacatttctgacgtatatggcgtaatggttagttcccaactgcttttttttaggttcgatcatacttgactacgcgtgagtgattgtgcttatatttttactgtttaaggtaagcaatgctcaagaagagttgttggaatggtatgctgaaaatgcgaaagacaatgcaaatataatccatgcgagtgagaggtgtgcgggtgggattatacaagccattcagaggtttaatttgggaccaaatgtctctccagagatgttatggaaactgaaaatttcatggggaaagtttgaatcctgctcatgaggttgttcagttttatttgttttatgagagatggcgttgtggagaggtggaaaagtctgacaagtacttgcagaatttgaaatcgctctctgtaagtgtgtttatttgacaaaaaaagctctctagcgtctaacgtaatggaattcaagtgctcaaattgatatttttgaagatgttcttgattgcttgtgttgtgtagacttattagttgacgtaattgttatgcttttgcaatgtttcagagtccacttggtatttttgttcatccgtctggagtggagaaacctatacatgaatggatagatgagatggaaaatttatacggtgatgggaaggaaaagaagtttcgcatttggttggataatgttacgtcttctcatatcagttcagatacatggcttgcaaaatttgtaaagcatgagttatctggtaagaaatcttgttcttcaattacatggcttatacttgtgacttatcgagctaggaaatgatttagcagaaaatacgatcaactgatttgtttgatttctcatcataagggtatactgtagaagtttgcttccatgttctaatgtctagctcgtgtttacagagggaaaagtacggtcttgttcaacaaaagtcttactgagttataaggtaaaccttgatttatgatccttttaagatttcaaacgattagattggttaaataatattggaaaaaaataactgaaaatgggttaaaattgaaaggaggaaaagcaaaggctgacgtggatgcacatccaccaatcatggttagatgaatcttcttcagatgatcaagaaaaatggattttc

SEQ ID NO: 165537 - DNA, 465 bp, Arabidopsis thaliana landsberg
gaagtcctcctcgccgcccaagaccgcggctcccgccgctgccgcgcccaagaaggtgccggccaattcgaacaagaaccgcgaattcaagaccaacgatcacgtcgtctatcccacccatggcgtgggcaaggtgtccggcgtcgtcgagcaggaagtcgccggctacaagctggaactgttcatcatcgaattcgagaaggacaagatgaccctgcgcgttccggtcaacaaggccaagtcggtgggcatgcgcaagctgtcttcgcccgaagtggtcggcaatgcactgaacacgctcaagggccgcgcccgcatcaagcgcaccatgtggtcgcgccgcgcccaggaatatgaagccaagatcgactcgggcgacctggtctcgatccccgaagtggtgcgcgacctgcacaacagccgacggccagccggaacagtcctattccgagcgccaattgtatt

SEQ ID NO: 165538 - DNA, 569 bp, Arabidopsis thaliana landsberg
  unsure (1)..(569): unsure at all n locations
taattagtatttaatttggtgaaaacacttcaaaagacaccgaggagagggtcatctccatcatcatcatttcatcatcctcatcaacatcatcatcatccataaggatgaagaagtacaagggagtgagaatgagaagttggggttcatgggtttcagagatcagagctcctaatcaaaagacaaggatctggcttggttcttactcaactgctgaagccgcggctagagcctacgacgcagcactcctatgtcttaaaggatcctcagctaataatctcaacttcccagagatctcaacttctctctaccatattatcaacaatggtgataacaacaatgacatgtcccctaagtctatacaaagagtagcagctgcagctgctgctgccaacacagatccttcctcatcatcagtctctacttcatctccattgctttcctctccatctgaagatctctatgatgttgtctccatgtcacagtatgaccaacacgtctccttgtctgaatcatcatcatggtacaactgctntgatggtgatgatcagttcatgttcattaatgga

SEQ ID NO: 165539 - DNA, 1445 bp, Arabidopsis thaliana landsberg
atggagctgagagccacggtggagaatcgaattcgatactctacaaaacacattaaacacttgccacctggctcaatcactgagtttgattggaaggattactgtcccgttggtttcgggtacgtacgtaataacatagtttcatgttttaaggtaaaaaaaagaagagaattggtttttgtaatgttttttttgttgttgtttgtagacttattcaagaacttgagggtatagatcatgatgattacttgctatccatttgcactgatgagactctcaagaagatttcttctgggaaaattggaaatgtctttcatatttccaatgataaccgttttctcatcaagattcttcgaaaatccgaaattaaggtaccccaaaatcatcttaacacaatctacttttaattttttcaagtgtgtatatatgttccatattgagtctttcattgaaaacaatcttgtgaaggtgacactagagatgcttccacgttactacagacatattaattatcacagatcatcactattcacaaggatttttggtgctcattctgtgaagcctcttggaggtgttaaggtgacaaggattatatatatataccactccattattagagtttgatcagccactaattagttactttttttcttggaaacagacatattttgctgtgatgtcaaacatgctacattcaacgatctttgtgaacaagctctatgatcttaaaggttctccgaaaggtcgatctaacaagaaaattgaagtgagaaacaccactgttttgaaggacatcgatttcgatttctgtttctacgttgatcctttggcgagacaacgcatcatcaagtactatcccacccccacccctctttctttctaccatcttgattctagttactcaacaatttattaaacacaaaaggggtcatgtcattacaggcaaacaaagctagattgcgagcttttggaagaagaaggtataatggattatagcttattggttggtttacaatctaaaggctcatgtcaaggtaatgtttcttctctcttcttaggagtgcaactatttgcatatcgactttgaacttttctgatcataataataaatcactcctaacaggttcatttgatggattgaacccggtttacggtagcttcgcacctccaagtaaaaaatccttaccaatattcttcatttttttcttttatgttcttatataccaagtcttcaacataaaccgattaaatttttcaggctcgttcaaaagcaatagcacaaagtcgatgaagacggcttctagttctcctgatagatcttctgtagcaatgtattcatgctctcccgatagaggtaacaatgtaactttttaatctaattaatcatagtacttaacaaaaattataatttttataaacttattgtcttactaacatagtcagtc

SEQ ID NO: 165540 - DNA, 889 bp, Arabidopsis thaliana landsberg
atgaagttctcaatctcatcactgaagcaggtacaaccaatcttgtgcttcaagaacaagctatctaaggtcaacgtcaactcttttctccatcccaaagaaaaagtcatctttgtgatgggagctaccggatcgggtaagtctcgtctcgccatcgacctagcaactcgttttcaaggagagatcataaactccgacaagattcaactttacaagggcctagacgtcctaacaaacaaagtcacccctaaagaatgccgaggcgtgcctcaccacttgcttggagtattcgactccgaagccggaaacctaacggccacccagtatagccgccttgcgtcacaagcaatctcgaaactctcagcgaacaacaagcttcccatagtagccggtggatcaaactcttacatcgaagcacttgttaatcattcctcggggtttttattaaacaactacgattgttgtttcatttgggtcgacgtttccttacccgtacttaactcctttgtctcaaaacgtgtcgaccgcatgatggaagcaggattactcgaagaagtaagagaagtgttcaatccaaaagcgaattactccgtagggataccgacgagctatcggagtccccgagctccatgaatatttacgtaacgaatctctagtggaccgtgccacaaaaagtaaaatgcttgacgtagccgttaaaaatatcaaaaagaacactgagattttagcttgtcgacagttaaaaaagattcaacggcttcacaagaagtggaagatgtctatgcatcgtgttatcgccactgaggtgttcttgaacacgcaacgtagaagaacaagacgaggcttgggagaatcttgtagcgagaccaagcgagagaatcgtcgataa

SEQ ID NO: 165541 - DNA, 3574 bp, Arabidopsis thaliana landsberg
atgcctaatattgtagaggctgatgttgatgtcgcttatggtcatccagggaaagttctgagttctattacttcagtcaagcatctcactttatgtataacatcctcaaaggtaataatctacttaactatacaagcttgtttgtacttttctaccatctgtatccttaattttattttcacaatcaactattgaaaaacgactaattcactctgtattaattccagcatcagaaagagtactatattctgtgagcttaaaacttgttgccactaacattgattgtgtactatattctgtctcgtattgcaggatgcatatcctgtgggtagtatcttcggctgtcttgtttttctaaatatatgcactttggaaatagagtggttgaatctacttatgtctgttctcagagatgcacctattttacgagctctcaaacttgaacaggtatatatatattctagtttctttggttcagtatatatatgttgatctaatgcactatacttctatcacgtcaatttatagagccatagttgtccgggtccccaaccacgcccgtgttggagtgaaccgagttcagtccccgaatgtgtgacatcgagtcttgaaactctcaaatggacagaatatgaaggaggaggagaagagaaagaagtaataggattcatcttaagaaacggaagctgtttaaagaaggtaagcatctcttctaattccacagaccgcgacaagaaatttgagatgatcaaggagttggcatttttgtcaaggcgttcacctacctgtcatcttacattcgagtgaagtaattgtggtcaagcaacatctatcagaaattcttatgtttttcttttccaatttgagctctttgaatttgttatgtagctttctctacatctttactaagacataaataaatattatatctttcattggtttatatccatgattatcatcttgctcttgtggtttttgccccatttcttgtgtcaatcactaaatgaatagtgacggtgcacatggagtgccaacgatttttgaggcttaggacgaaaataaaatttggtccaatttatgatttatctagtcaaataataaattacaagaaaactaaaatataaacaaagaagaacatgttcatatataaaaagaaaacaattctaagccaagtgttcaaatgatatatttgaataaatgttattaaaatggatcatatttgaagcataaggcatatttgggataacttaaaccaacaaaatatagtttgaattgtggcctaaaaacttgatttattactggcttggggcatttgctcttttttttttgtagctctgagcacgaaaacatctgtagacatgcaaaaataaaactgaaacaatatccattatatgcaaaaattaatactatcagaaacaatatttaataattatctacggagaaaaaggaaataaaacaaaatatttttgttattaagaccatctcgccgtcgtcctcaagtttctattagggtttatagaccagggaacagactaaggtattgcctcccgatcacttgtgatcttttcttactattcgctttttgaaacgaatcacttcgtatttaagatcatttctttgtttcacttccatcgtcatccaatatctctaatgcatatgtgaatcgtctggttccttttcatgtgtaggttactcgagaaagcattaagattccttttgtcttgagctagcattcgtctctggtttccgaaatataattaatggatagaatcagtcacttacctgacgatgtcctattgaagattttgtcatttcttcagagaaaagatgttgcgcgaactacctttttttctaaacgctttaagactctctggatgtttgtaccaagacttgagtttgatgataccactcactttcccaaacctcggtctgtgagaactccagagcctgattatagaatatttcggcagtttgtggacagatctttgatgtcattcgaaggccaggttctacaaagtctgtatctcaaattaggtggacgattcacagatgaagatattttgatttgggttagaagcgctttgaaacgtggtctagtggagctgaaactcgaatacttatactactcgcaccctagcgctattcttccaaaaagtctatatagaacttgtgaaacccttgtggtcttaaaacttgtatcggtttttttagttgttcctgaccttgtttgtctaaggtctctcaaaacattatctctcgaagatgtacttaactctaacccgcattctctacttagacttttacccaattgtcctgttcttgaagacctgttcatacaacaaaaacacttctcaattcccaaattggttttccagattgtagtgccttccttgaagagattatctttgacttattatggaatcagggaacttgagatagatgctccttctttgaaatacctgcacattaatttactctctaacagagtgtacggttgtacggttggagctatgtatttgcatgacagagtggttgaatctacttatgcgtcttctcaaagatttgcctaaactaagatttctcaaactagaagaggtacattaatttactctctaacactaaaatgatatcatataaccatttcaatttttgttcagttttgatgagcgcaatgcgcgcgactaactaatactttgctcccttttgtgtcttaattagtaccatcatattcgaactggacatatatggccgttgtggagtgaaccaaattatgttcccaaatgtctctcgttaagtctcgagactttcgtatggatgccataccaaggaagagaagtagagcaccaagttgctagatacatcttaggaaactctagtcgtttaaaggcggcaaccttctatcacaaatcaatagatcctgaagagaaacttgcgatgctcatggagttgtcattaatgttacgtaggagttcaacatgcgagattgcattcaaagatatggctgaacttccacagtatagcggcggtataagtaaagattggttgtttcgctgatagacttgttgccattgttggtttcttcttatagccttatttaatggcatatatgcaatttctgttctaaaattctccatctagatacagattagatggatttggatttgaaaagtattagagttttacgaagccatccaaaaaaaaaaaaaaaaaaaaaagagtttgattgagatacttactctgtttttactctcttctgaaaattacagttcgcaacaggcaatggttccagtgtagagcacgatgctctcgatgtttgatgcggtttcatagtcatcaacatattggtaacaggagagatctgatcacacggaggtatgataagtgagatcatgctatagttcgtttcaagtgcttttatcagcttattaatctttcatatctctatgttcgtgaatcttgtcgtcatcatcatgattgcctcccatttttatcaaaaagagaaaaactgcaacaaccaataagcataattaataccaaaatattgaaccactaatggatcaattcaacgaactta

SEQ ID NO: 165542 - DNA, 726 bp, Arabidopsis thaliana landsberg
agagaaagtaggagggcctgcgatgatacttacttttatctgtctcacgttcacagcacgctaacctgggcagtgtgacgaaaaccggagttgctctcacgggaagtgctgcaatggggaagattggactaacgattgggttggttgatcttgctgaatccgaagactcatattactttcgtgttgcattgcctggtgtttcaagggatgagagtaagccttaccacctctccatatctttgtgaagtttccaaatgacatgccaaattatcatttctaaagctagttaaagatatttgttcattcagagcaaatattatttgcacatagatttgagaagtttcagccttgtgtaataagtgtgttaactcaattatttccttgcacacggttaataagcgtgtttatgaggtgctttgagctttgtttcgtgtgcttttacttgtcttctgctgaatctgacttgttaaatatgcagaggaattcagctgcgaaatagaaccagacggtaagattatgataaagggagcaacaacgacgggggagcagacagtttgcaaacacaatcagatcttcaaaatgctaacacagaacttatgcccaccaggccacttcaccatcaactttcagcttcctggtcctgtgagcaatgaagaatttaacggtaattttgggtcagatggtgtacttgaaggcgtagtgaagaaggtgtactacgaagactga

SEQ ID NO: 165543 - DNA, 1711 bp, Arabidopsis thaliana landsberg
ggtttgacgatgacacctcagttgcagccactgtctggagcatttttgaaaaagatttcaaagagcctcatgcaaatgggtcacagacatcagaagcagtggtcgatagatggtttgaaacatttgctgtaagtggaataattttgtgttttgtttggtacagcttttggtcttgtctatttctaatgtgtcttgtctttgttttgtagcaagtatataactgggaccctgcaataaaccagagagttagattggagtttgaggcaaagatgaaggataggatgtctgatcaagttggtcgttggaagggacaagtggaaggagaagggaaatgaggcaaaaccgcggtggatagatccagaagtttggaaaggtctggttagcttttggagggatccgaagtcggaaagaaagagtatcaacagtaggaatgcaaggtatcatgatccggacggcctcgggatatataaacaccggtctggacagacctcatacaaagccagagcccgcaaacgtgtaagttcattgtattttttcctttaaaaaacttgtatttcaaacaactgacctatatgtttatctgtttcagtgtgagatgacaagagaaagtactccagactttctcctcctcttagatgaaacacacaggaaacctgatgggagtttcatcgatagaaagtcggaggaaatctataaggaagtgtcatcgaagattcacgaggaagagtcacttctgtgttcaggcgacactacagagagcacgggttcaggcgggttatctgttcaggcaaagaacaagatctatgcacaagtaatttatccctttcattcaatatagaagacaacatttttttgttgctttggattggtctgttgtggcttgcattatgtctttgatgggataattgcaggttcaaactgaattgaatatgttgtgtctttgtgtttttggcctgattcagttgttgttggtgtgaataaaatcattgtattgtcggcctaatatgactatgtctttagctaaaagttgtctaattgggatagtttcagttttgtatgttgctttgtgtttgtctgttgtggcttgcattgtgtcattgtgtttcaaactgaattgaatatgttatgtttttggtttgcaaaatgttagtgtgtgtaaactgatatgattatgttgtgaaactgaattgaagatgttgtgtctttgtgtttttggcctgattcagttgtgttgttggtctgaataatatcattgtattttcagcctaagatcattatgtctgaagctaaaagttttccattatgtctaagtgtttctactttgctttgattatgtttgcttggtttggttgtgagtttgtgacatgttgctcctaaaaagaaagggaggatttatggggctggttcattgcaacatgaggcgtcttcagctcataccggtccggtgcttcctcgagatgatccggttgtgctttcccagaagctggctgctgctgaagccctcattgcaaaccaggctgagaagatcaccagttttgacgcatactttgattaccttgccgagaaggatccgaagttcgatgccttgtttcgagccaaaccacctgatgcgcctaatgccacagctgctgggatcggacctaaggctgtcgaacctgaggctgttgtagctaacccaaacactgggtcatctccatctgaggccttctaa

SEQ ID NO: 165544 - DNA, 1563 bp, Arabidopsis thaliana landsberg
tttgggtccgcttccaagagctttgctcagatgctacacctgtgagaaatggtatgttgcttcgaaaattctttgcaaaactttatttaaaacatgatttcgtttatttaactagctgcaatcgatctgcagcgacgggtttgtctgaagaggacaatagcaaacatcacagcttagtgctctcttttgcatttggcattgttgttgcctttatcatctccctaatgtttctcttcttctgggtgctttggcatcgatcacgtctctcaagatcacacggtacatatctaatagtctctctctgtctgtcatatacaatatatgtcaagactttgctaaaatctgcattactttttatggatttcttagtgcagcaagactacgaatttgaaatcggccatctgaaaaggttcagttttcgcgaaatacaaaccgcaacaagcaattttagtccaaagaacattttgggacaaggagggtttgggatggcttataaagggtatctcccaaatggaactgtggtggcagttaaaagattgaaagatccgatttatacaggagaagttcagtttcaaaccgaagtagagatgattggcttagctgctcaccgtaaccttttacgcctctttggattctgtatgaccccggaagagagaatgcttgtgtatccgcacatgccaaatggaagcgtagctgatcgcctgagaggttttcaattaacacacttcttggtttgatattctttcgatatataacgcgaaaagttccttataagattacatgttttagacaattatggagaaaagccgtctctagattggaatcggaggataagcattgcactcggcgcagctcgaggacttgtttacttgcacgagcaatgcaatccaaagattattcacagagacgtcaaagctgcaaatattctacttgatgagagctttgaagcaatagttggcgattttggtctagcaaagcttttagaccagagagattcacatgtcactaccgcagtccgaggaaccattggacacatcgctcccgagtacctttccactggacagtcctcagagaaaaccgatgttttcggattcggagtactaatccttgaactcataacaggtcataagatgattgatcaaggcaatggtcaagttcgaaaaggaatgatattgagctgggtaagtaaaaaaattctatgagtcatttactcaacttagactgaacccataaggacaaaacttaaatctaaaccattggtttttgtaggtaaggacattgaaagcagagaagagatttgcagagatggtggacagagatttgaagggagagtttgatgatttggtgttggaggaagtagtggaattggctttgctttgtacacagccacatccgaatctaagaccgaggatgtctcaagtgttgaaggtactagaaggtttagtggaacagtgtgaaggagggtatgaagctagagctccaagtgtctctaggaactacagtaatggtcatgaagagcagtcctttattattgaagccattgagctctctggaccacgatga

SEQ ID NO: 165545 - DNA, 476 bp, Arabidopsis thaliana landsberg
cggcgggtataagctaaggattgttcttgcatgtgacagtgtttaaatacgattcaaagatggattcggtgttacaagtaacaaaagaaaactacgaaaaatgcaacacacagaagcctttggaagaacacaaagacggatacacaacagtgaaactcgatgtctcagggccttactacttcataagtggagctccgagtggtaactgtgctaaaggtgagaaagtgactgtcgtggttcagtcacctaaccacccaaagccaggaccagccgctgttacgcccactcttcctccaaagccatctactactccggctgctccagccccagctccacccactccttctccaaagtcatctacttctacgatggctccggcgccagtccggccaagagcagtgctgttgggttggttgctggaaatggcatcttttgggccatcgactcttgttgctgtcattgggcttgctttcgct

SEQ ID NO: 165546 - DNA, 1438 bp, Arabidopsis thaliana landsberg
atgaggatctcaatttcgagtgtagtttcatcgacgacgagtagatttgttcatcggaatcttcaggggaaaggtaatcctcgaattgctccttcttccattgatctttgcgggatgtgttactggggacgagctttttctagtggcagtggtgattacagagagatattgagaaatgggttacatagtatgaagttagatgatgcaattggtttgttcggtggcatggtcaagtcacgtcctttaccttccatttttgagttcaataaactgttgagtgccattgctaagatgaaaaagtttgatcttgtcatctctctaggtgagaagatgcagaggttaggaatttcacataatctatatacttacaatattttgatcaactgtttctgccgacgctctcaaatctctcttgctttagctcttcttggcaagatgatgaaactcggctatgagcccagcattgtcacgctttcttctcttctcaatggatactgtcacggtaagaggatttcagatgctgtagctttggttgatcaaatggtggaaatggggtatagacctgacacaatcacatttacaactttgattcatgggctttttctccacaacaaagcttctgaagctgtggcgttagttgatcgaatggttcaaagaggctgtcaaccaaatctggttacttatggagtggtagtaaatggattatgtaagagaggtgatattgatttggcttttaatctgctcaacaagatggaagctgcgaaaatagaggccaatgttgtgatctacagcacagtcatagatggtctttgcaaatatagacatgaggatgatgcactcaacttgttcactgaaatggaaaacaaaggagttagaccaaatgttatcacctacagctccctcataagttgcctttgtaattacggaagatggagtgatgcctctcgattactgagtgatatgcttgagaagaatatcaaccctgatttagtcactttcagcgcattgattgatgcatttgtgaagaaggggaagcttgtaaaggctgagaaattgtacgaggagatgatcaaaaggtccatagatcctaatattttcacttatagttcactgatcaatgggttttgtatgctcgatcgccttggtgaggctaagcagatgcttgagttgatgattaggaaggattgtctaccaaacgtagtcacttataatacgcttataaagggattttgtaaggctaagagagtagacaaaggtatggaactcttccgcgagatgtctcaaagaggattggttggcaacacagtcacttacaccactcttatccatggattttttcaagctagagattgtgataatgcccaaatggttctcaaacagatggtttctgatggtgtgcatcccaatattttgacatacaacaatttgttagatggga

SEQ ID NO: 165547 - DNA, 1135 bp, Arabidopsis thaliana landsberg
atgaagagaagaagcaaagagagcaactacaatatctcatcacaacgtcgtcgataccgtgaaatctccactagggaaaagtcccgttatattgatatccctctcgatataacggtggagatactcaagaaactccctgcgaagtctctcgtgaggttccaatgcgtctcgaaacaatggtcaaccattatcggatcccgtagagacttcattgattcgatcgtggcccgttcgatgactcatccgcagcagtggtggcatgtccttctcatcttccactaccaatcagacaaatcttcttttttcatcttcactcatcctctaaacactaaccaagaattagtatcaatccctggattaacggtcgacagttatggctacattcgtggtttgattttatgttgttcagatagttctatttctgtcgctatatacaaccctactacgaggcagtctcttctcttaccaaagatctaaatgctcatagatgatttattcaatcacgttttcgtctttgggtacgatcctgtcaagaataaatacaaagtaatgtgcttgatgattactaaatcggaggagtttgagaatgcttgttttgttttcacattgagagatcccaagaagcaatggaggaacgtcaaatgcggtatccaacatcactatccgtggctacccgcagtttgcatcaacggggctatctattaccgagccactgaagatcatggttctacatttttcttggtgagttttgatgttaggtccgagaaatttgatcatgtgaatgctccgaaagagctgattgatagcaaggattcgactctgataaattaccaaggaaagctaggattcgtaagttatgagaggagcgtgggaatatgggttatggaggatcataataaacaaggatggtccaaggttgtagatagctccattggaagtggtgagattgttttcatcaataagatggttatctgtcatgacacggtatatgtagtcttttttttatcctaagcgaaaagatcgtatgagacacattggaatcgaaggtactaatgcggaggaaataaagcgtaataatcttattcatatattgggtgttccatatcatgtggagaatacaatgcgtttggattag

SEQ ID NO: 165548 - DNA, 3821 bp, Arabidopsis thaliana landsberg
  unsure (1)..(3821): unsure at all n locations
atgcatgctaccgtgaagaaggagttggtttctaagtttgttcacaagcttcttgttggtgaatgggtcttcattgagatttttggtcttacctatgcgtctggccagtttcgcccaaccaaccatctatacaagatggcgttccatgttagaactgaagtcatgggttgtgctttgtctctgactccaacttcttgactttggtgccattttcaaaaatccagagtggtgagcttaaccctcacatgttggttggtgagttttctgattctatattgtatttttgctttattccattcatttgctatcattagattatgaacacagtcatgtttcactgcagatgctattggccaaatcattactgttggtgagttggaggaactcgaggctaacaataagcgtacaacaaagattgactttgagatcagagatcaaatgtaatgtctatatcttattagtttattgtgatcttatttgtttattgcttatcaaagaaagtgtttgtttcgattcatttgttctcatagggatgagagaatgcaagttactttgtggggaacatacgctcagcaggtttacagagcatgttaggaatctgagggaaagaatgtgatttttctcattcgttttgccaaaatcaagagttacaagggtatattcagtttctatatcacctgttcctttcctttccatattgcatgatctatggtcacttaaatgttatgagactgcaagtgtgaagagtttatccaactcatttgatgcatcgcaagtacatgtcaatccggacttcccggaagttcaccatttcagtcaaacgtaagtgcatctactctcaacacactctacttttagttgacttctttatgtgctattgattatctttttatccaaatgcagacttccaaatgatggtgctatttgtgtgttccgtgcaagagtcccacgttttgagatggttgtagttaaaaggactgactacagtgagtacacaaggaataccattgaagatctgcttagctcgactgaggttatattcagctaacttatctcaaagtttagaaatctaactatcatcagtatctaatgtgttctgatattttatataggttggtaaagtcagagttttgtgcacaatctatgcaattgatacggattgggcttggtattacatcagctgcaagacatgtaataagaaagtgaatcatattcatgttggtgttaatggagtgaacaacaagggtaagaagcctaaattctggtgtgacacctgcaagtctgttgtaaccaatgtggtctctaggtaaatacatttctttgaagattatatttacatagcatactactttgaaatattttattggaactgtgtgtatagcttggaaattaagttcgtaaaattttattatatgcaaggtacatgatctatgcaaaggttatggatagcactagtgaagccaaattggttctgtttgattcaatttgctttgagatcattggcgagtctgcaacctctgttcttaatggatctgttaatgaggtatgtttcttaaagttgtcccgtgtctactttatgtatactgacatataaatatatagagaactcaaatagctatttacactcttccagattgaggatccagaagatcttcctgattctgtaaagaatctgattggtaagacatttctgtttctggtgtgggttgagagagacaacatcttggatggaaaagaaatctataaggttacagaggtgcttctgaaggatggactactagaggaacaattactagaggattctactgaacatgtgaaccatgcatccattgtgtctggtgataaggtatttcacacaacatctcaaattacattcttcattacaatcataaagttcataagagttttggcaatttctaactctatatattgcaggttccacttatgctggagaatggtaatggatcgccaaactctacgactccatcttcaaagcgtgtttacgctagagaaacgagtggctatgaaggttcttcaagttcaaagaaggtgtgtgttgtaccattagacttggaaaagtctttatctgagaatgctgaacatggagttgccttgaatccgcaggtggctgattcaaaagaagttactgttccaactgaagtcaaaacatcaaaggttcctgttgaaacagagaatgaccaagcacctgtcccagctactgtcgtggtgaaacaagaaatcaagaaagagatggctaggaacatggctgctgtaagggtcaaagtggagaagaacaagtgatctacttatctatttcttttaataagtgatgcttcttgaactgtgtttggtcactgaagctatgttttgaatttttttttttttattggattatgttcgtgttttttttttcaaagttattggatttcatgttttggattatgtttcatctttaattttggagttaatcttaaaattattctattaagcttatatgttcgatcattactaattttgtagccatctatatgaaaacatgcaatctcagttataacgttacagttagagggtccaaagaaacttaccatttcatgttgtatatatgtattcgactggcttcagacttttaatgaatgactttagtgtatacttgtatcaataagttaaagtttcattatactgtagtgttcagaatgtcagagttagtgaaatctgatttcacagactatgttttccccaatgaacttgaggactctgctacagacaatgttgttgatgttactggtatgtttataacgatcctaattctttagatcatttcatgagtttatatttgagtactctgctgcagacaataactagcttttgattttttgttttcatagatgctattggtgtggttgcaagtgtttcttctatcaagaggtttccttatgtctgcaataagggtaagaccgactatgaggccaaatatgtttctttcgagcttatagataattggtaagtttataagttatagatttaggattagttgatctaccttgcagactttacatttagattattgcgtgtgattatttaccatagtctaccaatggtacagggaacaaaaactcaagtgtgttgctgttggttcatgctgtgaagagtttgttaccaagtggtctaggcgtatcactagaccaacatacaactatgaaccagttgtatgtgttgtgcgcttctggagaattgcttcagttgatggttagtattctaaatctgctagataattgtattgagttgtgacccatgaaacctgtgtttaaatttaaattatgttctgttttgacaaatgaaacctgtgtttttctgtgtgtaaggtgaaaacgttttaacgagtgagtttggatgttcccgtctacatatagacccaagcttcccttactttgatcttgcaagttatctgtaagtctagcaattggtttcaaatttctgtagtttacaattaagaatagttacttagttttataatctattgtctttgtaccaggcggagtttcnnnnnnnnnnnnnnnnnnnnnnnnnnnnnnnnnnnnnnnnnttagtttatcttcaggggagttcggctaaaccgggttatttggatcggtttgttcggtttgggagaaattcggttttaattttattttaccgaatacccgaattaaaattcggttcgggtcggttcggaagtcggtttattcgggtcggttcttgactagaaattgtgttcgaacttaaaaccaacaaaaatttattcggttctacggtttttaatcggtttagatatttaaaaaaaa

SEQ ID NO: 165549 - DNA, 402 bp, Arabidopsis thaliana landsberg
  unsure (1)..(402): unsure at all n locations
atgggaagagggagaagctcatcgtcttcatcgatagagagcagctgcaaaagcaacccatttggtgtgtcttcgagtaatactcggaacctaagcacggacctgagactcgggctcagcttcggatcatcttccggacaatattacaacggtggagataaccatgaatatgatggagtcggtgcggcagaggaaatgatgatcatggaagaagaagagcaaaacgagtgtaatagtgtcggaagcntctacgtgaaagtgaacatggaaggagttcctattgggagaaagatcgttcttttatcttttaatggatatcatgatttgatcacaactctcgactacatgttcaatgcttcaatcctttgtaagtatctacacacacttaattacatctttgca

SEQ ID NO: 165550 - DNA, 1855 bp, Arabidopsis thaliana landsberg
atgaagacgattctagattcaattattgagctagatttgaagattttcactcattattttgatgatttattccgggaaattctcaaacgggtaatgcacacaaggtgtttgatagaattccccaatgatcaaaattgtgtctctgttttgctatcaagccttgtcacgtgtctttcacgtgatgatacggtgccttgctgtcattagtcagttactttcgtttgagtttccccgcgtcgactctgcttcttctcgcgattcagatttctctccgaagaagaaaaaccctagagaaaaagaaagcaaaagaatcttgagaatcgtttcgtttactatggattcttctttcatggaagatgatgagggagcacaactccttgaagatgctcaaaaactctttgataatggagatcacatcaaggctttggagataattgaagatttgattttagtccatggggaagatataaccgcatggcgtcttcatatcagagaaggtaaaatgtttgatgacctagcgaagaaaacagaggatcctgacgtgaaatttgcttactttttggcttctgctgaatgcttctcggaagatggtacgttatcaccaatttgtgctagttcactcttcctgttgggccaaatgcttgggtcagtattgtattacaagaagtctttgaagaaagcgaaacaaggtttatctgttaactctctcccaagcaagtcagattctgttgctcaactgagtttgcaagcgcaaagagaattggacaaaaaaataaagcactgttgagtttaatcaatgatgcagagtccgagatcgcatcttccaagactctagtggttctactgtaaaaaacactaaccaaaagtgtggagtcaaagaaaagtcaagacccgcgtgaggatgcgtttaaaggattgaggtcgtactgggtgggattggatgtcaagatcaaaagggattttatgaaagtaagcattgcaaagcttacaagttttgttgagggagtaggacattacaaagaggaacgagaagttttagagaaggttctcacttcggcaaaggaagacagagaatggaaattctggatatgccgaactttgtgttcgaggaagttctctagtgctgaagaatgtaagaatcatcttgaacaacaacatgctgcagatttcaaaccttcttcagaaaaggatatagtcaagaggataggaaaagactgggttcgtaagataatagttggaagttgggaaccagtggatgcagtcgctgccactgaaatgatcaagaaccagctcgcagatgtgaaagcgtttgcatctaaagctaagaatggatggtccaaagaatggcctttagctgtggatgaagagcgcagtaagttactcaaggaaatcaaattgctccttgtctctttttgcgaccttaaaattctctcttgtagcattcgagactggatgatgtgttttaaagctaagcatcttggaaaacttgaagtttctgaacagagtcttgtcgattctcgcttagtagaagcgcctcatagtatctgttttctagaaagtcaggaactcactcaaatccttgagtttctaaaccacatcaaatgtaaaaggaatgatggtacagatcttgtttgcagagcagtggacagtgtcttgggtcgtactcgagttaaagaaaagatcgactttgaccctcagttttcatttctgcttctagataaaagactgctgaaaatcaatgatgatcaattcgatgatgatgaagggacgcccaatgtttttgatcccagtgttcactacgccaaagcaccagttcatggagatgatatcatatcctggttaactgactacgatt

SEQ ID NO: 165551 - DNA, 1193 bp, Arabidopsis thaliana landsberg
aatttcttggtgtaggatttgccttcggcgtcaagaataaaactgttccgccttgggaaagttggtagcaatgattgtcttggagttttggctcacaatagttatggaaggcttcttcttcttagtgggtttatagatctctttttctttttcagttaatacattgatcttacattacctgttgcctgcaactttctttttgcagtaaacctctgttcagttcaacccggtaaatgaaaattatttcatgagtggttcaattgatggaaaggttcgaatttggaacatttccggttgcagcgttgttgattgggcagatctcaaagacattatatcggcagtgtgttatcgtccggatggacaaggtggaatcatcggttctctgaacgggagttgcagattctttaacatgtctggagaatttttagaactggactctcagatacatttgcataacaaaaagaagtcttcaaataaacgcataactggttttcaggtaatgtctcctatgtctttccctttctctagatacttcgtttacttctcttgaaatttgtgagatgttaacaaatcgtacttgctttttccagttcttaccacaagaaccgactaaagtcctggttgtttccgcggattccaaagtcagaattctccaaggcaacaatgtcgtcagaaaatacaaaggtatgtttctttttatgtctccttcaactttcattttcttttgcatagctctattattgattctaaactaatcccatctctgttttttcaatctttaggcgtttgcaagacgagaagcctcacatcagcatctctcacatctgatggaaaacacattgtttcagcttgtgaggactccaatgtatatatatggagcaatgatgaggaatcagaaaccaaaaagattcgatcttttgaacgtttctccgccaatgcatcagttgcagcaacatggtgtggattctcagatcacaacacaactctcccgttttcttctccatcatgcttatctcacaacgaaggatttgtccccggatcaatatccaaagggagtgcgacatggccagaggaaaacctacccgcaaatcctctgtccacatccgcgatgaatgcatctcattacaagtttctcaagtcctcttaccagagagcatccagctctctatcttggggtatggtcatagtcacag

SEQ ID NO: 165552 - DNA, 438 bp, Arabidopsis thaliana landsberg
atggcctccatggcgttcgccctggcgggggccttcaagggcctctccctggcgcccaccaccaccacctcctccttcccgcgctgcgaccgcgcctcgctctccgtcggcggcgcagcgggcgtgccggtgccggtgccggcgcggcggctcaccatccagatggcgcacaagaagggggccgggagcaccaagaacggccgcgactccaagggccagcgcctcggggtcaagatatacggcgaccagctcgccaagcccggggccatcatcatccgccagcgcggcaccagggtctatcctggaaataacgttggaatgggcaaggatcacacactcttttctttgatagatggactcgtcaagtttgagaagtatgggccggacaagaaaaggttagtgtttacccatatgagatggaagcctgatacccaaaca

SEQ ID NO: 165553 - DNA, 1582 bp, Arabidopsis thaliana landsberg
ctgacagaagaggaaaccacatcggtcttaacttcaacaatctctcctccgatgtacaagagcctctcatttactacgacaccgatgatcgaaaagaagattttcagctcgagagtggcgaaccaatccgagttcttgtcgattacgacggatccagcgaaaccttaaacgttacaatctatcctacgcgtttagagtttaaacccaagaagcctctaatctcgcgacgagtttcagaactgtcggagattgtgaaggatgaaatgtacgtcggattcaccgccgcgactggaaaagaccagtcgagtgctcactatgtaatgggttggagtttttcaagctgcggagaaaatcctatggcggattggctcgagatctcgcggcttcctcctccacctcgcttgagtaacaagaaaggttacaattctcaagtcattgttttgattgttgctttatcgatcgtcacactggtcttgcttgtgttactatttatatttgtgatgtacaaaaggagaatccaagaagaagatactctagaagattgggagattgattatcctcataggtttagatacagagatctctacttagcaacaaagaaatttaaagagagtgagatcatcggtaccggagatttggaatcgtttacagaggaaatctatcttcttcgggtccaatcgcagtgaagaagataacctcaaatagcttacaaggtgttcgagaatttatggcagagatcgagagtttaggaagattaggtcataagaacctcgtgaatcttcaaggatggtgcaaacacaagaacgagctcttgttaatttacgattatatacccaacggaagtctcgactcgttgctgtaccaaacgccgagaagaaacggcgtcgtgttgccgtgggacgtgcgtttcgagatcataaagggaatcgcgtcgggactgttgtatcttcatgaggaatgggaacagatcgtggttcatagagacgtgaaaccgagcaatgttcttattgatgaagatatgaacgctaaattaggcgattttggactcgcgaggctttatgaacgcggaacgttaacgcagaccacgaaaatcgttgggactttagggtacatggcgcctgagctcacacgtaacggtaaaggctcaaccgcgtctgacgtttttgcgtttggcgttttgttgttagaaatagtgtgtgggaataaaccaacgaatgcagagaacttcttcttagctgattgggtaatggaatttcatactaatggtggaatcctttgcgtcgtggatcagaatctcgggtctagtttcaatggcagagaggctaaactagctcttgttgtggggttattatgttgccatcagaaaccaaaacttaggccatcgatgagaagggtgcttagatatttgaatggtgaagagaatgttccacagattgatgaaaattggggattctcggattcttcgagagatgatcataaatcgaatgttgtaggttatgtttcgtctgatagagcctcgagctcgaatactttttcgtctttctccaatgtttcttcaagctctatcgttagtggtagatag

SEQ ID NO: 165554 - DNA, 1084 bp, Arabidopsis thaliana landsberg
  unsure (1)..(1084): unsure at all n locations
tgaatcagccgcgagcctgtcatagtattagaagcgatgaaaaatcncgatgaaccccatagcctggtggatcttgtgttcttctctgatggtctgcctanagacgatccaagagaccacgannnnnnnnnnnnnnnnnnnagaaaagtcggagccaataaattttcgaaaataatcgaaggaaagagatttgattgcatcatctctgtgccttttactccatgggttccagctgttgcagctgctcataacattccttgtgcaatcctctggattgaagcttgtgcaggtttctcagtttattaccgttactacatgaagacaaactctttccccgatctcgaagatcctaatcaaaaagtggagttaccaggcttaccgtttttagaagtccgagatctcccgacattgatgttaccttctcacggtgctatcttcaatacactaatggcggaattcgtcgaatgcttgaaagatgttaaatgggttttggctaattcattttatgaactcgaatcagagataattgaatcgatgtttgatttaaaaccctataattccaattggtcctctggtttctccatttctgttgggaggtggtgaggaggaaaccctagacggtaagagcctagatttttgcaaatctgatgattgttgtatggagtggcttgacaagcaagctaggtcttctgttgtgtacatatctttcggaagtatgctcgaaacattggagaatcaggtcgagaccatagcgaaggcgctgaagaacagaggacttccatttatttgggtgataaggccaaaggagaaagcccaaaacgttgatggtttgcaggagatggtgaaagaaggacaaggggttgttctcgagtggagtccacaagagaagattttgagtcacgtggcgatctcttgttttgtcacgcattgcggctggaattcgacaatggagacagtggtggctggtgttcctgtggtagcgtaccctagctggacggaccagcccattgacgcgcggttgcttgttgatgtgtttggaatcggagtaaggatgaggaatgacagtgtcgatggcgctttagag

SEQ ID NO: 165555 - DNA, 699 bp, Arabidopsis thaliana landsberg
tcatcgaatactctcaggaatggagaactttcgcctccgacgacaatcacggtgacagagacccaaacctgtgtttggtgctgccacgaaccctttgctcaaatcaggcgatcttgtcaccatcatcgagaaaccttatgaaaaggtttcctctgtgccgtgccagaaatcaagtcaagaaccatgaagaagacctaatcaagatagccttcgaagaaatccagagaatgactgatgcactagacctagatattgtaatcaactcttgggcatgtgagattgtctccaaattcgatggtcacgctaacaccaaattacgcagagggaagaagctaaacgctgtatgtgcagcctctgtttcaacggcttgtcgtgaactgaaactgtcgaggacattgaaagagatcgctatggttgccaatggtgtggaccggaaggatatccggaaagagagtgaggtgataaagcgtattctagagtcacatcaaacctccgtgtctgctgctcaagcgattatcaacaccggagaactcgttcgtcggttctgttccaaacttgatgtaagtcaaagagaaataagggcgatttgagaagcggttgagaaagcagagaatttcgatatccggagaaaccctaagtcagttcttgcggcaattatcttcatgatctctcatatatctcagaccaacaagagactta

SEQ ID NO: 165556 - DNA, 2576 bp, Arabidopsis thaliana landsberg
ctttcttgtatgcaatatgaatatgagataaatgacggaaagtctatattacataaaactagattcttgacatctcgcaggatgaagattcacactttgttgaggctgatttacttgcaaatcttggtattccaacaataaatctggctgacgatattgacagctcaaaaagtctcagtggagaaggtgctgacgaaaatatcagagtagagacaattaaagagtgtaattattttgggccatctggaaccgagaaagatggaccattacgcgtacactttgatctccatgtgccgctgcaggaggctctagaggacatgtgtcaaaacttccagttttttaaccgggatgctacaccaaccctagatgaacaaggcgaagaaggtaaaagtcgttctatcttataaaaaaaacaagcatatatttttttaaaaaaccagatgttgtgttaatttccatgctatatttactaaatacaaagcaagcatgtaagtttacatattagtaagatagatcgttagtaggatatatactctgaattaagtttgacatgtcaactttatatatgcagttttatataaaaccctgttattgctccggaatacataatgccgtgttgggatggagttagctatccgcaatgttcagtatgaaggcgacgaactttttgtgggtcttgttttcaaaaacaaacaagactgtaacgtgaaattagttgtgcagcactaaatcgcctattccatttccgtcgtgatcgctctaccaagaaaataataacgctcacttgcgtttccgactcttgctcgtggcgtttccacattgtgagattggaagattctaacaattaccaaattcaaagtgccacacttgatcacacttgctccgtcgaagaaagaagcaactaccacaaggtagccactactcgcatgattggtagcataatgaaagcaaagtatgaggggaacaccagaggtccacgggcaatagacctacaacgactccttctggctgatcattcggtgagaatttcttattggaaggcatggaaatcccgggaacttgctctggagggagcaaaaggatcatcagcaaatagcttttctcttctcccgacatacctacatgtactgcgagaggctaaccttggatcccttgttgaacttaaaacagaagttgatgcaaaaggtgtctataggtttaaatacatgttcatagcatatgcagcatccctggaaggatttgcgaccaagaggggagtcattgtcatcgacggagcccatctgaaagggaaatacttaggctgcctactcaccgcaagctgtcaaggcacaaatttccaagttttcccactagcctttggtgttgttgatagcgaaaatgatgctgcttgggaacagtttttttggatgttgaacacagcaatacccgactcatcaaaaattttgtttgtgttagaccgacattctccaatatacataggactgcaaaaggtaagcctcaagtatacaatgttactttataatatacatgcattgttactacgtagcatgcattacataacagcacactgtgcttttaagaaaaagtgtgctatacttagcctttctttccctctaggtgtatctgaaggttagacatggagcttgcgtggtgcatctccagcgaaacattgcggtttcgtacaagtaaaaacacctactgttccacgtttccaaagctgcaagagcatataggatttgagatttccatacctacttcaatgaggttataaggatagatccggtatgtgcagcctacctggagtcagttggctttagtcactcgacaagggcatactttttaggggaacgctataacgttatgaccatcaatgttgcggagtcattgaacgtcgtgttgaaggaagctcgtgaactaccaatcatttcccttctagagttcatccgcacaactctaatgacctcgtttgcgattaggcgagacgccgccaactctgaaacttcatcaatgccaccaaagatgagagaagtggtgcatcagaactttgaaaagtcggtgcgatattctgttaggcgcattgaccggtatgaatatgagatccgagcagatggtacgagcggtttccatgtttaacttttggaacgcacgtgctcgtgtagagcatttgatttaatacatcacccgtgctcgcacgcaatagctgcagcagttgcagaaggtgtgcctattcaagggttaatggcgccagagtactctgttgagagttggagaatgtcgtacccagggaaaataaaacatatgcctgatgtaggagatgtgtttcttttgcctgaacaaatagcaattctacaattatttccacctgaaacgcgcaggccaccgagtagaccaaagaagaagaggataacatcaagtggagaatttaaggtacattatctgaaatagattttttgaaataatgtttcaggtccctcagatttaacaatgtatggtttcaggggaaaaaacgttaggccacacgatgttcccgttgcacaggcgtaagacataatcgcgccacatgcaaaatgtccatt

SEQ ID NO: 165557 - DNA, 496 bp, Arabidopsis thaliana landsberg
aaactcgggaaaatagggaaatggatagacgatcgcagcggatttaccgaaacgatccttccgttgatcaggcatcccgttccggcgagcgtgcggtgggcttatgttttcgggagcggtacccttttttgttttattttacaggtcatcacgggcatcgggctttccctgctataccagccgtcttcgcaggaagcgtataaatcccttcaatacatcacacatcaggcggcgttgggtaacctcttgcgcggcattcattatttcggcgcttcggggatgattatcctggtgggcattcacatgacccgcgtgtatatcaccgcttcttataaatacccgagggaaatgagctggatcagcggggtgttcctgttgattcttacaattgccatgggattcacaggccagttgctgcggtgggattccaatggcgtatggtcctcagtggtagccgcggaacattaggcaggacacccgtaatcgtacctggctg

SEQ ID NO: 165558 - DNA, 1143 bp, Arabidopsis thaliana landsberg; identical to SEQ ID NO: 11506

SEQ ID NO: 165559 - DNA, 291 bp, Arabidopsis thaliana landsberg; identical to SEQ ID NO: 51754

SEQ ID NO: 165560 - DNA, 543 bp, Arabidopsis thaliana landsberg
  unsure (1)..(543): unsure at all n locations
gggtattgtgaacgtgctggctaacgaaggtgctataccggtgatagtgggccgtancgaaaaagacaatttaaacacagttaaaagtttggcggcccgtggtgttgagtgcttccaggtgcaagccgagttaactgatccggctgagtgtgagaaagccatcaccgcggtgatcgccaagtttggcaggattgaaggtttgattaataatgccggtgtaatcgacggtgtaggccttgaaaaaggcaactacgacgtctttgtgcgcagcttacatcgcaacgttacccattattatctgatggccaaatttgccttacctgaattgaaaaagtcaaaaggcaatattgtaaacatcggctcaaaagtagcagaaacaggccagggaaacacctctgcctatgctgctgccaatggcgggcgtaatgcgcttacccgcgaatgggccgttgaattgctaccatatggcattannnnnnnnnnnnnnnnnnnnnnnnnnnnnnnnnnnnnnnnnnnngaagcctatatcaaaacaatggccga

SEQ ID NO: 165561 - DNA, 1187 bp, Arabidopsis thaliana landsberg
cattaattccgataaaagttgctgcgtctacaagtcttttgtccaaacgatggggttctgtttggaaattgattccgacgcttgactatgacggtacatatagtgctgcagctttagagtttttcggaaagtttcacacccttgtggctttacgctttatgaaattgaccattgaggatgttcattcgacaacttgtttccggtccgtcaagaatttatctcttctagatgtaaagttctcaagcgataaaaccgttgagaggcttttgtcttgtttccctattcttgaaacattggttgtgcaccgatggggcgctgacaatgtgaagactttcgcaatttgtgtgccatcgttgcagagcttaaacatccgctacacagtagggggttatcacaatccaaaaactgatcatggatttgtgatcaatgctccttctttaaagcattttgatcattttagtgagttttgctcattagtgaatatgcccgagcaattggatgcagaaatccaccttagacatattgattctgagaagcttctggaaagtcttacctcgtctaaaaaactttccttgtgtttaaaaccacaaacggtaaagtctctatgtttctcgtgtttaagattcttttgcgtttattatatttagtttcggctgatgatgctgtcactttttgcagggttcatatccgggaggagactttgaccagctcgtgtgtctagagctatgtgttatgtgctccttagattggttgaatcttatcctcagacgttcacctaaactccgatctctcaaactctaccaatcagtaagttttgatccaaaactagatgatgttgttgcatcttcagtatattaaattgcaactctttgtcatgaactgtttgatctcagagagagagaaactggagctgcaggaattccaaacatgtccgtactaaatgggagcaacccaattctgttcctgaatgcttacttgtgagtctcgaaactgttaagtggattttgtacaaagggacacaagaagagaaggatgtggtgaagtatttgttaaagaatggaaacttcataaagactatgagtattcgattctcatcagtagtcacgttggaagagagaatccacataccaatggagtttgagttcatgggaaggattaattccagcagatgtcagctttcattctca

SEQ ID NO: 165562 - DNA, 2303 bp, Arabidopsis thaliana landsberg
cgtttcaaggagtatcaacaggtctgcccgcattatggcttcagtgaggtataacttcttggtacctttttcagtggagttgattggaggtcccacccggctctagatgcggcgagcaatgaaaactataaacacgagatatccggctgatgctaccgctctgatagagaatctcgtttgtagtaacagcaccaagaatgctgactttgagaggaagaagattgttggagctgtttcaggcaatcagatggcagaggtacatgccaagttgtaatcagttcacaacttgcttacaaggaagaagcatgtccactttgcagttgaggatgagtctattgagcctgagactgagtcagaagagggattcttctacatagatggtcaggactacaagaagtttgggcagccacagggtaacttcagtggcaatcggtttacagggaaccagagctacactccaaagcctgcctttcaaaagtcatttcctcatagcaacttcgagaggacatatggtaattcagcttaccaagccccccttccaccctcatcagagagcataatgcaatctatgcttgagaagattcttgagagccaaacaaagctcgttgtcgagtttaatggcaagtttgatgctgtctacacagatcttaatgggaagatcgacaatctgagctctcacttgaagaagctggatgtacaggtagctcaaactacacaatccattaagagacaagaggattttcttcctgttaatcctgatgctaacccaacgaagagctgtaatgccatcttgatcagagaaggagatgatgtgtggaaagaattggacattggagacgagttggagctcgctactgcagagttggtatcgaccgaaacctacaagtgttgatcgacaccctatagaacattcttctatgagacgattccatacgaaggtgtcgatcgacactgggtccggactgcaccatatgaggtaagaatcccgatgcagaccgaatctgccaacactcctcttgttccttatccaaggaagcgtcgttctaagcagaagattcatgctggtaagtgcacaaccatcatggaaaagatcctcacctcaattcctaagaatacttcggagacatcctatgctccactcaacaggtatgtcaagcgccttgttgtcaatgaaattagctcaaaggaagctaaactgctgacattggacatcagtgcaattatgctgcctaaggtcagcaaagagaaagcacagagagtggatattgctgagtacatctgcaccatcactccttatcagaccactaagaagcttcctgatccaggtaccttcattcttgattgctctatctcttcaagcaggttcagccgctctttgtgtgatctgggatcaagtatcaacctcatgcctaagtctgttgctgagagattaggcatgactaactacaggccgagtaaaatcactctcctcttcgcggatcatttcaaacgaatccctgaaggaatttttgagtatgttcttgttaaggttggtaactccctaatccctgctaattttgtggtcctggactacaataaggaacccaaggatcctcttattcttggaagagcattcctagctacaactggcgctaggtttgatgtgaagaaagagagaatctctctcaaggttcgtgatttggagatggagtttggcatggatggttcagagcttactaagcctatcacttgcattgcttcaagcatagatacacctcctcagactgatcagaatcccaccacagagccacacaaaacgctgcggcccgggtagctcgccaatgagagttcaaaagcaacggtgtcgatggaccacactaccctttcgatcgacaccctcggtttcacagagagaggattctgcacattctcttcagcccacaccacttgaggacctatgtgataagttctcttctctttcttctcctgttttatctttgattaattctttgaattattcgaagactgcttcacaagataacaagcctagagttcctagaaagcttgtttctcctgtttttcttgcaggtgacgagaagagtgtcgatcgacacacctctgagtgtcgatcgacactaggagctgctccaaccagatccatttacacaccgccttgaaaggcgaggaggcagcagcaatcctccaccactccacccacatcttgaactccgccaagtcaagctattgactcaaaacaacgcttagtgggaggcaacccactagtttgatttttctttcccctttcttttattttcaattataat

SEQ ID NO: 165563 - DNA, 1267 bp, Arabidopsis thaliana landsberg
gaaggaatcggccaagactatgatcaagaagagctgaaatctctttggaatacaatagccggtccgaagcccttctcgccaaccaagagcaagagttcttcaatccataatcccgtgattagacacctccaccagtgcatcgccaacaccctctttccaaagaaggccaccagatttgttggtgaagaggagctttgcatgatagaccaatctttggtctttattttgagagagacaaaagatgggaggaatatggcgggtgatagagcagacacttcgttgagtgttgttctcttggatcacctattgagctataaggagtatgttgcaaccatccatcgctcggaaattcacgggagtctttgtgttggtggtctcttaacgccaatactaggagctgtgggtatgaaattcggaactcctgacgtgttgcctaagttcattgacctatactatctcaagggaaaggattttcttgagaaaacaactctagcggatcgctatctcttcaaattcaaacactcggagcttggaccttctcttctacccctaccatgcgagaaccagactttggtgaagacaagacgcaacatcaatttcatgccatctccctctgccttgaacatcgacattggaggagctcgggaagataaaccagaatatagtccagccgactatgagcaacatgagtaatttactcaagctgattatgaggagcaaatcgagtttgagcaacatattgatcaaccggagcatgggaccagcgaacaagagcaagctcattatgaagaaggtgctaaccaaggaggagatgagtttgctgaagttcacaagaagctcgatgtacttgaagagcttgggaaccttcacagaaagacaatgaagggtttcaagaagaagaggagaacaatgaagaaatcgctcaagagtatggctgctcaactcaaggacttccagagcaagccaaggccaccatctccaacacccgaagtaagaaggaccggttcaacgagctcagctgcaaggagagctgaaaggatcgatcaaccccgagcttcatcttttgaccctcgggaagtgatctccgagttgagagagccaaggagtaggtagagacgagcttccacacgctcgaccggacagaacgagcaacaccctttcgcctcaacttcagcccctgccaatacccaagagagcatggatgactatgtctccatctacttcacctgacaattgaggtaacaccacctctccattgtatataaca

SEQ ID NO: 165564 - DNA, 2185 bp, Arabidopsis thaliana landsberg; identical to SEQ ID NO: 33204

SEQ ID NO: 165565 - DNA, 5038 bp, Arabidopsis thaliana landsberg
gaatgatttggtcagatccagaagaattcgagttttgggagatgttctccgcatcagcgttatggacagcatcaaccttggttccgggagggagatccattggaaggcgcccgtccgtaacgtcgtcgtttgggatctgaactggtaagccagatccagttgaattggatgaattggaatccatgatcgttggtcacaattgatgtgttagcttcggtgttggaatgatctatttccgtccccacagacggcgccaaatgtgggttctgaagtccagactagagatttgtaattgagattatgagaaaggagggctagaacttcactgaaaccttgagagttatattgctaagaacgaatggactttttgtattgattatgacaaagcttttacaatgtgaaaggagattacaagtgtaaaagtatgtgtttgaatgtaagctgaattgaatgtgtcttccaagtcgtccttgttttgttatataggtctacgcacgtggtagctccgttcgggatttgcggagatcctcctggatattcggcaggtacgttccgagataacaggtccgctccgcgaatatctcctcatccgttcctaggttgttatttgcttgtttcccttcatcaggtgactgggcttatctggcccaagtacccattcacgtttgtgggctcatcagttgcgtaggtcctctacttggtgggcttggtgggctttgtgggctggcttggtatttttgcaggtggattcctggaggggaatccagctccaacatttgcccccaggtgaagtcgatgagcggacatctaagtcaggtaagattgcaaaaatattgttgatgaggtggtagatacgataagatcaattggtttcgaggataacctcaataaaaatgatttaattttagattcccgaaccgaaagatattgagtagatacgcgaggtaaatcgtcgttgacgtggacgatcaagatgaagcgtttcttcagcgcaccgcatctaacagctcagatcaggcgcgatgaagagatctctgcaatctcgaaaattgtcgtgatcatggcttctttaaataacttcccacatctccactcgtttaatttttgtttgtagagatagaaattttttaatctttcttctgctatctccatcgtgctttctcttctgccttttttctctgatctgctttatctcctttttccttcatctccttcttttgtcttctctgaaatccaaagatgagcgaactcgaagtctcccagaaccagagtaatcacagttacgactacaacgagagtttgtcagatttgaagtcagcagcatcgtcgcggtaagagccagacgacgccggaaccctaggcgggcctagccgagcccgaaaagcatcgtcgaaggcaaaccaacctaacaagaagaaggatgctcccaaaaagaagaagggagatttgccgatgatgcccaacgacctagtcgacctctggaggagatgtcaagtctcgctggaagtaaatatgattctctcgaggtcactgctctcgctcgagaacgttctggaggactggtgttgcgcctatgctaacttcttcgagaagtgcgagctatttttcccaattccgacatgtatcctcgagatgctctattgccttggtctcgcttttcctcagatgtccccgaattttgttcgccatgtattggcgttgttcacccgagcctgggaattgaacagaaggttcagctgtcgcgacttgctgtagtattgtcaggtcaaaaccaacgctcgaagcgacctcgggacctactacatcagcgctccccccggatctcttgtcttaggtggtctggagtcatgccgggactcaaaatgacgagccaaatacttatttttttgggtggatcgtcactctattggcgacttcggtcagacgaagatgataaggaccttgtcccacaacttgattcagatggagatccaatgcccttatttccagtctagtagacgtaaattgcttctttttggtgatgattgcattgtttaataacgttattattttttgtcaattgcaacaaaaaccaaagaagtcactctctcggaatcagtactcgaactgctaaccatgttttgatgtggccaaactgattggtcgacctttaccagggatcacatcaaagcttctctgttaacagatccacgaggtccaattgtcgttcttccagcagctcatttcaagaagaacaatgaggcgaccaagtctttgcgttcaacgagcacacaccggggctcctgctcgtgctggtgatctgttggccccggtgactgcggctcggaacagtctagctatctccagcacatctgcttcagcttctcatccgtcgcttcctgagttcaataccgggacctctgttaccggaggtcaagcggataacaatcaggtcgctcaggtttctgagccatctgcggctgttcattctgatggtgcaccgtcttctccgaagagagctcggacccagccggaggtgcgcccggcggctgagctgatcgtgatcgatcaggaggtcgcttctcctagagaggagagggcggaacctgcggctgctaacccggaggcagctatgtcagccgagaggcggtcctcgggtaggtcccaaggcggaggccgaggatcaagaggtggggtcaggtcctccttccaaggtctgaacaggtatcaggaagtgagacagtcgtccaattctggtggggggtctgcgggaagtaggcctttccactggtcttacactcacgactgtgatcatcctatcgttgagaacgaggctgggttggcgaacctgctacgccacatcaaagggaagaacagccagattcccggagtgaagaacatggccaaggcggcatcttatgctgacatgatggcgaaggagggccaggtataaccgataactgcctcctcgtgattccattcttatgctagttataactttctgttttgcctttggtaggcgatagctgccccgaataagctggttgctctctatgagcagcgtttgagtcaagtcccctcggcgagcgagcttgaagaaggaaagaccctcatccgggagctgacgtcgagtgtgaaggctggtcaggaacgcgaagtttcgttccaggtataccccgtttttgtcttgtctgtatataatctattgataatacgacagttctgaactgactgtgatttcaggcggagatcgagaggttgaaaatagagctgtccacttcaaaagacctcgagaaaggttatgctgcgaagatcgggctcatggagatggagttagatatggttgtagtaggtgagctccgatgaagccgaagtgatgtgttcttataagtctagttcactatcgactttttggaagcaagatcacaaaatggatccgccaacattcgggtgttgggctttgggtatcggaagattacgaatgagtttttgcgaaacatgataataaatatcaaaattttcttttattcttatctcgaaatttgttaagtacaaaaagaggtaaagcaagcgacgatctggtgtgattgaactgtcaggtgagcagcaaatcttcgttgatggaagatgtgatgtctgtttcctttgttgaagtttcgtctttcaaatggaagggttgagatggtaattgcgtttgcggagggaactgcctgcatacctggttaggggattaagccccttggtaattcgattgaagtggtggttgcgctcttggggggagctgcctacgtaccctgccaagggatcaagtcttatcgtagttcgattgtttttgagtacctattcgtggtatttcatgagatgcatggcattccaaggccgtaactcaagtactccgttgataacttttacgagcttatagacgccgtcacgtaccacctcgctgattcgatagggaccttccttgttagttcccagttttccagcgtttagctctctcgtgttgctgaacacttttcgtaaaacgagctttcccacttcgaatcccgaattttgatattggagttatagtagcgggcggcagcttgttgatagttttgaactcggatcattgcctgatctctgcgttcatcgatgaagtccatgttgtcctgtaacatttgcgtgttcaggtccgagttagcaggactggcggtccttctcacgcttggtactattttttcgacagggattactgcttctaaaccataggcgagagagaacagtgtttcttgcgttgatttgcgaggtatagttcggtaggcccagagaactccgtgaagcacgtcggaccacattgattatttggaatcaagtcttttcttgatgttgctaagtatagttttgttgggggcttctgcttgtccgttaccttgtgggtaacggggtggtggtggtggtggtggtggatgtggtaagacggatcttccacttgtcgcaaaatgctttgatttttcccgaggtgaggttagtctcgttatcggtgacgatctcataaggtatgccatgtcggcatacgatattttcccataggaagtcctcgacttgtttctcggttacctgttggaaggctttagccgcgatcgagttggtagagtagtcggggaggaccaacaggttttttagtctcttcttccctcggaggcttccatgggacctacgacatccatggaccacttcataaatgggtaaggagaagatatcgaggacatttcctcgggaggttgatgaagagtaggtgcatgtcgttggcatttatcgcacctgagtgaatgagctatgcaatcggctatcattgttggctagaagtagccttgctttttgattatgagggcgagggtacgtccactacagtggctaccacattgcccctcgtgcatgcttttcatgaggtcttttgtttgttgcccgtaggtacacaccatatagggacctgcgacgctgcgtttcataagtctcccttccatgatgcagtaccttgcgctctaggctttgagttttctggtctcccacttgtcgg

SEQ ID NO: 165566 - DNA, 972 bp, Arabidopsis thaliana landsberg
ctttgataggttacgctgagaagttcctctacgtatgcttctgcatgcctactgacgaaaccttatgttggtgcatcctcctcccaactgtagacgtttccactgggaacaatgtgaatcgagctcatttgatcccctcgttaccctctcagccacgaaaagataaatggcaatcgctcgtcgaacgtcttgttcttggattgtcggtctcataagtggcaccacgtgacctccatgagagtggctcgtgtttcccctgaagtcagtgtagtggacggaaagataaacgtgtggggaggctgcaagtacaagcattactacgactggggagaagtgttcgatccaaagacacaaacttgggctgatatgtcaattccaaagccagtgcgggaagaaaagatatacgtggtggattcatgggatgttggaagctattactacttgccgagcacgagtatatcccaaaaagggaatcaagattcaaagcgtagcaaggattggtgtctaatagataagttgatatatagttgtggtaacgatggaggtatatattggtgtgaggcaggggagttggattggtgtgacgcagtagggatagattggagggaagtgtttggtttggagtttctgtcaaaggagctccgtgaatcgagagtggtctactttggtgggaaaatggtgaaagtgtgggagtcctacaagatcatgtacaatattagcttaaaccttgaagaattacttcccgagacccaattgaccaacttgaccgaacttggtcataatgttttggtcttttgggaaaagctcgaatgttgttgtgatggttttaagatcttggagatttggtgtgcggagatttcgttggaaaggtgggagggaggcgagattttggggaggtgtgattggtgccatcctatcctcgcaatcaatcttctcacggtcgatcctctcttctaccactctatggtcttg

SEQ ID NO: 165567 - DNA, 1188 bp, Arabidopsis thaliana landsberg
cacatgcaagttatccccgtaatcgatgcaactcaaatcttgctcacaagcaaccatacctactcagacaataccccgtctaaccggccgtgtcgtccaagacagagtttcctatacaccacagacggcgacaagttcctctctcaagtcgtccgtccgccacttcacattctcatgcgccggtgagaaagccctccaaggccttcctcctccagtcgacggagttctggctctttcgcccggatcttcgtcgttcacgaaacaagtgacgtcagcgtttaacgtcatccctaaattctctctctgcttgccttcttccggtaccggtcatttctatatcgccggcattcactactttatcccaccattcaatagtagcgataatccgattccaaggactttaactcccattaaaggcactgactcaggagattatctaatcactgtaaaatctatctacgttggtggaactgctttgaagttgaaccctgatttgctaaccggcggagccaaactcagtacggtggttcactacaccgtacttcaaaccgatatctacaatgctcttgctcagtcttttacactcaaggctaaggtattcaaaacaaaatatattattcatgtataaaatttcttatctctttattggagttcctgtggagtgaaccatgatttgagatttttaagataaaatatcttattaaactattattagaaatgtgttccgttaaattataacgttgctaatgttattgttttgttgtatatagataagctgatataacctcttttctgtcttgtgtgttctggtgtgaactatatatacaggctatgggaatagctaaggttccatcggtggcgccgtttaaacattgttttgattcacgcaccgctggaaagaatttgacggcggggcctaacgtgcccgtgatagagattggtctgccggggaggataggggaggtaaagtgggggttctacggtgcgaatacggtggtgaaagtgaaggaaacggtgatgtgtttggcgtttatcgacggtggaaagacaccgaaggatttgatggtgattgggacacatcagcttcaagatcatatgctcgagttcgatttcagcgggacggttctcgcttttagtgagtcactcttgctccataacacaagctgctccacttggccttcccaaaaa

SEQ ID NO: 165568 - DNA, 4381 bp, Arabidopsis thaliana landsberg
  unsure (1)..(4381): unsure at all n locations
aaaatttctccggagcccatattaccaagttgatacaccccgatgcgaggccgcccgatggtcgaggacgaggccgagttcgaggacgcgtcgagaatcctacacttggacgaaggatcaacccgcaggaaacgagcaggaatattgtgagttgcacaagagttacggccatcatacttccagatgtagtagcctcggagcaaagttggcagcaaaattcctagcaggagagatcggtggaggtttgaccatcgaagacttggaagcggaaaagggtaaaaccgagaaggtcaatgctgtggccaatcccgagcaggcggcccccgcggcgaacatcgaaggacccaaaagaggccgaggtaatagcgaagcagacgacgacgagccagaagcagctcgggggagaatcttcacaattttaggagattcggctttctgtcaagacacggcggcatcaatcaaagcttatcaaaggaaagccgacacggatcacaactggacgcggccatttaacagaccaaatgacgaagtaacttttcacgaaagcgataccaacggtttagaccgtccgcacaacgatcctttagtcattacactgaccatcggtgatttcaacgtcgaacgagtcctagtcgacacgggaagcacactagatatcatttttcttacaactctgcgagaaatgaagatcgacatgacgcaaatcgtaccaactccacgacctgtgctcggattctctgggaaatcactatgactctcgggaccatcaaattaccagtccgagccaaaggggtaacaaaaatcgtcgatttctctgttaccgaccagccgaccgtgtacaacgcgattattggcacaccatggttaaatcaattctcgagtgtcgcctcgacgtatcatctttgcccgaaatttcccacaagcgacggcgtgaaaaccatctggggaaatcagaaaaatgctcgaatctgcttcatggcagcacacaagctcaggaaccccgtcactgaatcgacggccgacgcgaatcataagaagccaagcttggccgagctgaagagaagtcaatctccgagcagttataacagctaaggatcgaggaggctcgggaatctgcaacaccaactcccgatcctgtattcttaatctgccttgacgacgaaaagcccgagcgatgcgtagaaatcggcggagatctgggagaagaactaacagctgaactcacagctttccttaaagaaaacgtcaatacattcgcttggtccccagaagatttgcccggagtaagtgttgacatcgtatcgcacgagctcaacatcgatccgactttcaagcccatcaagcagaagaggagaaaattgggtcgggagcgagcagaagccgtgaaagctgaggtagagaaattattaaggatcggatccatcaccgaggcaaaatatcccgattggatcgcgaacccggtcgtagtaaaaaagaaaaatggcaaatagagggtctgcgtagatttcacagaccttaacaaagcgttcccgaaagacagcttcccattcccacacagcaaccgcctcgtagaatcaacttctagaaactaactattgtcattcatggacgattcggtggnnnnnnnnnnnnnnnnnnnnnnnnnnnnnntcaagaaaaaaccattttttacacagaacaaggcattttttgttaccgagtgatgcccttcggactcaagaacgccggggcaacctatcaacgttcgtcaacaaaatcttcgcattacagatcgggaagacaatggaagtttacatcgaggacatgttggtgaaatccatgacagaaaaagatcacatatcccatttacgctaatgtttcaagcagctcaacctctacaacgtcaagctcaatcctgcaaaatgccgctacagagtaagatctggcgagttcctcggatacctagtcacgcaccgcggcatcgaggcaaatccgaagcaaatcgaggcattgttgggaatggcgtcacctaagaacaagcgagaagtgcagcgcctaaccggaagggttgcggcccttaaccgtttcatctctcgctcaaccgacaaatgcttagccttttacgatgtgtttcggggaaacaaaaagttcgaatggatgacccgatgcgaagaagcttttcaggaactcaagaagtacctggcaactccacccatccttgcaaaacccgtaatcggagaaccactatacttgtatgttgccgtatcgaatactacggtcagcggagtgttagtccgagaagacagaggccagcagaaaccgattttttacgtctcgcagaccttcaccagtgcggaacctcgctatccgcaaatggaaaaacttgctttagagtcgtaatgtcggctcggaagctgcgaccttacttcgaattccattccatcatagtaatgggatccatgccactctcgccatcttacacaatccaagctaatcaggatgtctggctaagtgggcaatcgagctcagcgaatacgacatcgagtatcggaacaaaacatgtgcaaagtcgcaagtcctagccgatttcattgtcgaactacccaccaaggaggcccgggaaaatccgctcgacacaacttggctgtctgcacgtagacggctcgtcatcgaagcaaggctcgttgtgtgaggcatccaccccacctcgccaacaggagaggtcctcgagcagtcatttagattaaacttcgaggctaccaacaatgtggccgagtacaaagcgctcgttgccggactcaatctagctcgcgggctaaagatagaaaaaatccgagctttttgcgattcccagctcgtcgcgaatcagttcaacggagagtacacggctcgagacgaaagaatggaaggctatctgactcatgtacaaaatcttgcaaggaatttcgaagagttcgagttaacaaggatccctcgaggggaaaatacatcagctgacgccctagctgctctagcctcgacatccgacccgagcttgagtcatcccagtagaattcattgagaagccaagtattgagctcgacgaagaagaaaatgtcctccccatacaaatcggcacggatcacaacgacgctccaggcgacaaccaagacgagtgcagttcatagtggatagagcccatcaaaggctagatagccgaaggaaaattgccctcagacaaatgggaagcttggaaactcaaagctcaggctgcacgtttcgttctagtagatgaaaaactttacaagtggcgattatccggacccttaatgacatgcgtggaaggagaagcggtttgcaagatcatgaaagaaattcacggtggctcgtgcggaaatcattccgggggaagaactttagccattaaaataaaacgccacggattcttctggccgacaatgatcaaagactgcgaaaaattttcaaagtgatgcgaaaactgtcaaaggcacgcgccaataatccatcagccagccgagctcttgtcatcaatcgtctcgccgtattcattcatgcgatggtcaatgaatataattggacctatgcatccctcgaagcagaaaaaattagttctcgtcttgaccgattatttctctaagtggatagaggctgaatcttacgccagcataaaggacgctcaagtcgagaacttcgtgtggaaacatatcctatgtcgccacaggataccttatgagatcgttacggataacggctcgcagtttatatcaacccgcttccaaggcttctgtgataaatggggaattcgacttagcaagtcaacaccacgatatccccaaggaaacgaccaagccgaggcctcaaacaaaacgatcctcgatggattgaagaaacggctcgatgctaaaaagggctcgtggtccgacgaactcgaaggtgtactttggtcgcatcggacaactcctcgccgagccacaggagaaaccccttttgctttagtctacgggacggaatgcataattccggccgagatgatagtgccaagcctacgacggagtctatcccccgagaacacccctgataacactcaaaggttcctcgacgaactcgatctgattgatgaacgaaaagattcggccctggttcgtatacaaaattattagaatgaaacggctcgtcattacaattcaaatgttcggcaacgaagattccacgaaggagatcgggtctccggaaagttttccagaacactgccaaaccgaacgctggaaagctcgggacgaactgggaaggaccgtacttaatttctaaagtcatccgacccgtagtgtatgagctcgctgacttaagtggcaaagccgttccaaggtcatggaacgcaatgcacctaaggaaatactacaac

SEQ ID NO: 165569 - DNA, 500 bp, Arabidopsis thaliana landsberg
ccgcttatgagatcagtaaggagctggcttgggttacccgtgaggtacagacacctttgggggtgcattccagcaaggtattaaaagatcagccagttatagcgactattttaagagcaggtctgtccatgcatcaaggggtgcttaattattttgataaggcagacaatacttttgtttctgcttacagaaagcacaatgaggatggcagttttgatattgttttagattatgtcagcagtccgtcaatccaggaccggattttgattatttctgatccaatgcttgcgacgggaacttctctggctaaaacaataaaagccttggaacatctgggaaaaccagccaaaacctatattattgcagcgatcgccagtaagcaggggattgactatctggagtcttccattggagagcagctgaatctctggtgcggaaatatcgatgatcagttggatgacaatggttatattgttccaggactaggagatgccgcgaga

SEQ ID NO: 165570 - DNA, 610 bp, Arabidopsis thaliana landsberg
tccagaagcaagagagtctctgtgccaacaagggaaagagaactggatcgagcaagtctctgaagcttcactaataatgttagatgtctgtaatgtgtcgaaagatgtcatggcactcgtgaaacacagcttgcaagatctacaactgactctacgtggcaacgaatcatctgatgtcaacgagaagatagctgcgtataatcggtataagaacaagctcaagaaggagacactgaaatgcttaaactgtttgaagaacatgaaaggaaacgaaggaagagtggccatgccaatagaacagaaccttctgtttgtcacagaagttttgaaagaagtgagaagagccgttgtgactatggttgagtctttgttctcacttggttgtgttccttggctcgagagaaaaccgagcatagggtcattttcttcgatctttacgatgcagttttgctgctttgatgatgcgtgggacgaagtagcgatgcggagcgcaagtacaaggttggaggctgcagagatcactgttgaggagcttgagatcgagttggagtgtattttccggcgactgattcagaccagagtttcacttcttaatattctcaccaactag

SEQ ID NO: 165571 - DNA, 3175 bp, Arabidopsis thaliana landsberg
  unsure (1)..(3175): unsure at all n locations
aaggtgtccaaattacgcacgccacgtgcaggagatattgatccaggcccgagaggtgaacagagaattcgctatccacgacctgctgcagttttgtcagtttaatatttatgccagtagcgatcaagggacttactatataagtgttcttcttagttttttttttctaggagttttgaagtcttgtcggtattcaaattagcgagccaaatacttcttcttcaaggtggacatcattcggtctgcgattttgaccaagcaaggataacgaggacctggtcctgtaacctgggtcagatggaaatctatcgttttgactttattgttttagttgtgtgtagattggtttttgttgaacattagtattgctactaatatcgctcttcttgggattattttgcagcaagaaccaaagaaatcacttttttcgagacgaaactctatctgttgacccttcttggaagttgtcaaaccgactggccaccttcaatagggatcgcaacgtaacnnnnnnnnnnnnnnnnnnnnnnnnnnnnnnnattgcccttccagcagcgcagccggatccactcgaagaggtcccacaggtccaaccgaaccatgtcgcagatccgcctataggtatgagtttcacttgttgtttttatttttacatataggccattgcgctagctacacaatcgagttactaagtaacaaacactacacttcatctgtttagttcctcccgattccagctctacttcagaccttccgcttatttccagaagaagaatgaggtgaccaagtcttcatgttcaacgagccaatgcgggacctctgctcgtgctgctgacctgtcggccgtggtggcctcagctcgaaccagccttgctgcctcacacactcaagcctcaacgtctcatccttcacttcctggggctaacgcctagacctctcctgcggcgggtcggcaaatagcaattagctggccgctcaggtctctgagccgtctgaagctgttagggcttacggtgcaccgtcttcttcgaagagagatcggctcctgccggtggtgcgcctgacagctgagctgatcgtgattgatcaggaggtcgccccttcaagagaagagagggtgaaacccttggctgctaacccggaggctgctgtgtccgtagacaggcgatcatcgggaaggtcccaaggctgaggccgaggatcaagaggtgggggtaggtcttcctctcaaggtccgaaccggtctcaggaggtgaggcagacgtccaatttaggtggaggatctgcaggaaacaggcctttccattggtcttacactcacgatcgtgatcatccgatcatcgaggacaaggctgggttggcgaacctgctccgacacatcaaagggaggaactgttaggttcccggtgtgaagaacatggcctaggcggcggcttatgctgacatgatggcgaaggagggccatgtcataatcgattactgtctccttctatttttatgccagttttaatttctgttttttttcggcaggcgattgctgctataaacaagttggttgctctctacgagcaacgtctaagcaaggatccttcggcgagcgagctcgaagaagggaagatcctcatctaggagttgatagcgagcgtgaagtcaggtcaggagcgcgaggcatcgttccaggtacgcttcggttattattttattgtatattttttattgatgatgtgatgattctgacctggctacgtttccaggcgtagctcgacaggttgaagatgaagctgtccacctcgaaagatcttgagaaaggttatgccgagaagatcaagatcatggagcaggagttcagagggttggaagcagataagcagatggcgaggaaccagattcatcgcttgaatgaaaaaaaggacgagctctctaaaagggtgttggacctcacttcgattgcgcagggagtgaacaaggcggttcacgatgctaaggttgaactggctgcctcgtattcgaagttgctaagtgggatcaaggataagtgggtcgccaagaaagagttcaccgtgctggaaagtcaagcagccgaggtggagtcaaacttggctttgatcgatcaaattgtgaaggctgctgtcgacctaaccgtggaaagaccttggtagcaagctgagctggatgatgtggaggcgaggtgcacatcaaaggaggtgtcggacttcactttgagcaagctggatatcccggaagtgtcggagatgttagtggtgcgtccaatgaatgtcgatgagcagggaacgccgattggtttggacgagttcgggagcaacaaagatacgtttccgcgaggtctcgaggaggatcctggtattgtctttgccacgccggtcggggggtcgaaggagtgtcatggatagcatcggcctgaatttaaaaaggaagatccgttgggaggtgcccgtccgtgacattatcgtttgggatctaagcaggtacgttagatctcgttaaattggatgaactgggatccatgatcgtttgtcacaattgatttattagttttggtgttggaaggatctatttccgtccccaaagacggcgccaaatgtgggttctgaaatccacactagagatttgtaaatagatttataagaaaggagggctagatctacacaagaactttgagatttatattgctaagaacgaatggacttttgtattgatgatagtagaacttttacaatgtagaatgagattacaagtgtaaaagtataggtgttagtgttaagctgaatgtatatgtcttccaagtcgtccttgcttccttatatagctctacgcacgtgggtagcnnnnnnnnnnnnnnnnnnnnnnnnnnnnnnnnnnnnnncaggtcagttatgagatatcaggtctcgtccgcgaatatctccttgtcagttcctaggttgttattcgcttatctcccttcattaggtaagcgggcttatcaggcccaagtactcattcgcgtatgtgggctcatcaactgcgtaggtcctctacttggtgggcttattgggcttttgtgggctggcctggtattttcgcaggtggattcctggaggggaatccagctccaacatttgcccccagctcattgagtgagtacgggaactcgatgagcggacatataggtcag

SEQ ID NO: 165572 - DNA, 2340 bp, Arabidopsis thaliana landsberg
atggaccaacttggtcgatatcaatacaattctggacatctagaggacgcttatggtacgttgattaggcttcccgtgtgtattttgcttgtgatctcggcattccattgccgaaggttcgaggatgcgcgcattctttcgattgaactatctacaaacgcacccaagcttgatgacgctgatgacaggaaagcaatccattataaatccttatgtggacgaggcttagccaacatggctttaggccactattacacagccgctgttttggtacgtaaactcatatagatttatttatgttttgtttataattatgtttggtgtaacttatattcatcaatatttattgttttcgcagtttgcgcatttggtcaaatgctatgccaagtggccaaaaaactcttttgacctctttacttgggaggatttgttcatgtacacggcatggtgtggtcttgccacgatgaaaaaagatgagcttgaggtaatacaatattaattgattatatatatataaaaataaataagccgacttgtaaactttttttattgatgattttttaggagatttctgagaggatgggaagtcaaaaagttggccaccatttccaacacttgattagaaaaactcttggagggtaatatataactcttaaaaaatttctattgaatacacttgtcggcaattaaacaagcttggtttatttgttgcaggatgtttaaaccaccatgcttggattttttgaaaactcattcaaaaccaaagcacttttggacttatacctccacgaccatgtgaatgctcttgagatcctcatccaggagaaatttagggtgtgatgcatggttgctttaaaactatctagttttgtcttttttgtaaggctaagtattttcttgtctctcttggaacaagagtgtttgcaagttttcttttatattcaagtgtgttggacttagaaaggtttgaaaaatcgtactcaatatcaacaacgaatcctcttaagatggttttgtttttgtagataaatttggcttttagttcccaccaacatttcttccatgggtttaagtgttgatcatgagcttaacaagtcattagctatatcaaattgccaaaagactgattctcaaaaccgatcaagaaagaaagcatcattttataatctaacttgtgtagagtactgaaaatttgatttggaaattaattctcaccgacttaacatggaccagatgtacttgatcattttcaatataacaaactagtgcaccgtaccgtattataaagtctttctgtatttttttttaatataaaaacattttcagatatatttatttccaataaattcatttattttaagaaattaaccaaaaagaaataaaaatgaacaaacatatataagtatcttgattagaagaagcacgacacaaaccctagatgagtgagtccgaggaaaagacatgcaacgacgatccaaagcagccgacacttgtcctagacctggatatatcgatcttggatcgcttgagattctctgattatcatcgagccagatgcatttcttcagaatggtattacgccttgaaatcgtgcatcagagtaacaactccatggatcataatgtttccatacaacacagattggaaagaaaattcatcatgtaagttgttcaatcctcgtgaccatagttgctacactttaagagatgtcgggtttgatctagctagtagtcgttgtttggccagttccggtagatggttccttatgttagaccatagaaacgattttcatctcttgaatctgtttactcgagagaggatttatcttccttgtctgggtgcaaccgatggatgtccgatagaattttggagaatcaataataataatttttgggtgactctcaatgaccaaaacaattctgcaaaaaaaaaaaaaacttcacatatggtcatgtgtcttagaataggcaaagctgttttgtgggtagatgaagaaaccagagactacttagttgtttggaattatgatggcttttttgcatatcacaagaaaggagatgacaagaataactggaaagtgattcaacctttaatgaatcaacgatgcgtggatatggtgtgtaaagaaagcaagctttacgtgcttactgatactcacgtcactgttcttgatttctcccacgctgatgcttctccaatacaatgtgcaagtttcaaatctccgaattatggtaatgattcgttttgcggcaagaatcttgctgtgactttgtcaggacaagttttgatcgttatacacagtgggggtgtctacaagatggatcctaaatcattagaatg

SEQ ID NO: 165573 - DNA, 1861 bp, Arabidopsis thaliana landsberg
atggcgggaaattataattatccgaatagcggtggttttaatcgagagtgggtgtacaagatgttagatgaaatgacggggaatttgacagcagaatacgttgcaggagtggaggagttcttgacatttgctaatagccagcctatagtacaaagttgtcgaggtaaattccactatccttgtgctgtgtgcaagaataaaaaacatattgtctcgggtagaaaagttagtagtcatttgtttagtcaaagatttatgcctgattattatgtttggtataagcatggggaagatttcaacatgaatgtaggaacgagtaattatgttgatagtacgtatctaagagagaattatgaaagtgtgggtaatgttgtagaagatccatatgtggatgtgggtaatgttgtagaagattcatatgtggatatggtgaacgatggatttcgttataacgtggggtttgatgataactatcatcaagacggtactaatcagaatgtggaggaaccggtacgtaaccattctaaaaaactttacaacttgatagaaggtgctcaaaatccattgtacgatggttgtcgtgaaggccagtctcaattatcgttagcagctcgagtcatgcagaacaaggcggatcataatatgagtgaaagatgtgtggattcggtatgtcaaatgttgacagattttttaccagaaggaaaccaagctactgattcccattacaagacagaaacatttatgcgcaatttaggccttccttattatacaatcgatgtttgtattaacaattgtatgcttttcctcaaagatggaagcctatggatgactaccgttgaagaaccaaagtgccatatagttgtatgtggtatctacccattggtgaccgattgaagagaatgtatcagagccacaagactacagctgcaatgcgttggcatgccgaacaccaatcaaaagaagaagaaatgaatcatccttcagatgcggcggagtggagatattttcaagagctacatcccatgtttgccgaagaaccccgtaacgtttatctcggattatgtaccgatggattcaatccatttggcatgtcgcgaaatcattttttgtggcctgtgatcctgactccatacaatttaccaccgggtatgtgcatgaatacatagtacttgtttcttacaattttgaattctgggccaaatcacccgcgaggtagtctcgatgtcttcctccaacctcttattgaggagctaaaagagttatggtctactggaatcgatgcatatgatgtgtctttgaatcaaaattttaatctaaaagcagtgttgctgtggacgataagcgactttccggcgtacagcatgttatcaggatggacaacccacggtaaactgtcttgtccaatttgcatggaaagtactaactctttttatctacctaatggaaggaagacgtgctggtttgattgtcaccaaaaatttctttctcatggtcatccattacggaagaacaaaaaagacttccgaaaaggaaaagacgcttctaccgagtatccacctgagtctttacccggtgagcaaatttattacgagcggttgtctggtgtaaatccaccaagaaccaaggatgttggtggcaacggtcacaaaaagaagatgccaggctatgggaaggaacataattggcacaaagaaagcatattatgggagcttccatattggaaagatctgaatctccgacattgtatcaatgtgatgcatacagagaagaatgttttggataacataatgaaaactcttatgagcgtgaagggtaaatcaaaggacaacataatgtcaataatggatatataacgatgtct

SEQ ID NO: 165574 - DNA, 913 bp, Arabidopsis thaliana landsberg
atgcggcatgatatgccttactggcttgtaagttataacatatggattccttatgtgcttaaatgcatatgtatgcttgtcatatgaggcatattactacacttccttgctaatcttttttgagtttccttaattctccttcatgttcattgtgcttttgtcctgtcatgtattagctagctatgtgttcttgttattcattcttgctaaaattacgaacacaatttagtaagaagcgttgttgctctttcttccaattcccggcagcttacttccaaactctccctttttggctaatggaatctctacgatcaaattgcaaaactctcatcaatgtgagcgacccggagaaccaaattgatttctttcccagtagatcaaacatattagaccatagtaacaaatgattgacataatgttcaatctttcagagcataaactgtttcggatgctgcaacagagaaaggcgtttagttgtggaagtcgatgagccatcaaagggactcaaaatccaaggaaagatagtgaagaaagatagtgcttcatcagatgacttctggagcacaagtacgtgtgatatggaccacaatataacgattcagtcccaatcttcaaacccgccttttgatccccaatgcagcacaagcaactctaccgaatttgtaaaccatggtaacttttgaatgttctaacttctaaggcctaggttgttttggatgccaaaaacttatgttatgaagcaagcagtatttattactcattcagttattctatacactaaaagatacactactacttattcatttccttccataaaaggacttattttgtggaaccacacgagacaacaatggcgtgaatgcttaaccagacaacaatgtctagttccagaacctgctataggtgacaacca

SEQ ID NO: 165575 - DNA, 1701 bp, Arabidopsis thaliana landsberg
ggctctgtaagattgtaacgggttgcagctaggaggcatgttcggagtttggtaccttctcaatatttactacaacattttcaacaaacaggttccttctttgcttcatttaattaaacagaccatttcaatgcaagaagcagtactcgaacctattatcagtcttcatacaagtatgaaacttgttcattcatcgatccaggtacttagggtttatccatatccagcgactgtaacagcatttcaattagggtgtggaacgttgatgattgctataatgtggctccttaaactccatccacgccccaaattttctccttctcaggtaaatcaaatattgattccgtcaaaccctaaaaacagagagattcattcaattgtaatcctctccagtttacggtgatcgtacaactagcagtagctcacacgttagggaacttgttaacaaatgtgagcttaggaagagtaaatgtctctttcacccacactatcaaagcaatggagcctttcttcaccgtcttgctttctgttctcttgctcggtgaggtaagcaaaacaaagatacgctctgtttcagacttaatctataaccttagattatacaagagagttatattttcagacataatctttgaaattttgattaatgtccagtggccgagtctgtggattgtttgttcgttgttacctattgtcgctggagtctctttagcatctttcacagaagcttctttcaattggtatgaacaacaagaacaagaacaagaacaaaaaaaatagtattcttgataaacttttgatgaagttttaattgatttgattaattcatggtattgggataaaccaggattggtttctgcagtgcaatggcttctaatgtgacgaatcaatcacgcaatgtcctcagtaaaaaattcatggttggaaaggtaaaagagtttgaatataagttatccttatgatctcaagaaagaaactagtaatcgaaatctattaatgtttgtatattgaaacaggacgctttggacaacatcaaccttttctctataataaccattatctcctttatcttactggttcctttagcaatcctcatcgatgggttcaaggttactccttcgcatttacaagtagcagtaagtggaaaagcataaaccgatatagctagatgatctaaaagagaaagaactaatgtgtgtttgtatgtggttgcttgacagacaagccagggtttgtcggtaaaagagttttgcatcatgtctctacttgctggtgtttgcttgcatagctaccaacaggttggtccgtctagttcctccgtttcagaaaaactgtactgaattttgtaaagtcggttagtgttaggcttctaatcaacacataaaaattggggttgttgttgtaggtatcgtatatgatattggagatggtgtctccagtaacacactctgtagggaactgcgtgaagcgtgtggtggttattacatcatccattcttttcttcaaaactccagtctcacctcttaactctataggtaaacaactactagtagtatatattagtaaaggatttgttacacttgttcattttattgaagcaatatataatcacttgttaaataaacaggtaccgcgactgcactagctggagtatatttgtacagcagagccaaacgagtccaagtcaaaccaaatccaaaa

SEQ ID NO: 165576 - DNA, 1562 bp, Arabidopsis thaliana landsberg
  unsure (1)..(1562): unsure at all n locations
cgatggtttattatatatatatatatatatataaatatatataanatagggaattgtaatgatgcctacatgcaaagaggccaactccacgagcacatagagagagtcacgctttaaaccaaacaaaacaaatttgttgacttaaaccaaatccactctctcattttttttgcctttgagtttctgactactgacaaactctttcaacgccctagaaaattatgcttttggtttcacattgtttgttttttgttgtattcttttatttattagtaattgcgtccacagatccaaaaccaaagccattatcatcaattcatccactaacttaactatttatattatactatattttatttcaaaaccccagaataaaacaaaagttgtatattggagtgggcaggcacctccacaaaaatgaaaacttcccgttaaaattcaccgttctgttttacggtttttatttatttacatgacttagtatcatagattcatttagtagtaatataagactgcgtaagagtgtctgcagaattttcacaatcagtttcaatgtttcatccaaaattgtatcatacagttggatcatacggtccttgaaagagctaatagtgaggtgggcttgtgatgattaaataggcccagtgattataaaaggcctcgttacagaccattactaacacgtgtgatgcgcggatgcggcataagatactgttaaacagagccgatgccgacaaaaatgaaataaactatttaagctttttaattaatgatttaattaattggttttggcagtaattgaggaggaacattcaaaagacagacactttttgtcatgttaataacagtaaagggagcgtggatcatggccgacggtgtttgtaatggcagtatggtggggatggaaatggaggtgtggcaacatctttggcgggaatggtaagtgtagggaccgtgttaagtttattaaggatttggcggaggaagtggcgatagcgaatgcttctgtgaaggggaatgaggtgcgggtgagtagagtggagcggtcggtgtcttgggtatcaccgggagacggttgggtaaagttgaacacggatggggcttcgcggggtaatccggggtttgcaacggcgggtggggttttacgggatcataatggagcgtggattggaggttttgcggttaatataggtgtttgttctgcacccttgactaagttgtggggtgtctactatgggttattcatcgcttgggggaggggagctagacgggttgagttggaggtggactctcagatcgtggttggtttcctaacgacagggattagcgattctcatcctctgtcattcctagtacgtttgtgctatggctttttatcaaaggattggatagtccaagtttctcatgtgtatagggaagctaatcgtcttgcggacgggttagctaactatgcgtttactttacctcttggttttcatttatttgactctgcaccggattgtgtaaccccaattttgctggaggacgcaaacggtgtgtcgagaatacgtaatgtgcggttg

SEQ ID NO: 165577 - DNA, 975 bp, Arabidopsis thaliana landsberg
tgagctaatggctcgagaactctgtttttcttcttcttatctttcaccacctcattaatccgaatcttagcagctgttttataactgatctgggagtcttaagtgagattcaacagcagcaacatgttggcaacagagctagctcgatagatccatcatcactcgattgattgttatctgcgacgtcaaatagcaacaacacctcgacggaggacgatgaaggaatatctgtgcttttctcagattgtcagactctttggagctttggtggagtctcatctgcagagtctgagaacagagagatcactactgagacgacaacaacgataaagcctaagcctttgaagagaaacagaggaggagatggaggaactactgagactacaacaacaacaacaacaacaaaacctaagtctttgaagagaaacagaggagacgagacaggaagtcactttagtcttgttcatcctcaagatgattcggagaaaggaggtttcaagcttatatacgatgagaatcaatcgaaatcaaagaaaccaagaacagagaaagaacgaggcggttcttcaaacattagtttccaacattcaacttgtttgtctgacaatgtcgagcccgatgctgaggcgattgcacaaatgaaggagatgatatacagagcggctgcatttagaccggtgaatttcgggttagagattgtggagaagcctaagaggaagaacgtcaagatatcgacggatcctcaagcggttgcagcgagacagagaagggagaggataagtgagaagattagggttttacaaacattggttccaggtgggacgaagatggatactgcatcaatgcttgatgaagctgctaattatctcaagttccttagagcacaagtaaaagctttagaaaacttgagacccaagcttgaccaaaccaatctctctttctcttctgctcctacatcgtttccattattccacc

SEQ ID NO: 165578 - DNA, 403 bp, Arabidopsis thaliana landsberg
aacgttgcaccgcgggcacgtttcttatcttgaagagaccaaaaaatactgctccaagctggtggtgggcatcaattccgatgaatcggttaaaatgctcaacaagggcagcaaccggccggtgaacaaagaagctgaccgtgcgtatgtactggctgggttagtttttgtcgattacgtggttgttttcaatgagtccactcccctttcattgatcgagatgataaaacccgattatcttttcaaaggcggggattatgatacagacgtaaccgacagcaaagatcccagatacattgtgggcagcgatatggtgagaaaaaatggcggacaggtcatgaccattcccctggtccagggattttccactaccaacatcatcgaaaaagcacattccgtttaa

SEQ ID NO: 165579 - DNA, 443 bp, Arabidopsis thaliana landsberg
  unsure (1)..(443): unsure at all n locations
tttcaaaaacccaagagaaaaaaggacgtccattctttcgttttgttaggaataaagatgtgaatacttggacanccaaaagagatgtatgtagaggatagaaatgagtcgacatttttttgacaagctaacaatgtatctatgtgtttgtgcattagggtcatttgtttaagtgggtagaggatcccgtgtttgaagaagtcgaagatgctttaccaagactagccatcgtagcaaatgagattagcaaagttaaagcagaaacaaatgagatgcttaatcagatacaagagctgaaagaagaagccatagcgaggaaaaaggaactcgtcaagtgtaaaaggtggttgtatgtgtgttttctgttgctttgtgtaatcacaattgtggttgcttatgttatgtttggtcaagggaaccaaaagaaactttcaattggttat

SEQ ID NO: 165580 - DNA, 1201 bp, Arabidopsis thaliana landsberg
atggagatgatgcaggattcgttccaagtccataggattccacaatcgaagtatgtcgatggagttagatggcttccacaagcttctgctttgaatcgtttcttcgcaacagcgtcctatgacgcggattgtgattcttcatcaatcgagatccaatcgctcgacccaaaccctagagggaatcacaacacgaacccgttaatcgagtcgttatcttcatggacttcaccttctcgcgtttcgtctctagaagtcgcgggaaacggcggtggtggcggttcattcaaaccaatggtttcagcagctacgtcttctggttctcttcacgttctgatgattgatttggtggaaggagctgcgattgaagaggtttacgcggcggaaggggagaggtttcatgtgggacgcgtggaaggtgtggattggagagagggaggagaatgtgttactgttggtgaagatgggagagtgaatgtagtgaagattgtgaatggtgaaggtttaaggtatagaaaggtctttgatgggaatggattggtggcttatagagctgtgaaatgggcttctccgactgagtttgttactggaggatatggttttggtttgcaattgtgggatcagaggaagtctggtgaagctgtttcacaactcaaagggaactggtgagttcttaactctgtttaatgattgaataaatgctagttcaatctggttttgaattcctggcatgtttgctcttcgatgatatggaacttgaaagtttgtgcgtttggctttagaacacactcgtaatatttgatttggtgagctgtttagcaagtagaactaagaatgggaacggtagatcctttgagttaatagtctatataagaagcatgcctatcctactgtgtctattctgattataacattgcaggtttcaaggcaaaacttctgcaattgtccactccattgacattcatccatctcggaagcgcacttgcattgtaagtgttttttcttcttcgcatgtgttagatgtcttttaaagttcttatctgtttgaagtttgaaaaacgtctttcccatcaactgatgaacatgataattcctagtgtgatcctcaatctttaccaagtttttgggtacatagcccctggtaatattccttcatatttcaaaggagaaaaaagtgaatcattttgtttctgtgtttagaata

SEQ ID NO: 165581 - DNA, 2295 bp, Arabidopsis thaliana landsberg
atactttatttcattttgctttctttcttaggacatgcaattttaagttcagacaagaccagcagaactcgacacgtaccctctcccaacatgcacacctcctcctgcctcctggctcttttcatataatataactattttaaaaaaaccacgatatatgacaacacaaagatcacgatccatatatacatgtaacttaaccgccaaaaaaaaaaaaaaaaaaaaaaggacacttaaccgccaataaagtcaataattcacgtatataacataaactgatcaagcaatcgcaagggatcatttgcttttacaaaacatatatacataactattatacactccaaaaaaaaaaaatggtggaggtccaagatttagaaccacttagtccaatacaggactacgatgaagatgacctcgaagaagacgtggacgaatttgaacgttttggtgaagaaatcagctacgacgatctcaagaaacgcatgtggaaagatcgaaacctcatgtgtaagcttaaacagcaaaaaagagataatcttaactccgttatctcttcgccgtcatcttccacgtcagcatcatcctcttcatcatcctccgttatcgtgcgccgaactgaagcttcacggcgcaagaaaatggctcgatctcaagattcggtgttgaagtacatgatgaagataatggaagtttgcaaagctcaaggattcgtttacggaatcgtaccggaaaaaggtaaaccggtaaccggttcttcagacagtttaagacgttggtggaaagaaaacgttcaattcgaccaaaccgctccaaacgctgtttctgattacttgacattagcggctgctcagttaatctcatcaaacgaatctttagatccgaattcgtatatccacatgcttcacgagctacaagacacgacgttagggtcattgttatcagctttgatgcaacattgcgtgccgccacaacgacggtttccgttggaaaaaggtttggctccgccgtggtggccgaacgggacagagttatggtggggagagcaaggagctgcggcgtttgaacacggtccacctccatatcgcaaaccgcacgatctaagaaaagcttggaaagtgagcgttttagcggctgtgattaaacacatgtcgccgaatttggagagagtgagacggctcgcgagacagtcaaagtgtttgcaagataagatgatggcgaaagagactgatacttggtctcgtgtgttgaaccaagaagaagctcgtctcaatcgcctcaagatctcagatgacgaagacgaggatcgagatcaagaacaagcaagattcacatgttttgatcaagaaccgtctctaaacacttgttttattgtagggcaagatcaagaaccgttgggatcaatgaggaaagacaaaagggttgatcaggaattttcctcgaacgattgttttcttgtagcgcaagatcaagaacctaggaaaggaaaaaaggctgatcaagaatggtctccaaattcttgttttcttgttgatcaagaaccattaggtaacaagagaaaaggtgagttcgtggaaaaagaggcgatgttatctaatgtatacacttgccaaaactcgagttgtccttcgagtgatgtgagtttaggattcgtggacaagaacttgagaaccggtcacgagattgagtgtctttacgggactccagaactggtaaaccagagtagtggtggcggctcggatgggtttgttcggtcgattactacgagtgacgatgattacagcgccagctcgaaagcagaggacacaagagattatcataatcaagatggaaactggctagattatctctggttcgagaggttacatgacttgaatttttctgatcaaggatttgaagatcaaacaagcacagtggatttgaaccaattaccagatcattctgactccaatcagaccatgaacgaggatgacatctcgttatgggacatgggttgtgaagacaaagatatttatatgtctcaagattgaaaaaatctcaactttggaatatatatgccctagttacaatgtattaaaaacagagttaagagaataacagagaattttgttgttgttgttgttgttgtttgttgatgatccaaagctatacaatcaagaaataattttctttaatcaaatttttttcaaaaagaatttgtaacaatcttagtcataaaaactatgcctttgtggaatagccacatcttcaaccaatcttacagccgcacaagaataacctttcctgaatctacctttg

SEQ ID NO: 165582 - DNA, 1421 bp, Arabidopsis thaliana landsberg
agcatccgcatggcgagactatggatgttttgggaatccgagaagacgtggagttcttgtttgatatgtgcggcttgacaagatacatgacctatgctttcgagagctaccaagactacacatgcgagctcctagcaaccttggaggttcatttcttttcagctcaaggagaagaacaggcgggtagaggtttcggttacgctactttcaccgtgggaggacgagactactctctcaccatcaaggagttagacaacctctacggtttcccgtccaaggagggtcttgaacaagattttgacaagcttgagcttacgcagttttggaacacaatagcggctccgggcgatttcaactcatcacggtgcaagagttcatccattcgcagcccggtgctaaggtacttccaccaatgcatagctcatactttttacgcgaagaaggtgacgggtcctatcaacgatagcgtgctccaaatgatggatgaagctgtcaagttggttctaaggaaaacaaaaaacgggagagtgatggaaggagatcgggctaacacgtctcttacggtgttgttcttggactacttgatggggttaaaggactatgcggctcagctccacaagatgaaacgcaagggatcaatcgggattggaggtatgattacacctatgttagtagctgtgggtattgacttaggaggaccagatagatcgtcggcatggattgacattgcctatttgaggaagaagaacatcttggacaagacagccccctccagtgtgcatacctacttgttcaaccaccccgatgaggggagctctaggctgctcctaccttgcgccaactacaccaccattaggaacggtgagaacattaatttctaccctcctatccatgcactctatgatgctccggagaacataccgccacctcgccaagagcctctacaccccggttacaacgagaccgatgagcaaccgcaagatgaagctagcgagtacttcccggagcggttccactttgacccatacgtcgccactaggcaatcaaggagcgagagagcagctcaccaaagggtcggattgcttcaagggttggcaaagttacaagggaaggttgctaaaagcctcaccaagaaagtggaatctctcgcgcacgcggtgaaggagatgggactccaaatcaaagaactccaaaggaagcacaagtctcctcccccttcaagtgaaaacgaccgagttgtccgtcgaagcgattctacgagcatggcggatagatttgagcaaagtgagaacccggttgagcctagccaaggaccgtcatttgagcccagccgagcctcctcttatgagccacgggaggcatccaccactaagcaccggaagaaggtgaagaccaagagaaggaacgctccccaggccgag

SEQ ID NO: 165583 - DNA, 1100 bp, Arabidopsis thaliana landsberg; identical to SEQ ID NO: 798

SEQ ID NO: 165584 - DNA, 1394 bp, Arabidopsis thaliana landsberg
atgggttcggacccatttgcttcaagttttctggggatttggtaatttacctttctttctattgcggcttaacagcttaagaagcttttcacttaagctctgtttgagtgtgtagagtatcaatgggagagtcagtcataaacatgtgcgtggaagtggcacggtgggatctgtaggttccgctcgtgaaagttggagctctcataagaagcttcccgaagaagagcccttatggctgagtcttcttagagacatggtctggtatgaaattctcccactgagtctagcttttaatatatatatctgctggaagagtctgaatgttgcattatattgaattgcatttttcttgtgagaaggagcacgagatctctcttgtctttcatggctgagcaaccaagtcagctgaaatacatagagtggccaacttttgcaagcacggtatgtcttgttgttgttgttacaacatatgagaaagaaagagatagtttgtgggtgtaactttgttttttttgttttggtaacaaacagctaaagactgctacactgagtctgtgtctggtagctgtattcattgttgcgctatcatcggtggatgctgctctttgttacatattggcgttgatcttgaggaaagccccatgaggaaggcaactccattatcatttgtctcttgtagccttattgataggtaaatgtttttgatgtagatagaatgcaggaggatgtactcaaaatcaatgtgtttctaaaagttgaattgaaatgaaacctctctggtctagtatctctcacacattaagggaaatccaatcatatatgtcccaagcaaatcacaccataaataataaggaaggattcaacatgttgttggtttacaagtaagagaataagatgatgctaggtgctacttgagaacaacagcagcattgcgaatggagagatactggtggacttggtcggaagaaagtgatctcacagtctggaaaacatgagcattagcatagcggaggtttgttcttgggtccacataaggtgcctgcgagggattagagaagctcattgagttttgttgtttttgggtagtgaataaatttgtagaaaagaatcgatcactcaaaaacagaataaaacctcatatccagtaatatcgcaaagtctcttgcatggttgagtggaaggaggcgattcaatgttaacatctgcgaggcacaaagaagatttgatttttgattcaaacagagtcaaaaatccattcaaagtcagaaatcagagagagagaaaagagttacaagtggggaggtcgggaggaagatctgggaagttctcagcttgaagaatctgcttgaggtgtttccaccttctgctgcttgattgtgcttttgggtactttt

SEQ ID NO: 165585 - DNA, 565 bp, Arabidopsis thaliana landsberg
tgagtttaaatattcagcttcctaaatttgaaggacctctggctttgcttctctatctcatccgcaaggaagagatggacatcatggacatcaaggttcacgagatcacgaagcaatacctggattacatcaaactgatgaaggaactggatctggaaatcgccggcgaattcatcgccatggcgtcgaccttgattcacatcaaatcgcggatgctgttgcctcagtatgacgacaacggcgaagtcgtcgagcaggaagacccgcgcaaagaactcgtgcaaaaacttctggagtatcaaaaataccaagaggccgccaaggctctctacgagcgccctctcttgggccgcgacgtgtgggcgcggggcgaacgtcagactttgcagccgaaggaagacgaaatcgttttggaagacaatgcgctgttctccctgatttcgacctatcgccgggttctgcgctcggtgaaaaagaaaattcaccaggtcaccgaaaaaacccagtcgatctccagccgtatttggaaatcaaggatcgcttggtcctgggacgcctgagagcc

SEQ ID NO: 165586 - DNA, 1721 bp, Arabidopsis thaliana landsberg
tgcgcaccatggcagcatgttttgcataccagtatcgggtatcagactttgctctcccctccaaagaatcaatatcaatctctgtgtcaagcatagaactacgtcgattccgcaaataaaacctcagagaacctgaccctggaactctctgagaattgtcaagtttataacgaggaacattcatcctgtattatgcaaacagaagcaaaatttcaatatccctacactcttaaaacgccttgcacagaatacagaaaatgaaaccaaccataactagacaaattataagcaaagtacctgtaaatagagccataagccagattatctggatcaggacgagtgtccaagtaataatccttcacaggtttcgaatagtattcatcagatttacgagaacgagattcatccgaagcattatcactcttccgtttcttctttttctctcgcttcctctttaccttgtcgtcatcagactccaaagacccttcttcttcaaccaaattataaaccctagcctgattagctaaaccgatatttccatcagctcctcgttcttcatcttcgtcgtctccagcctcgacctcggatgaggaaggagccgtcgaagcggcagcgttgatgacagagagatccgttttgatatctagcgttgcgaagccattgaggagcattcgtaatagctgagatggagttcgccgaagtagggaagacggggaacaagccgcctgtaattacctgtgctccgtcgccgtcttttggtgtattcgacattacatccaccggaaaaaacaaaaccgattatgtatttttttttgtgccgctatatatttctgccaaggatcgtgaatactgaataggcctaattattgggcctatataaataattaatgggctctattaacagtgaaagaatttactcattgtttaatgttcaacaacattcgaatttgaattcgaaactacataaccggtaaaatatttattgattaattattacgccatatttaattttactcgttaattcgttatgaaaaagtacagcaaaaagtataaaaaccacgtgcaatattgtaaagaataaactaaaatttgtgataaatttaggacagtgtaataaaaattggcaaaagtgtcattttgcttttttatttcccaccaaaactaatgattttccatggatccaaaggtaaacacattttggagaaggtaaacacatttgttttggagaattctttcaggcgtcgattcggctccttacccatggataatttggtatatatggaaagcaagaaatgaaaaaggttttgaaaatgtggataaagatccaatggaaatattgctcttagcggtaaaagaggctcaatcgtggcaggaagctcaagtcgagctccatagtgaaagtcatggttctttgtctatagataatcgaatttgggtgagggatgtatcacaagatacaactttttctggctttcggtgttttattgatggatcttggaaagcaagtgaccagttctcaggaacaggatggttctgtctatcatctcttggagagtcgccaaccatgagagccgtcaacgttcgtagaagcctatctcctctacataccgaaatggaagctcttctttgggcgatgaagtgcatgattggagcagataaccagaacgtagctttctttacagactgttcatgtcacgtatgtaaacaatatccctcgagat

SEQ ID NO: 165587 - DNA, 563 bp, Arabidopsis thaliana landsberg
attattgctaaacatgactctacatctcaagacaagaaataaattggttaatggttctgtctgataaaacaaaaaaattacacgtcaaatcataaaaagaatcgctattttgtacagaagaatccattagcaggcaatttccagaggaagcaagggagaaaaaaagcaggtacagaggagtaaggcagagaccatggggcaaatgggcagctgagatacgtgatccacatagagccgctagggtttggcttgggacgtttgatacagcggaggccgcggctagagcctacgacgaggctgcactccggttccgtggaaataaagcaaagctaaatttcccagaggatgtaaggattcttcctcctccccctcctcttcttcgttcaccagctgacacggtggcgaataaagcagaagaggatctgataaattattggagttatacaaagttgttgcaaagttcaggccaacggtcatttctcgagcgaggacaagaagagagtagtaacatatttgaacattcaccaatggaacaaactctgacaccttcaagttctggtcca

SEQ ID NO: 165588 - DNA, 1562 bp, Arabidopsis thaliana landsberg
agagctaaatctctgacggagattcaacaagctcacgcctttatgctcaaaaccggtctttttcatgacacgttttccgcgagcaagcttgttgcttttgctgcaacaaacccagaacccaaaacagtctcttacgctcactctattctcaatcgcattgggagccctaatgggttcactcacaattccgtcatcagggcttatgctaatagctctactcctgaggttgccttaaccgtgtttcgtgaaatgcttcttggtcctgtttttcctgataagtacagcttcacgtttgtgttgaaagcttgtgctgcgttttgtgggtttgaagaaggaaggcaaattcacggtctttttatcaagagtggtttggtgactgatgtgtttgttgagaatactttggttaatgtttatggacgaagcggttactttgagattgcacgtaaagtgctcgatagaatgcctgtgagagatgctgtttcttggaattcgttgttgagtgcttatcttgagaaaggtttagtggatgaagctcgtgcgttgtttgatgagatggaggaacggaatgtggagtcttggaattttatgatttcgggttatgcggctgcggggttggttaaggaagccaaggaggttttcgattctatgccggttagagatgtggtttcttggaacgctatggtgactgcttatgcacatgtgggttgttacaacgaggttttagaggtttttaataagatgctggatgattccacagagaaaccagatggttttactcttgttagtgttttatctgcttgtgctagtcttggatctttgagtcaaggtgagtgggtacatgtttacatagacaagcatgggattgagattgaagggtttttgactacagctcttgtggatatgtattcgaagtgtgggaaaattgacaaggctcttgaagtgtttagagctacttcaaagagagatgtcagtacatggaactcgataatctcgggtttgagtgttcacggtcttggaaaagatgctttagagatcttctcggagatggtgtatgaaggttttaaaccaaatggtatcacatttattggtgttctgtcggcctgtaatcatgtgggtatgttagaccaagctcgcaaactttttgaaatgatgagtagtgtttacagggttgaacctactattgaacactatggttgtatggtggatttgcttggtcggatgggaaaaattgaggaagcagaagaacttgtgaacgagattccagcagatgaggcttccattttattagaatctcttcttggtgcctgtaagaggtttggacaattggaacaagcagagcgtatagcgaatcggttactggaattgaatctacgtgatagttcaggttatgctcagatgtcaaacttgtatgcctcagatggaaggtgggagaaggttatagacggtagaagaaacatgagagcagaaagagtaaacagaagcctggatgtagcatgactgaagttgacggagttgtccatgagttcttagctggtgaaggactaagaatcgactaaaaattg

SEQ ID NO: 165589 - DNA, 546 bp, Arabidopsis thaliana landsberg
tttttttttttaaacatccaaaattttaacttgggtaagtgattttaagaaacattcacttcaaattgtaaagttaccgacgttgtgtttctatttcctgcatgttagttagtttggtctttactattcaagcagattcgagaataggacataaaagacattttccttacattagttttacagatacaagttatgtagtacgatatttttatgtgtttataggacatggttaggtccttgttccctcaagagtactcgacgaagtttattattgtttcatgcggaatttgatttcttgctatagacaatggaatacatgatctatattgacgatacttctggcgcttttgcttccgactgttcagatctgatttttatcattgacaatcaagaagattggccgacattcgcagcggaattggcatactatcgctccttagtttgttttttccttcttttcgtattagatttcttcttcgtagttctaatactcgagcagattgtttagctaagaaagttcagactcgtaatagctttttctcccat

SEQ ID NO: 165590 - DNA, 631 bp, Arabidopsis thaliana landsberg
atgcaaacccggtccaaaggttctgcacacatactacctttcaaagacaggatagacagaatagctcgtgagtgcaagaaaccaaaacaaaaacagcctcagatcagcaaagaccagctgctatggatcaacaaaataaccaaatgatgttcaagacccaccctaatgttgatcaaccaagaaacattggtgctggtgatgccccaatgaatcatcaccaaagacaagggatagtgccccccaccagttcagaacaacaactttgagatcaagagtggtctcatctccatgatccaaggaaacaagtttcatggcttacctatggaagatcccctggaccatcttgacagctttgataggctctatggcctaaccaagatcaatggtgtcactgaagatatgtttaagctcagactttttcccttctctttgggagacaaggcacaccactgggagaagactctgaccccagactccatcacctcatgggtcgattgtaagaaagcttttattgccaagttcttctctaatgctcgcacagctatattgaggaacgagatcataaggcttcacacagaaaaacaatgaaactttctgtgaagcttgagagagctttaacgctaaccactca

SEQ ID NO: 165591 - DNA, 466 bp, Arabidopsis thaliana landsberg
gctacaccaagccaagtagtcctagacatagctggacatccggttcagtccaatgtccaatactacatcataccggccaagatcggaaccggaggtggtcttatcccttcaaaccgaaatttaagcacacaagacttgtgtctgaatcttgacattgtccaatcatcatctcctttcgtctcaggccttcccgtaacattctccccactaaacaccaaagtcaagcatgttcagctctcagctagtctcaacctcgagtttgattccacggtttggttatgccctgactccaaagtgtggagaatcgaccactctgtacaactaagaaagagctttgtaagcattggtggtcagaaaggtaagggtaatagttggtttcagattcaagaagatggagatgcttacaagcttatgtattgtcctattagctccatagctgcgtgtattaatgtgagtttggagattg

SEQ ID NO: 165592 - DNA, 357 bp, Arabidopsis thaliana landsberg
  unsure (1)..(357): unsure at all n locations
gtggcggcgccgcgcgtttttcggcggtttttctgcacaaactcagcctctccttctttccccttcgttcctacgccgcctcctggcgccacccccactccaacttgacccacggcggagcccaaccccaacctcttcgtctctggtcttagcaaacgtactactacannnnnnnnnnnnnnnnnnnnnnnnnnnnnnnnnnnnnnnnnnnnnnnnagggttgtaactgatcgagtctcaggttactctaagggttttggttttgttcaatatgctacaatagaagaggctgcaaagggcatttgaaggcatggatggcaagtttttggacgggtgggttatatttgcatagtatgc

SEQ ID NO: 165593 - DNA, 665 bp, Arabidopsis thaliana landsberg
taaggttaaatgagttatgggttaacccaactcattttgttaaatgggttgagtcaactcataactcatttaatttaatgggttgaattgttaaataggttaatccatttaaataataatttaattaattattattataaaacaataataaataatgatcattattaattcattatcatcaaacttacaatatttacggattccactttttacgggtttacgtttttggtggaaaaatcacgggtttacgtttttggcgggaaaatcttgggtttacgtttttggcgagaaaatcacgggtttatgtttttggcgggaaaatcacgggtttacgtttttgactggaaaatcacgggtttttcgtttttttggcgggaaaattatgagtttacgtttttggcgggaaaattacggatttacgtttttggcgggaaaatcacgggtttatgtttttggcgggaaaatcacgggtttacgtttttgacgggaaaatcacgggtttacgtttttggcgggaaaatcacgggtttacgtttttggcggaaaaatcacaagtttatattttttggtggaaaatcacgggtttatgttttttggtggaaaatttacgagtttactttttctcaatttcatcgcttgtatgtttaagaaatttggaaaaatat

SEQ ID NO: 165594 - DNA, 240 bp, Arabidopsis thaliana landsberg
gtaaagttagccttttttgacataaaaagaaagcatttttatttgactatgtaattgttacattagttatttgaccaggtccagaagaagagatatatggtgccactatcaaacttgaaccagccttcatgtcaagctcttctcagtaaatcagaggaagtgtttgggtacgatcatccgatatgtggcttaacgatcccttgtcctgaagatgccttcatctctgtaacttctgcgcta

SEQ ID NO: 165595 - DNA, 960 bp, Arabidopsis thaliana landsberg
atccgaacaagaagaagaagacgagtcttaagatcttgaatgttttaaagtgtccactcgctgatcattactctcccgaccaagtttctcaattgactcagtccttagaactcaatgtctctaaattccaagaaaggcttcgatttcttgagtcgcagaaacagaatgagacaaaaccggatcatcagagtttaacatcaatatcttctctgaaccaatctttgaaccctagccagttctcgctgtttatgtataaccatggatataatactctgtctcagatcccagtctctgcatcaaatttcaatcaggattatatctcagcgttacttgaacaatctgagttgaagagtcagataatgaagcaggaggtttgtggttatgagcagaacatgtgcatgagtaaccatggagatgctacgctctctcaaatcccattctctgcatcaaatttcaatcaagatttttcagccaacaacaacttccaacattcttttgtctcaaacacacaagattactactctgttcaaaaatctgtgaataacaactatgggttgaagaatcagttaatgaagcacgatctttgtggttatgagcacaacatgtgcatgagtaaccatggagatgctaccttctctcaaatcccactctctgcatcaaatttcaatcaagatttttcagtctcaatacaagaagaatctggcttgatgcagcaggagctttgtggttatgatcagaatcagaacatgagcatgggtgacatcacaaacaacaattttcaagttacttgcgcctcagtactagaatctgtgaacaactttgggttgaatcagttgatgcacaaggagttttatggttgtcatcaaaacatgtctatgggtaacatcaataacaacagctttcaacatccttgggtctcaaacgcagaccatactcggcggtacaagaatctgtgaacaa

SEQ ID NO: 165596 - DNA, 986 bp, Arabidopsis thaliana landsberg
tgtcgaagagctagtgaaactgaattgctatcattctaggaaattcaaaacaattaacggtgtattactttatgtcaatggattggtcgatgtggttaaagtggatcctatgtctatattgtctaatatgtgttcgaaactcattgaaaaaaaactggaaattggaagaatttggtacaagctcccatttgacatactagcagatagacatcttctgggaaaatgttgaagttaataaaagcaaaatggaagcagcaggtcgatggatgaaagaggtagtcatctatgttgagaaatcatgtgagctgaatattgacattgagaaaggagtgttactgaaattgagaacgatagtgatgaagatgatgacccagcgtacgttcccgaagatgatgagacctcatatgatgaggttgtagatgaagaagctggtttgtctgataatggagaatcatgtgatgaggaagaggttgttgaagaagacattgaattgtttaaccatgacaattatgaagaataaattcgggacgaagatgaggtgtacccagctacggatgactcttctggtgatgaagaagaacaagcagagaggctgcttagaacgaatctacttgatggtgtgttcagcttgaaacaattatataccaatggtaaagagtttaagcagagtgtgataagatatgtattgaagacaaggtggaatgtagtgaatgatagatgggagaaaaccaaactgggtgctaggtgtaaggctaaagattgtgaatggcttatttattgtgtagtggagaatcctataagaaaatggatggttaaaagatttgatgataagcacacatgtcatcctgttggaagatatgacctaataagaagtcttgtagttgctaacttgtttcttgaaaacattagaagagatccacatatgactgctccagaaataaaagatgaaatgaaaaggaggtacaacattattatcacaccttcaa

SEQ ID NO: 165597 - DNA, 518 bp, Arabidopsis thaliana landsberg
ggcccacaccggcgcgctggcaaaggtgctcgggctgtcccccgggaccgtcaccacgacggtgaagcgcctggccgaccgccagctcgtcgaccaccgcccctaccagggggtgtcgttcacggcgagcgggcggcgcacggcggtggccgccatccggcggcaccggatcgtcgagcggttcctggccgacatgctcggctaccagtggaacgaggccgacaagctggccatcagcttcgagcacggcctccccgacgaggtactcgaccggctgttcgtcgcgctccaccggcccgagacctgcccccacggcttccccatccccgaggccgaggccgccgagctgcccgagacgcccgccctgtacgacctcgagcccgacgacatcgccgaggtggcgctgtcgggctcgacggacccggagctcgtcgccttcctcggcacgctgggcctcgatgaagagcgccgaggtcaccgtcgtcgagaagcaccccttcgacgggcggcttgtcgtc

SEQ ID NO: 165598 - DNA, 2825 bp, Arabidopsis thaliana landsberg
aggttcctgttatactatcgcactgtcacagctctagttatggtggtcattttgcaaccttcaagagaatatccaaagttcttcaagcaggcttttggtggcctagaatgtttcgggatgctcagaagttcatatcgcaatgtgacctttgtcagagaaagggaaagatcagcaagcgtaatgagatgcctcagaaatttatcctcgaagtcgaagtcttcgattgttggggtatagatttcatgggacccttcccaccttccaacaagaatctctacatcctactagttgtggattatgtctccaaatgggtagaagctatagctagtccgaagaatgattcggcgtttgtcatgaaactcttcaagtctatcatcttccctcgttttgaagtgccacgcatagtcattagtggcagaggtaagcatttcattaacaagattcttgcaaaattgcttttacaaatatggagttcagcatcgggttactactccctaccatccacaaacgataggccaagttgaagtttcaaacaggcaaatcaaagagattcttgagaaaacagtgagtaaggcgaaaaaggagtggtcctacaagttagaagatgtactgtgggcttataggacagctttcaaaactctgcttggaaccacaccttttcatcttctatatggtaaagcttgtcatcttccaatggaattagagcacaaagcagcttggacagtcaagatgatgaatttcgacatcaaatctgctggagaaaggagacatattcagttgaatgagcttgatgagatacgaattcatgcatatgacaactcaaagctctacaaggaatgcacaaaggcttaccacgacaagaagatcctcactcgaacctttgagcctaatgaccaggtacttctttatgattctagattgacattgtttcatggaaaattgtcttctcgttggtcaggtccctacatagtccattcggttaggccatatggaaccatcgtttttacagataacaatggaagatcatttgatgtgaatggacagagagtcaaactctactgggctgaaggcgagattccagtagaaaagcctttggatcttcaagacccacctgttgattaagcaactgcaaagtcaagctattgactataaacaagtgctaagtgggattttaacttaggatttttggttttataggattctattcacacaaaaaaaaaaaatcgtttccaccaaacgcgatggggtcgatcaacaccatcggattgtcgatcgacaccctcattttccaggtaagtcgatttaacctaaacttcatcttcttcatttcagttttttttcaaaccgccgaaatcactcttttctctctagattctcggattcttcaccgattcttgtgattttaggctctaatctcattagaatttcatcctacatctaccccaagtgtcaatttaatcaatctgcaacatggctgagcagaaaaagaagacaaggaagagcgttcctccaccttcctcctctggcgctcatcctcgccggaacttctccaccaccgctggcctccgcccttcacaactggaaccaccagctgtagcgcctcaacctcccatccatcgatttccatggccaaagccaccaaatgagaaaattccttctcaaagagtttgggaaaaggatgtcaacagagaattcactaaaggtgactatatcaatcgccttttttctccagattgggatgattattatactctgttctataatgcctggatgagtgtagaaattttgactactcgggttgcgaatttcggtttgatgtagcgtttgcagatagagaaatcttgtttaggactgctagatgatgtaggtttgggaaccatctgttgtaggcagtacgatttgtatcctgagctagttagacaaatcatggcttctgctagggtctactatgtgaatgacaggaaacgcaatgctcaggaaggagctcttatcttcttcatccgcggtgttagatatagtctaccactgagagagagttgtgtgacatctatagttttgacaatgatctcactggagttgcactacctggacagtttaaggatgctcaggttttctggagccggtttggtaatggaacttatgattccaaggacgcagtacactcaaagattcgtcaccctgttctacgatatttggttaggctgattagtagcacattgttgtgcaagatggagcctggaaagatgagactctctgagctgttgttgctctatcatgttgttcatgacttctttccagacagcttaggatttgaggaggttgaccgcgatgtcaactttggcgctgtgtttgctcatcacttggtctcactcaagaccaagccctttacaggtagagggaagaaattagagagagttggcagtcttctcactcccatatttgagcattttcgcatcagctttgagggagaagaggtcaacaccacgaggttctctatggatgagagttatctcaagaaatctcactagctaaaagacaacttcctttggtgtttcagagacgagacatgagaccatatgattcggttgcattgcaccgcgcttacaaagattacaggcgagcatgaggagctcagtttttgtcctgatccttcccttatgcatgcagcaccacgcaccaggcgacatagaggtttagcttcaagagttgcgcctacacagactgaggacgagttcattgatcctgctggggatccgagagttggatcttcttcttaagctctgccatatcagctgccttcccctcctcctatcccgatggagcca

SEQ ID NO: 165599 - DNA, 3119 bp, Arabidopsis thaliana landsberg
tctgccttgtttcccatggcggcgtcgtcttcctccaccggtctcccaccacaacatcaagtattcatcaattttcgtggagaagatttacgactcggattcgtcagccatctcgtagaagctttagaaaacgataacataaaagtcttcatcgacaactacgcagacaaaggcgaacctttagaaacacttttaaccaagatacatgactccaaaatcgctctagccatcttctccgggaagtacacagaatcaacatggtgcttgagagagctagcgatgataaaagattgtgttgagaaaggtaaacttgttgctattcctatcttctacaaggtagatccatccactgttagaggtgttagagggcagttcggtgatgcttttagagatcttgaggaacgtgatgtgattaagaagaaagagtggaaacaagctttgaagtggattcctgacttaattggtatcactgttcatgacaaaaggtaactgcttttgctctattgctttgagtattaacccaaaaagcttgaacctttagtgattacaattggaaattgttagataagtttaggaacctttcatggtcatgatattattttcctcattcgtgtgaattaaccaaaagcttgaccctttagtagttagataagtttaggaacttttcatgggaatctaggaaggtcatgttgatcttatttttctcatttgtattgtagtcctgagagtgaaatactcaacgaaatcgttaaggaggttaagaaagtgttgaagaaagtttcattggagggaagccaaaaggtggtctctgtggatccatcagaaagtattaacactctaagttcggtaggaggcgaaaaggataagacttttggaatcaaacaacggttgaaggagttggaagagaagttggatcttgttaaatacaagggaactcgtgtcgttggagttgttggcatgcctggaattggtaaaaccacactggtgaaagagctctataagatatggcagggcaagttttcgaggtatgctttgatcgatcaaatccgtgggaagtcaaataacttcaggttagagtgcttgcctactttgcttttagagaagctactaccggagttgaatagtcctcatctagatagtattgaagaaccatacaaaactcataagggtctactgcgtgaacgcaaagttcttgtcgtccttgatgatgttagtggaagggaacaaatatatgctcttcttgggaaatatgttcttcacattaaacatgagtggatcaaagatggcagcaggattatcattgcaacgaacgatatctccttattaaagggtctggttcatgacacttatgtggttcggcaattaaaccacagagacggcttacaactttttcgctatcacgcctttcattatgatcaaaccattcctccaaaggtggatttcatgaagctttctgatgagtttgtgcattatgccagaggccatccactagctctcaaaatattgggtagagagcttaatgagaaaaatatgaagcattgggaaacaaaactgaaaatacttgctcaaagtcccaccacttatattggagaagtcgtgcaagtaagttatgatgaattgagtttggcgcagaaagatgcatttctcgacatagcctgtttcagatcacaggatgtggattatgtagaaagtttactggtttcgtctgaccctggatctgctgaagcaataaaagctctcaagaatagttcctgattaatacttgtgatggccgagtggagatgcatgatctattatataaattttcaagggaagttgatctgaaggcatctaatcaggatggtagcagacaacggaggctgtggctccatcaacacataatcaagggaggcataatcaatgtattgcaaaataaaatggtgagaccagaagttcctctagagttttattggtaagaacttacatttttttctcttcactgatgtcgtgtttgttattggtgcttagaaagctgccaatgttagaggtattttcctagacttgtctgaagtggaagacgaaacgagcttagaccgcgaccacttcataaatatgggaaatctccggtatctcaagttctacaattcccattgtccacaggaatgtaaaaccaacaataaaatcaacatccctgataaacttaagctaccattgaaagaagttcgatgcctccactggctgaaattcccattggagacacttccaaacgatttcaacccaattaatcttgtcgaccttaagctgccctacagtgaaacggaacaactttgggagggtgacaaggtgtgtctctgaataatctgttgattgcttttgtgaatggttaatttacctggataggttttgtttgactggtggctaaactttgttttcttctttttctgtaataggacacaccatgcttaaggtgggtcgatctcaatcactcaagtaagttgtgcagcttgtcagggttatcaaaagctgaaaagcttcaaaggttgaaccttgaaggttgcacaacactgaaagcgtttccacatgatatgaaaaaaatgaaaatgcttgctttcttgaatctgaaggggtgtacaagtctcgaatctcttccagagatgaatttgatttctctgaaaacacttactctcagcggctgctcaacttttaaggaatttccgttgatttcagataatatagaaactctatacttagatggcacagcaataagtcagcttcctatgaacatggagaagcttcagagacttgttgtattgaatatgaaagactgcaaaatgctagaggaaattccaggccgtgttggtgagctgaaagctcttcaagaactgatactctctgattgtttaaatctcaagattttcccagaaatcgacattagctttttaaacattttacttttggatgggacagccattgaagtgatgccacaattaccctcagtgcagtatttgtgcttaagcagaaatgctaagatcagctgccttcctgttggaatcagtcagctttctcaacttaaatggctggacctgaagtattgtacgagtcttacatcagttccagagtttccaccaaatcttcagtgc

SEQ ID NO: 165600 - DNA, 1763 bp, Arabidopsis thaliana landsberg
cttaacttggtaactttttaaaaatttctatagaacttctctcattatagaaaatatctaatatctttctaaaacccgttacgagtaaaacatgataataatgtatagaaaacaacactaaaagttttgattcagtaaaatatgaaagctatagtcaaagaaagcacaaatgcatttaagcaaaaaaatattataaatctattctaaagagtttttttacatataatagatatatatagttgatacatttatacaattattaatttatgatattgatgggaccatatatttacataggactttcaaaaaaattattatcttattaatttatcgttttgtgtcactttttacactggtcctaattcgggaccggaaaaatttattaatttataaaggttattaatttatagaggttatactggaatatgagaaagttagagaaagagataaatacttgaatccagattatcagcctatttataatgcaaactgttgctactgatgtttttgtgagatatgaagtagaaaaagaaaaggtaaaagagctttttgcaaagcatcgtgttagagtttcttttacttcggacttgtggtcagctaaggctagtatgaagagttatatttgtgtaactgcgcattttatcgatggagattggcatttacacagttatattttagatttttgtgagttgaagtctacgcacactggtgaacatattgctaatacgattcttgattgtttaaaggaatggggattagaaaaaggtactttctatgcctctagacaatgctaccaataataataatatacaaaaaatcctcaagggccaacttcaaatgattagcggtagtggtttaatctatgacgggaaatatttgcatattagttgttgcgctcatattcttaacatcattgtgaagaaaggtttagagttagctaaagatgtctaacacaatattcgaggaagtgttcaatatgtgaaagcatctccacaaaggaaagaagcttttgcagcctgtgttgagagagtgggaataagaagtggggcagggttatctcttgatgtgcctactagatgaattctacttaaaatttagaaaagcctttgatagcatgaaggcttttgataggaattataagtctttaccatcagatgaggagtgggatcgtggtgaaaagatctgtgacttgttgaagccatttagtgtaatcactacttacatttcaggctctaagtatcccacctcgaatgtatacttgactcaattatggaggattgaattactattgaagaagtacgtcacttgtgatgatgaggatataaagcaaatggctatggaaatgcaaatcaagtttgctaagtattggaaggattacagtcttattttagctattggagcagttttagatccaagacttaaagtaaagatgctcgaagtagcttatcagaaagtagatcccactacttctgcgttgaagattaaagaacttgagaagaatttggaaatgatttttaaagcttatcagacgagttctccaggcgtttcagggataacaaatccacatgacttacttagtgaatctccacttgaggatgatttcgataatgtaagtatcttcatatacaaagttaaaattccatattagaaatccatattgttaactgatgtaaatctttgtaatacaggatctctttgagttggaaagaagcattgaagctggtgtgaacaacacaaagagtcacttggatatctatttggct

SEQ ID NO: 165601 - DNA, 878 bp, Arabidopsis thaliana landsberg
acggtttagtcctatgcatcattaaggacaacacagggctcttggtatggaacccttatttggggcaaactaggtggatccatccgagaaacaattaccagatagaagataggtatgctcttggatatgataacaaccgtacccacaaaatattgaggattttcgatttgtatccaagcagcaaccgcgtttttgggtacgaagtctacgattttagctctaattcatggaaggttcttgatgtcattcctgagtgggatatacagtctcattttcgtggcgcgtctttgaaagggaatgcttattttcctgcgcaaaagaaagaaacagtgggaggaataaagacaataaatattgaagatgttctactttgtttcgattttacaagggagagatttggaccgcctctgccactgccgtttcactcttacaatgcagacttttttgtgtctctagcttgtgttagggaagagcagctcgctgtgttatatcaacgctggggggcatttgagacaatcgagatttgtgttacaaataagattgatcccaatacggtttcgtggagcaagtttttgataacgtccactggttttccggttgacactttttctgggagctttttcattgatgaggagaagaaagttgctgtggtttttgatttagatagatataaaccgactgagacctgtcgctaccaaatagtttatgttattggacaagatgaatacttcaaatctgtcaacatgggagttgccccaaatatcgcgaagaactcgtaccaagcttactgtgttccacttgtgtgctcttcttcctatgttccaagcttagttcaactacaaatcaacaaaccgggcaaaaggaaagaaagtaactag

SEQ ID NO: 165602 - DNA, 2223 bp, Arabidopsis thaliana landsberg
ccttctcaatctgatgatgataactttgctgtatacggcgagcctcagaataaaaacgaagattgaccaaaacttcctccaaagaagagaactcaaattcaaaacattgaaatgattggatctgttgggagctcgactgatttaaggttggagctgtctacgctaacactcgcggcaggccagcgatacagtagcaaattcgagttggagcatcgactcaaacttcttgcgataagggatggatttgattttgatgtacaactatctaatacgactacagtgaattacgagtcctgggttgatagatgtcgctggagagttcatgcatctacacaaggggatgagccttatttttatgtccgtatatacgattcggaacacacatgttctgtgacgcaacattctaatcgatcccgacaagcaacacatgatgtactgggaattctttacagggactatcttggtgacgttggtccggatgttaaaccaaaaacagtcgaaataagcatcactaagaattttcgagcaaaggtaattacaatgtttcggcatgacttactatttagctgctggctgacatatatatattttacggttgacctattgatataggctgacatataattacattctgggggagttatgactttcaaggctgacttaagatcacttgttggctgagttgtggtatagtttaggctgacttatcacctaatatgtttgtgttaacagatgagttattcaaagtcatacaagacgctcaggtttgcaagggagctcactctgggaacctctgatagtagttttgaagaactgccttcttacctatacatgataagacgggcaaatccgggtacagtcgcgcgtcttcaaattgatgagagtggaagattcaactatatattcattgcatttggtgccagtatcgctgggtttcattacatgcgtagagttgttgttgtcgacggtacctttctccatggtagttacaaagggtcgctcttgacagcccttgctcaggatggtaattttcagatttttccgttagctttcggtgtagttgacactgaaaatgatgattcttggcgttggtttcttacgcaactcaaagttgttattcctgatgcaacggacctggcgataatctcggactgacataagtcaatagggaaagcaattggtgaagtgtatctgttggctgctcgtgggatttgtacttaccatctctataagaacattttggtaaaattcaaaagaaaagatttgttccctctggtgaaaaaagcagcaaggtgttataggctgaatgattttactaacgcgttcaacgagattgaagagcttgatcctctactacatgcatacctccaaagagcgggtattgaaatgtgggcgcgtgctcatttccccggtgatagatacaatttaatgactacgaatatagcggaatcaatgaacagagcactgtcacaagccagaaatcttcccatagttcgactgttagaagcgataagacagatgatgactagatggtttgctgaacggagagatgatgcgagcaaacagcatactcagctcacacgtggtgttgagaaactcttacaggtaactcagctgtaactagtgcataactcagtcgtcgaataacgataaccccgtcataacgagaataactcagccataacgagaataactcagccataaagagaataactcagtcataacttttttgttttgtttcttgtctcttctctttaatagacccgcgtcaactcgtcaagactactggatgtacaaacgattgatgcttcccgcgttcaagtagcttatggagcatctttgcatgttgttaatgtggatgaaaaacaatgcacatgccgtcttttcgacaaagagaaattaccatgcatccatgcaatcgcagctgcagagcatatgggtgtgtctcgtatatccctgtgcagtccttattataagagcagtcatttggtcaatgcgtacgctggtgcaatcatgccttcagatacagaagtccctgttcctcaaattgtaattgaccaaccgtgtttgcctccgattgttgcgaaccagccaggcaggcccaagaaactaaggatgaaatcagcactagaagtcgccgttgagactaaacgccctaggaaggaacacgcatgttctcgatgtaaagaaacagggcacaatgttaaaacttgccgtgcatag

SEQ ID NO: 165603 - DNA, 752 bp, Arabidopsis thaliana landsberg
ttgttttatttgaagttattttgatgagtaatatgctctattgtgttgttcttgtaaatagagatggttgaagcaatgaagaaagttgcagctcttaatgtagagctcaccattgaagagaggaatcttttatctgttggttacaaaaatgtgattggtgctaggagagcatcgtgaaggatcctttcttcgatcgagcagaaagaagaatcgaaaggaaacgaacaaaatgccaagaggattaaggattacaggacaaaagttgaagaagaactctccaagatttgttacgatattttggctgtcatcgataagcatcttgtcccattcgcaacttcgggagaatccaccgtcttctactacaaaatgttagtctcattcttgaattaaaaacttaaaatcaaaacaagaaagtatatgacacacacttgaattggtttttgattattttgtttgttgttgttaggaaaggagattatttcagatacttggctgaatttaagtccggtgctgatcgcgaggaagctgcggacctatcactcaaggcgtatgaagtatgtttgtcatattttctcttgatcaattagctgaatagctaggaaagaaagctgatatttctgtttaaatataggctgcaacgagttctgctagcacggaattgtctacaacacatccaataagactcggcttggctctcaacttttctgtcttctactacgagatcttgaattctccggtaaggtattgtccgt

SEQ ID NO: 165604 - DNA, 2782 bp, Arabidopsis thaliana landsberg
aactgagcagcagcactctgcaatactcaaaagaaattgaatcagttttccacacgagtgcgatgttctaacagtttttacctgcaggagctcatcaccttgtgatatggaaatcaatgctgaaagagactgtatgtacaaaacgataagaagatatatgatatcacttgcaatagatagttgttccttgctcttgtttaaacccctctagggcatggagaaggtttgcctagtaatgcctatgtaagtcagggaaaagtttcgcgctaaactataatgggacccactgatgatcaaatacgtgtaatcgtaacggtctttgagttttaattgacggccaagattgatccgttatttcttataataaatataaaatagaaaacccctaatcaaagaaaacaaaataattccgcgtttttcattttccgttttgtttctcgtcgtctccttcaagatctctctctctcactctcgcagaagagaaaccctaaatctcaccggaaaacgagaacgccgagcctgagatattttcgattgcttcatcaacaatgtcttcttcgtcgagaaatctatctcaggagaatccgattcctcgtccgaacttagccaagactcgaacctcactccgcgatgttggaaaccgtcgtgctcccctcggcgacatcacaaatcagaagaatggatctagaaatccttcaccgtcgtctactctggtaaaatttctcttcgattctctctactttttgttcctttttcaattcctgtgtttgttcgtcgagaaatgtagtttttagggtttatcctggaattgaatctgtaaatgtttcaatctctgaaggtgaattgttcaaataagatcggccaatctaagaaagcaccaaaacctgctttatctcgtaattggaatttgggaattctcgattccggtttacctcccaagccaaatgcgaaatcaaacataatcgttccttacgaagacaccgaattgctccaaagcgatgatagtcttctatgttcttcacctgcattatccttggatgcctctcctactcaatctgacccgtcaatttccactcatgactctttgacgaaccacgttgtagattacatggtcgagagcactactgatgatggaaatgatgatgatgatgatgagattgttaacattgatagtgacttgatggatccacagctttgtgcttcttttgcttgtgatatctacgagcatttgcgtgtatctgaggtaggatggctgttgttttactctgccacagttctcatactgatttgattctgtttctgaattgtcaaagttgaaattttgcttattatgctctgcaggtgaacaaaagaccggctctagattacatggaaagaactcagtcaagcatcaatgctagcatgcgttctatactgattgactgttttgtggaggtaagcttttgatgaatcctggttcattaaggcaagatatttagttttgattgataaggcaataagtttagtaatagaatacaccaaatgttttatagcaataggtagttacaaagctgttttctggattttcataaacctacaggttgctgaagagtataggctttcgcccgagacgttgtatttggcagtaaactacgttgatcggtatcttacaggaaatgcaatcaacaagcaaaatctgcagctacttggtgttacctgcatgatgatagcagcgtaagaaatctagaaattttactctttggcttcattctttttcttttcaaaagtatgcaatttctaactagtagagacactggaattccagaaaatatgaagaagtgtgtgtgccgcaagtggaggatttctgttacatcactgataacacatacttaagaaatgaggtaacgaggtttgcatgtttagtcatccctggacaaactcttcttcttgtggttttgatattgttgttaacctttaagctttttaacagcttttggagatggagtcttctgttctgaactacttgaagttcgaattaacaactcctacagcaaaatgtttcttgaggtatcttcttgtcacattgatgttatcttcattcatcattttttgtggttccctgctgatctagactttaaaaatgtggttaggcgctttcttcgtgctgctcaaggcagaaaggaggtattctgttatatgaaaattaaaaatgagctctcaacgcaatgggtgatgtgttatatacgtttctgactagtagctggtttctattaggtaccatcactgctgtctgagtgtctggcctgctatctcaccgaattatcgctgttagattacgctatgcttcgatacgctccatcacttgttgcagcctctgcagttttcttggcacaatacactctacacccttcaagaaaaccatgggtatgaccacaagactgtattttcattcctattttcttcagttgttagctttattcaactctgcgttctattaaaacctgctgatttcgggttttgcagaatgctacgctagagcattacacatcgtacagggctaaacatatggaagcatgcgttaagaatcttcttcagctgtgtaatgagaaactctcatctgatgtggttgcaatcagaaagaagtacagtcaacacaaagtaacgagccttccactttctttattattaatagcttcatatcaaaatacttgcaagtgtttactctcttttcttctcctgccagtacaagtttgcagcaaagaagctttgtcccacgtcactaccgcaagagcttttcctctga

SEQ ID NO: 165605 - DNA, 3876 bp, Arabidopsis thaliana landsberg
caaaggcatatatcgcatgttattactgcagcaaagaagggtgtcgttccaatggatgcccgaataagagaacgggccaagtgaatccgaaggggccttgttattgttgcggaaaccgaggccactactctcacacgtgtctaagtaaacccacaggaccggctactcagagcaacacacgacccccgcctgcatcaggagcgagaggacccccggcgaaacgacaagcaacaattgctaatgtgtacgcattagacttagaatcggcagaaaccccaagacctcttaaagaccccgtaacaggtttgtatgggatctaactcccttttaaagtattttttggtttttgtgtgtgaattgtgagaatgtattgtctggtgtgtgcctgaatgcgttgccagggactgtacctattggtggtgtgcccacgtatgtgttatttgacttgagagccacgaatagcttcattacgcctgaggtggtcgcaaagttcaccacgaattatgaggaaaaagaagttaatatcccgatccataccgctagtgaccaaccaccccttcaaacaagtagaatactagtaggagtgcccatagtaatccataggaaaaacttacccgcaaaccttttgattatgcccatgaggaagtttgaagtaattctaggaatggattggttatctggataccatgcccgaatagactgtgctaagagtcgagtagtattcgaattaggaaaccaaaccatgttagtttattccggagtgagtccgagtgccggagcggtttctgaatcagcccttcgtgttgagaatatgctagtccagtgggaagcatatttagtaacccttaccgcgattagtggagaagacgatgaggagttgaaagtggaagacatctcagcagtaggggagttcgcagatgtgtttaaggctttagatggcttgctgccgccccggagcaaccctttcgccatcaaccttgaggttggagctattccaattgccaagtctccttaccgaatcgcgcctgtcgagttagaagaattaaaacaacaactaggaggtcttcttgagaaaggattcatacgcctgagttcatcaccatggggagcctcggtgttatttgtaaagaaaaaggattgaagtatgcggttgtgtatcgattaccgtggcatcgacaacattaccatcaaagataagtacccgcttccaagaatcgacgaactcttagatcaactgagaggagctagttggttttcgaagattgaccttgcatcctgatatcatcaaattctcattgctgaagctgacataacaaagacggccttccggactcgctacaaacaatacgagtttgttgtcatgccctttggtctaacaaacgctcctgccgcatttatgagattgatgaatgaagtgtttcacgattatttggataagtttgtcatcatattcattgacgacatcctcgtttactcacgaagccaagaagaacattattaccatctacagaaagtcttggaacgacttagagagcagccgctttatgctaagttcagtaaatgcaaggtttggcaaagagatattggattcctaggacattgcgtctcggagcaaggagtaaccgtagatcccaagaagatcgccgccattcaagattggccgcaaccaaccaatgttactgaggtcaaaagcttcttgggtttgccaaaatattatcgaaagtttgtcaaaggattctcttccatcaacaagcctttgacacgcctcacgagtaaaagcgtaccatttgcttggagcaaggaagctaaggaagcgtttgagaaggtgaacgaagcattaaccaccgcgacaatcctaaccttacctgagcctggtaatccttactctatttacactaatgcatcaagagtcgtgttagggtgcgtattaatgcaagatgggaaagtaatcgcttatgcatcccgacaattttgaaagcatggaagagaattatccaactcacgacctggagatggcagctgtagtgtttgcattactaatctggagatcgtatttgtatggtaaaaaggttcttgtatttactgaccatcaaagtcttaaatacttgttcactcagcctgatctaaacttgcgacaatgaagatggatggaattcattgccgattatgatttacaaattcaatatcaccccgggaaggccaacgtggtggtcgacgccttaagccgccgccgaaccaagttagatgcagacaaggaattgaatctgcttctggaagaattcaagcagatacatctttttgccctcgatggagaatcaccggagccacttggacttcacaccgtttcacaatcaaacatgctgcagcagatcggagaagaacaacaataagatgagaagttacaagagatagttacaaagctgaagactctggacggacccaacgatagcggatatcacagggcagacgatggcaccctgctactcaatggaagaattatggtaccggatcgaggaaatttatgacaagagatcctctgaatggcgcactcgtctacactgagttttcacccaggtagtaccaaaatgtataacgacgtatgctgatattatcattggccaagaatgaagaaatcggtagccaaatgggtaagtcaatgtgattcttgtcagcaaataaagattgatccccaagttccaatcgggttactttagagcttacatgttccgacatggaagtgggaaacgatctctatggacttcatcaccggattacctacaaggaaggggcagaggaatgactcagtatgggttattgttgatcgtcaccaaactgacacattttataccaataagaagcatcgaccaagctcccaatctcgtggaaaggtatataaaagaagtgatcaagctccacggtataccagccaatatcgtaatcgatcgagatccaaagttttcggctatcttttagcaagacctacagaaagccctagggacaaacgttcacatgagtacagcgtttcatcccgaaaccaacggacagacagagcggacgatccgaactatcgaagatctaatccgaatatgcgcctaagaatggggaaggagttgggaggaaaatctgccatttattaaattttcgtacaacaatagctaccattctagtattgatatgtcaccgttcgaggccatgtatggaaaaccgtgtagaactccattatgctggacgaaggtaggagaaagaaccaaattcgaccaatggatagtcgatgaggcagtagagaaaatccagttcatatgcgaaagcatgaagaaggcgcaagaccaacaaaaaaagtacgcagatcgaaagatacgagaagtggagttccaagaaggagatatgctctacctaaaggtcacaactcaagaggcaaaatatcgatttggaaagatagggaagcttgcggttcgttatattggcccttatcaaattgtgagtcgagttggagaggttgcttataagttggacatgatagaaatcatgcgacttcataaggtgtttcatgtgtctcaattaaagaagcatataccaaatcccaatgttgttatttcagaaccgatacccgaattgaagaccaacctcacttatccagaggggccactcgaaatcgaagaacgccgtattcaaaagttcaagcagcggttaattcctcaaattaaagtgttctagggaaagcaaaaccgacgggtaataacatgggaagatgaagaaaaattgcaggtaaaatatcctcaattgttcgatactgaagaaggagacgacaatgaggccagcccatccaattcttagggaatttgggacaatgtagcaccccgcgcattgacctaggag

SEQ ID NO: 165606 - DNA, 610 bp, Arabidopsis thaliana landsberg
ccaaaaaaagtcaacttcgttgcaagaaccagaaaaaaatggggacgactctgggaaagccatttgccggtttttttcaccaagaagaagcgaggatcgtgttgtttggtctcggcggtaccggaaaatcatcaataatgcacaaattcaaaaccggagaaacccttaccacaaccatgcctactgttggtaagtctctttatcactctttgtttttttctgatcttgaatctagtcttctctatgaattcctttaaaacggatcattgtttctaggattgaatgtggaaagtgtaaaatacaaggattcaaacttatgcttttgggaaatgggcggccaacaatgttacatggtaagagaaagttactaattttagaaacattacgagcatacctgatgatgggtaatttaataaaatattttagtggtttccattatggaaacactggttccaagaaatagcggggcttgtgcttgtagtcgacagcacgggcagagatcaaatagaagagacgaaagattttcttaacgtggtgatcgatgaggtgcaaagaaaccttacttctctaaacattgagcaagtaaataatctaatgtttgatgttctga

SEQ ID NO: 165607 - DNA, 3159 bp, Arabidopsis thaliana landsberg
atgggtcgtgtaaggttagtcactcctagttcgagtgaaagtgaagacgagagggtcacgatcatccgtgaagcggatatgaaccgtgaagaagttgcagccgaggaaaacaaatttgaagacgaaaactgtgaacaagagcctccggaaaaccttaacgaaccggaagaagaaaatatttctgaggtatatacaaatttatgaaaattttgtgtgaatattgatatagtgtttagggacaactagaaaacaatgagtacaagttaatagtataggtctatgtaattggtgcatggatatacgtgattaatcatacattgggttgcattagaaaattgaattctgaaaaagttgataatgttgttctgagataactagtacaagtagtacagcgaaatattaattttatggttgtgtatgaattttcaggaagttgatgatgaagaaccaatgcagtctcaggggatggaagaaaactctgaagaagaggaaaaagaaggagaagaagaagaatctgaggtatatacaaatttctgtaaattgtgtttgaatattgaaagtagtgtatagggacaactagaaaacaatgagtacaacttaatagtattggtttgtttgattggtgcatgcatggatttatacgtgatcaatcatacattgatttgtattagaaaattggattctgagaaaactttataacgttggtctgagataacgcgaaatattaattttatggttgtgtatgaattttcaagaaattgatgatgaggaaccaatgcagtctcaggggatggaagaaaaccatgaagtaaagtataaacaaggggaagaagaaaaatctgagataacatttatttctgaaaattttgtttgaatattgaaagtagtgtatagggacaactagaaaacacttaggacaacttaatagtatattttcaacttatgtggtgcatggatttatacgttaacgtgatcaatcatacattggtatgcattaaaaaattgaattctgagaaaagttaataatgttgttttgagataactagtacaagtagtacaacgaaatattaattttatggttgtgtatgaatcttcacccaattgataacgaggaacaaatgcagcctcaagggatggaagaaaaccctgaagaagaggataaaaaaggggaaaaagaaaaatctgaggtaacattaatttctgaaaattgtgttcgaaaattaaaagtagtgtatagggacaactagaaaacacttaagagaacttaatagtatagtttcaacttatgtgattggtgcatggatttatacgttaacgtgattaatcatacattggtttgcattagaaaattgaattctgagcaaagttgataatgttggtctgagataactagtacaagtagtacaacgaaattttaattttatggttgtgtatgaaatttcaggaacttgatgatgaggaacaaccaatgcagccacaagggatgttctttggtccaagcgaataccataagacgtgtaaggtagggacgagatacactgtgcagcagacagtgaagtatttggaggggtttaaagaagatttgtcatggttcaaagcgcattcacagtttaggcatgtattccacatgcctgaggagaaaaaccacatgactcaaggcatgtggatgcttttgcttcgcacatcacagacagagatggatagaaagtgctggtttgtggtgaatggagtgcctattaggtactccattaaagagcatgcgcttttctgtggttttgagtgttatgagtaccctaaggagttccagcccagtatgattatcaaggatgaagaattaaagtttgcaaaaaagatgtttaaaaatgtatcaaggattaaaatcatatatgttgaaaagaagctgaatgaaatgaatgattgtggagaaaggaagaaggcagatagaaaaaagttatctatcttgctatttttgtgcaaggtgattgttgcaaagtcaaaggttgatggtaacattgatcgtttcttgctgaaaattattgatgatgtgcatgcatgcgagacatttccatgggatcgtttcacatttgatggatgtatggaagggattaagtcgataataaataacatgaatgggaaagcaaaagtggagacatgtttctctggatttatttttctattagaggtaacaatttctagtattctatatgatgaaatgcattattagacttaaaaataatagttatgtgacgtttacattgaatgtgtagattttatcatttgaggctatcccatagttgggacaaaagtttagagaccctataaggttcgagaatgagtgtccgagaatgtgtaatagtaaattctctagtagtgtcatgaaagagttctcattggaagagataattgaggagtttggaagtgtaaatgtaagacttgtgaattatatcttattatatgtgactatgtgcttgaatataattattttgatatttgaatttttataggatatctctagcatttttgaaccggatgacgaagagaaatatttgttgagacgcattgtagatggtaatgttgttgatgatgggataagttttgttgatccagttgttgataattggagaacctgtttaatcaaaaagaggaagaaaatctggtggaaggacttgtttgacgaagatgtgcgttctcgaagcggcgagccaacggaggaacatgtctcaaaaaatggtccggacattagcactttgagagaagcaattgatgcaggttttaagcaagttgtggagattttaggagaatacaatcaaatgtttataaccactgtaagaagacaagttggtgagaatgtacctccatttaacgagaatgtgaattccgatgtgaatgtggagaaggaagatggtgagaatgttctaccatttaaggagaatgtgaattctgatgtgaatgtggagaaggaagatggtgagagacatccaccatatgaagataatgtaactgtggagaaggatgttggtgagagtgttctaccatttgaggagaatgtgtatatggagaaggaaattggtgaaaatgtgtcaccatttgaggatgttggttcaagtgtagtgaaaaaatgcactgacatggttctttatgttagaggctctccaaaag

SEQ ID NO: 165608 - DNA, 385 bp, Arabidopsis thaliana landsberg
  unsure (1)..(385): unsure at all n locations
aagtccctggtgaaaaagattctcacccagcataaaattgcctatgagcagcatatcagcgaattttcccaattccacgggctagctcaggttgggaccgttctagccggttttagccgaccagccggtttccaaannnnnnnnnnnnnnnnnnnnnnnnnnnnnnnnnnnnnnnnnnnnggtgcctttgatcgaccacttggacctcaagaagattgccaaggcttccggcaacaagaagtgtgaaatgattcccctcaagcatctgcaaaagaccactggctacgtgcacggggccaacacgccgattggtatcaaccgcagcaagaagttcccgatctttttggatgagagtgtaaaaaatgaagacgggatctgggtgaca

SEQ ID NO: 165609 - DNA, 480 bp, Arabidopsis thaliana landsberg
ggtttgatcatgtgtatgtattgattttgtttttgttggaacttcagataccgagcaatcacaagcgcatactatcgaggagctgttggggctttgcttgtttatgatgttacacggcatgtgacatttgagaacgttgagagatggttgaaggagcttagagaccacacagaggccaacattgtgatcatgcttgttgggaataaagcggatctacgtcacctaagagctgtttcaactgaagatgctaaagcctttgcagagagagagaacacattctttatggagacatctgcacttgaagctttgaacgttgagaatgctttcactgaagtgctttctcaaatataccgtgttgcaagcaagaaggcgttggatattggtgatgatcacactactcttcctaaaggacaaagtattaatgttgggtctaaggatgatgtttctgaggttaagaaggttggatgctgctcaagttga

SEQ ID NO: 165610 - DNA, 2297 bp, Arabidopsis thaliana landsberg; identical to SEQ ID NO: 11858
  unsure (1)..(2297): unsure at all n locations

SEQ ID NO: 165611 - DNA, 730 bp, Arabidopsis thaliana landsberg
ctgacggtacccgagctatgccgggaactgggcatcagttcggcaacgttttataaatggcgctcgaagtacgccggcatgaacgcgtcgatgatgtcgcgcataaaggagctcgaggcggagaatgcccggcttcgcaagatgtacatcgagcagaagctcaaggctaagattgcctcggaggcgctgcaaaaaaagttctgaagccatctcgtcggcgcgagatggcaaagcaggttgtgcaacagcgccgcgtgtcgattcgtgtggcgtgcgcggtgttcggcatcagcgagtcgtgctaccggtacgaggcgaagttgaacacggagaacgaagagattgccgactggctgctgcgtatcacgggctgccatcgcaactggggctttctgctgtgctacttctacctgcgtaacgtgaagggattcggctggaatcataagcgcatttaccggatttaccgcgagctggaactgaacctgcgcatcaagccgaggaagcgcctggtgcgggagacgccgcaaccgctgtccgtgccgcaggccatcaatgaagtgtggtcgatggacttcatgcatgaccagttggttgacgggcgcagtatccggacgctaaacgtgattgatgatttcaaccgcgaggcgctgggcatcgaggtggatttctcgttgccatcggagcgggtgattcgcgcgctcatgcagcatatggaatggcgaggccagct

SEQ ID NO: 165612 - DNA, 3801 bp, Arabidopsis thaliana landsberg
  unsure (1)..(3801): unsure at all n locations
ctaaataatcagggttattctagcaagtggtttagttggaccgattcctagtgccattggtcttctgggaaccttgacagacttgtatgtacacgaattttgcgtgtggtgattcgttattttcgcctctcatgggctgacttaccttcaacaatgtatatttactctattccaaatatgaaattttgtaggagaatcactgacttgagtggacctgaatctccatttccgccactaagaaacatgacatcgatgaagtatttgtgagtttgagactcagaatagacgagtttggtattggtttcttccaccttcaactagctaacttctgtttatactcgttgttcgttgcaggattcttaggaactgtaaccttacaggagacttacctgcgtatcttggacagaatagaaaattaaagaatctgtaagtaatctctttttttcttcggcaagcatgaaaccaatttgtcgaagatggaaaagaatttaagctgacattatgagtctcgttgtgcagagatcttagctttaacaaactgagtggaccaatcccagccacatattccggtctttcagatgtagatttcatgtatgatgctcttttcttctcttctttcttctgtttcaagaaaaaagctttatatggagtaatattaaactgagctgaaatttgttttccaatcgcgcagatactttacaagtaacatgttaaatggacaagtaccaagttggatggtagaccaaggagacacgatgtgagtgtttttcacttatatgtatattacatttctttgtagtgaaaacagtataactaacgttttctttggttgttgtatcgtttttggcagtgatattacttacaataacttctccaaagataaaaccgaagaatgtcaacaaaaatccgtgtaagaagaacaataaacgattaaacttgtcatgccttcaaaattcgctataaagcttatggtttcttggttccgtttatttgcaggaacacgttttcaagcacaagccctttagtggcaaataactcgtaagtcttttctacttctcataacatttcgaaagctctggatttatacaacactcactataatattgatgttacgttatgtttacctacagctcanatgtttcgtgtctgagtaaatatacctgtcctaaaagtaagcctctgaagctatatatatatatatatatatatataatacattacagaaccatatcgggttaatacctacctgcgtatctgatttatcttcggttaccaatcatttgttctcagctttctacggccttcatataaactgtggtggtaatgaaataacaagcaatgagactaagtatgatgctgacacatgggatacaccgggttactatgatagtaaaaacgggtgggtttctagcaacacgggaaacttcttggatgatgatcggactaacaatggaaaatcaaaatggtcgaattcatcagagcttaagatatcaaattctagcatagattctaggctttacacacaagcgcgtctctcggctatctccctcacttaccaggcattgtgtcttggaaaaggaaactatacggttaatcttcatttcgctgaaattatgttcaatgaaaagaacatgtatagcaatttgggaagacgatacttcgacatatacgttcaggtaatttaattgatcttgtttcttgattgtcagaaagattgtatagctgaatcaattggctggtgtgataatattgcagggtaaacgtgaagtgaaagatttcaatatcgttgatgaagcaaaaggtgtgggaaaagctgttgttaagaaatttcctgtcatggttacaaatgggaaactggaaataagattgcagtgggctgggaaaggaactcaagctattcctgtgagaggtgtctatggtcctctcatatctgctgtatcggtagatccaggtaaactttgctaaacctcaaactatttacgagagacttctcctttgtttgagtgtttttgtctcttgactttactcccatggtcttgctttctagattttattccaccaaaggaaccgggcactggaactggtggtggaagttctgttggtactgtggttggtagtgtaatcgcttctacggtgtttcttgtgcttttaatcggcggtatattatggtggagaggctgcttaagacccaagagtcagatggaaaaaggtacatagtttgagttgcttaaatagtatttcaacattccaattccttttgagttctgtctctttgtatctttctaactcagctgtgtttcttcacctcagatttcaagaacttagatttccagatcagttcgttctccttgaggcaaatcaaagttgccacggataactttgatcctgcaaacaagatcggagaaggtggttttggtcctgtacacaaggttagcattatactgtgaaatgacattgttatgagagacaaaagataaaagatatatgatctttaaggtttgttaattgttttgattacagggaataatgactgatggaactgtaatcgcggtgaagcagctatcggcaaaatcaaaacaagggaatcgagaattcttaaacgagattgctatgatttcggctctgcagcatccacatttggttaaactatatggatgttgcgttgaaggtgatcagctcctgctagtttacgagtacttggagaacaacagtctcgcgcgagctcttttcggttagtcattccttttaaaacaccttacagcttaaaatattctatccaatccaattgttgttttgctcaataacaatgtttttgttcctatcaatttaaaggacctcaagagactcagataccactaaattggccaatgaggcagaagatttgtgttggaatagcgagaggattagcttatctccacgaggaatcaagactcaagatcgtacacagagacatcaaagccactaatgtcttgctggataaggaactaaacccaaagatttcagattttgggcttgctaagcttgatgaagaagaaaacacacacatcagcacacgagtcgctggaacatagtgagtcaaacaaccaatcaatcacaaacaagaagtttcaactctgagatttcatataaccaaaaacaaacttttttttgtctgtagtggatacatggctccagaatacgccatgagaggccatttgacagataaagccgacgtctacagttttggcgttgtggccctagaaatcgttcacggaaagagcaacacgagctcacgatctaaagctgataccttctaccttcttgactgggtaaatcatcacttcacacctcaaaaagcctaaaacctaaacctaaaccccttaaaccctaaattatggatctgaatctcaatttctttcgcaggtgcacgttttaagggaacaaaacactctacttgaagtagtagatccaaggctaggaacagattacaacaaacaagaagcattgatgatgattcagatagggatgctctgtaccagtccagctccaggggatagaccttcgatgtcgacggtggtgagtatgctcgaaggccattcaacggtgaatgttgagaaacttcttgaagcttcggtcaacaatgaaaaggacgaagagagtgtgagagcgatgaaaaggcattacgccacgataggtgaggaggagataacgaacacgacaaccaccgatggacctttcacgtcgtcttctacgtcaaccgccaacgccaacgatctttaccctgttaagctcgactctgcctattggaacactagaacttaa

SEQ ID NO: 165613 - DNA, 1232 bp, Arabidopsis thaliana landsberg
atggaggaagggattaaagataatgctgcatcagctcccaattcaagacctacaaaccaacttaaagctcttttaccgatgcgggtgcttcaagttttcttgttgttctttgttttggttcttggaatctcagtcattagtatgcacatgatcaagtacttaaagattcaaactttagctccatcgacattgatctctacttatgatgagagaattacgttagagagccttatcaagcctccattgaatggttggcattccatgaatgacagtgagcttctttggcgtgcttcgatggagcctcggatacttgactatccatttaaaagagttcctaaaatggcattcatgtttctcaccaaaggacctttgccatttgctccactttgggaaaggtttttcaaagggcatgagggcttttactcaatctatgttcatactttgccaaattatagatcagatttcccaagctcatctgtgttttacagaagacagatcccaagtcaggtacttttgtttatcaatgtattaatgttgcttcttgtgtcttgatttggtttatctcacttcggagtttctttatttgtgtgtagcatgtagcttggggagagatgagtatgtgtgatgctgaaaggaggcttttggctaacgcgttgctcgatatctctaacgaatggtttgttttactatctgaagcgtgtattcctcttcgcggtttcaactttgtctaccgttatgtctctagatcaagatatagtttcatgggttctgttgacgaggacgggccttacgggagaggcagatatagctatgcaatgggaccagaagtaagtctaaacgagtggagaaaagggtctcagtggtttgaaataaacagagcacttgctgttgatattgttgaagacatggtttactataacaaattcaaagagttttgtagacctccttgttatgtagatgaacattacttcccaacaatgctctctattggatattcggattttctcgctaatcggacattgacttggacagattggtcaaggggtggtgctcatccagctacttttggcaaggctgatataacagagaagttcatcaagaagctgtcaagaggtaaagcttgcttctacaatgatcagccatctcaagtttgttatctttttgcaagaaagtttgctccaagcgcattgaagcctttacttaaacttgcaccaaaggttcttgggttctaa

SEQ ID NO: 165614 - DNA, 1415 bp, Arabidopsis thaliana landsberg
  unsure (1)..(1415): unsure at all n locations
atgggtaggaaaaagaaatctagggcttcgacaaccgaagaagatgagattgagatggataatgctggcccatcctctgagacaagtctntacgaggtattttcggatttctctttccgatcgctgctctttctctcgcgtacttagggttttattagggatttcaatttaagcttgttttctgggtttggtttatcatgattctagaaaatagtttggaatttgtctactttcataaaatttggtgttttgatatataaatttttaagtagattaaacactaatcataggttttgatcagtgatcttatatttgattaggattttggtatcaggatgattcgattagctaaaaagacagaaatcaatagaaactaactaatatctctctgtcaaaggttcttggagttgaaagaagagccacttcacaggaaataagaaaagcgtaccataagttggcattgaagcttcaccctgataaaaatcaggatgataaggttaaatacacactcttttacttgagatattttttggattcatttacatgaagattctactattgttttgttacaggaagctaaagacaagttccagcagctgcaaaaagttatatcaattcttggtgatgaagagaaaagggcagtctatgatcaaactggctcaattgatgatgctgtgagtctctgtttttgttgtgtttgttcagtttgatcgagtgaagaaagcacttaacttcctcattagtattatgagattttcttaaacctgaggtgtttttccatgctcgttaggatattcctggagatgcgtttgagaatttgcgggatttcttccgggacatgtataagaaggtagcagaaactttcactagtgataccttttacacatctgcttctgctgcttacactaactttttttttttgtgttgctgcttatatataggtcaacgaagctgatattgaagagtttgaggcaaactataggggttctgaatccgagaagaatgatttgattgagctatataacaagtttaagggtaaaatgagcaggtaattaatcatccccttgttttcattattgtcaagtttgtgagttgaagtttgtataaacattattggtactatatctctttcaggcttttctgctcaatgctttgctcgaaccccaagcttgattcgcaccgtttcaaagatattatcgatgaggccattgcagcgggtaggcttctctttcttgcaataattcttttgtctataaaacctatccaggttctgatttgtttgtgcataccattgtttaacatctgcaggagaagtgaaatcaacaaaagcttacaagaaatgggcaaaggagattgcagaaatggaacctcccacgaatccccagaagatgagacggaagtagacttctatttgt

SEQ ID NO: 165615 - DNA, 2286 bp, Arabidopsis thaliana landsberg
caagtttaggagagttctccgatcagcgtatagacagcatcaacctgattccgagaggagatccgttggacgtgcccgtccgtagcgtcatcgttcgggatctgaactggtaagccagatcccgttgaatttgatgaattgggatccatgatcgttggtcacaattgatgtgttagtttcggtgttggaatgatctatttccgtccccacagacggtgtcaaatatgggttctgaaatccacactagagatttgtaattgagattatgagaaaggaggtctataacttcactgaaaccttgagagttatattgctaagaacgaatggaatttttgtattgattatgacaaagcttttacaatgtgaaatgagattacaagtgtaaaagtatgtgtgtgaatgtaagctgaattgaatgtgtcttcctagtcgtccttgctcccttacataggtctacgcacgtggtagctccgtccgggatattcggagatcctcctggatattcagtaggtcagttccgcgaatatctcctcatcagttcttaagttgttatttgcttatctcccttcatcaggtgaccgggcttatctggcccaagtacctattcgcttatgtgggctcatcagctgcgtaggtcctctacttggtgggcttggtgggctttgtgggctggcttggtatttttgcaggtggattcctggaggggaatccagctccaacagatactcaggattctttcagataccaatccatcaagatgatcaggagaagaccacattcacgtgtccctatggtactttcgcctatcgtagaatgtcgtttggtctttgtaatgctcttgtgacatttcagagatctatgatgtcgatcttcacagacatgattgaggatcatcgaagttttatggatcacttttctgtttatgggtcttcatttgaagcatgcttggagaacctttgcaaagttctagctagatgtgaagagaagaattaggtttttaattgggagaaatgtcatttcatggttcaggaaggtatagttcttggtcacaaagtttcaggtgctggtattgagtttgataaagccaagataaaggttatgaaaagtttacaggcaccagatagcgtgaaatctgtgaggagttttcttggacatgttggattttacaggaggttcgtcaaggatttcagtaagattgccaggccactaacaactttgcttgctaaggatgtgaagtttgacttcaattctgagtgtcatgctgcttttaatgagattaagaatgctttagtgagtgctccaatagttcaagctccggactagaatttaccttttgagataatgtgtgatgcgagtgattttgcagttggggctgttttaggacaggggaaagataagaaacttcatgccatctactatgcaagtaggacacttgatatgctcaaaggaattatgcaactatagagaaggagttgttagctgtggtgtttgcttttgagaagttcatatcttatcttgttggatccaaggttattgttcacacagatcatgttgccttgaagtatttaatgcaaaagaaagatgctaagccaagacttttgagatggattttgcttttcaggaatttgacatcgaggtaagagataagaaatgagttgagaatagtgtcgcagatcatttgtgacgcattaggatcgatgatgatatccctattaatgatttcttgcctgaggagaacatatacatgattgatacagctaaagaagatgactgcaaatgtgatgagatgcagaatcgagctttagtgtcgatcgacacttcgtctatgttgatagactatcacttttcaaaagacgatgatttttgcagtagctcgatggtatactgacattgttaattacctagctgcatatgtggaaccggataatttcacagattatatcaagaaaagatttctgagagagattaggcgatattattggaatgaaccttatctctataagcattattctaatggagtttataagagatgcattgctgcaacagaggttcctgatatattatcgcatttgtcacagctccagctatggtggtcattttgcaacctttaagacagtatccaaagttcttcaagcaggtttttggtagcctacaatgtttcgggatgctcagaaattcatatcgcaatgtgatccttttagagaaggagaaaaataagcgagcgtaatgagatgccccagaaatttatcctcgaagttgaagtcttcgattgtgggatataatttt

SEQ ID NO: 165616 - DNA, 1798 bp, Arabidopsis thaliana landsberg; identical to SEQ ID NO: 7378
  unsure (1)..(1798): unsure at all n locations

SEQ ID NO: 165617 - DNA, 481 bp, Arabidopsis thaliana landsberg
  unsure (1)..(481): unsure at all n locations
aggattccgccaaggttcgtgaagctacaagggtctaaactctcagaggttgttacattagtgactcctgcgggatataagcgttccataaagcttaaacggatcggtgaagagatttggttccatgagggttggagtgagtttgcagaggctcattccatcgaggaaggccactttctcttgttcgaatacaagaagaattcgagtttccgtgtaataatcttcaatgcttcggcttgcgagaccaactatcctctggatgcagttcatatcatcgacagcgacgatgatataatcgaaattactggcaaagagtttgttggaactcagggtacaaggaaaaataatcaatctgttaatgggtggtgatacagagcacaaatccaagaagagaccaagagacatcgagtttgacaagattctacacggtaagaagactntgttcatacaattgtatgattaagaagattggatctgaata

SEQ ID NO: 165618 - DNA, 844 bp, Arabidopsis thaliana landsberg
tctctcaatagacagagaaataatgcaattgcttccccacgacaccgttgaggatattcttgagagagttccggtgaaatctctgctcagattcaagtctgcttgcaaacaatggaagttgacaatcgaatctcaatatttccaggcgaaacagttgatctgctcagctggcgggaaagatctaaatcttgtattggtgtctgaagtacccagtacgttggtgttgccccatcatgttactgctgattctcctccacttaaaactaacgtgttgttgatatcatcagaacgatatcatatttaccaacttttccacaatagttgtgacggtcttgtttgcctctttgattaccaaaccttaaacaacattgtttataatcccgccactcgatggcatcgacgtttccctgtttccaggttgcaacaaatctgtcttgagcagccaagttattttagtcacgttaaatttggatttggcaaagacaaaatcagtggcatatacaaaccggtttggttatgtataactcttccgaacttggcctagaaaacgctactacatgtgaagtttttgattttagcaccaacacttgcaggtatatcaatccttcttctccttatcggattaatacttcctcgtctcgggggcatgctctgtatgtagatggatcgctttattggttaaccgggaagaaagaaattaaagttttagcgttagatctccacaccgaaacttttcaagttatctctaaagctccttttgcggaagcagatcatagaaacattatcacacgcagcctgaaaaccggttgtgctaatgggtagtaaacctctccaacaatgatat

SEQ ID NO: 165619 - DNA, 1238 bp, Arabidopsis thaliana landsberg
  unsure (1)..(1238): unsure at all n locations
ggttcatttttgtgttgatgattcttagaaagaagagagaggaggtcttgtttacataaccttcaaagttagggatgtagagtatactcttgatatatgccatcttgataccattttcgggttcccaagtggagaaggaatccgccaagactatgatcaagaagagctgaaatctctttggaaagcaatacccggtctgaagcccttcttaccaaccaagagcaagagttcttcaatccgtaatcccgtgattagatacctccaccaatgcatcgccaacatcctctttccaaagaaggctaccggatttgttagtgaagaggagctatgcatgatataccaatctttggtcttcattttgagggaaacaagagatgggaagaagatggcgggtgatagagcagacacttcgttgagtgttgttctcttggatcacttattgagttacaaggagtatgctgcaaccatccatcgctcgggaatttgcgggagtctttgtgttggcggtctcttaacgccaatactaggagccgtgggtatgaaatttggagcccctgacatgttgcctaagttcattgacctcgactatctcaaggggaaggattttcttgagaaaacaactccggcagatcgctatctcttcaagttcaaccactcggagcttggaccttctcttctacccctaccatgcgagaaccagacttcggtgaagacaagacgcaacatcaatttcatgccatctccctctgccttgaacatcgacattggaggagctcgggaagataaaccagaatatagtccagccgactatgagcaacatgagtaatttactcaagctgattatgaggagcaaatcgagtttgagcaacatattgatcaaccggagcatgggaccagcgaacaagagcaagctcattatgaagaaggtgctaaccaaggaggagatgagtttgctgaagttcacaagaagctcgatgtacttgaagagcttgggaaccttcacagaaagacaatgaagggtttcaagaagaagaggagaacaatgaagaagtctctcaagagtatggctgctcaactcaaggacttccagagcaagccaaggccaccgtctccaacccccgaagtaagaagaagcggttcaacgagctcagatgcaaggagagctgaaaggatcgatcaaccccgagcttcatcttttgagcctcgggaagnnnnnnnnnnnnnnnnnnnnccaagga

SEQ ID NO: 165620 - DNA, 620 bp, Arabidopsis thaliana landsberg
aggaattaaaacaaacaaacatatgtttttgttcctcatgaatcatttttttgcctaaagaaatcaatgccgcgctaccactaaacatacatacaaaatgtacatagtcatttgctcatatatagatctaggaccaaagctttttgtcttaaccaaaatttgggaggtgcattgcaatttgccaagaaagaaaaaagataaaactttatagtaataagagcactttatgattgaattcatgaggtgagctttttgttttgttttagacaggagagatttactacataaactggaaaaacggaatgagagtgaaagaggatccaaggaaagtgatgaatgcagatcctgacagtggagactcatatggaaccgtgtgttcagaagaagatagctcatattacgacagcgaagagtcttcatcagagtcatctccatcatcaagagagaatcataaagaagaagaagaagaagaggaggaagaagaagaagaagatgtgctagtggttgctggttgcaaagcttgtttcatgtacttcatggttcctaagcttgttgaggactgtcctaaatgtgcagcacagcttcttcactttgatcgacctcattctgcatcttcttga

SEQ ID NO: 165621 - DNA, 1372 bp, Arabidopsis thaliana landsberg
taacggggaaactgtggccaaagctgtaccaaatcaagctaaaacaagcatcagcaaagagccgaaattatatcgagcaacaatgcttggtatgaaaatattgtgcatggtaatggttagaatgtatactggctataatttaccataatttctgaacattagcatttagcaaacttcaatgattgaagatgagaatcaaaacctcgtaccttgaaaatccaaaatcgcggcaaaaggaaattacaattcccctcggttaacaaaagtctctcccaaaatcaaacgacgtctctgacactctgcaaatgccacaccacaaaacataatcccataaatagtataatacccttgaccaacatcttcggcaaaaaaactaaacacaaaacgtttttagttaaaaagtgatcaaggcccataaagggcccaacgaatattaacacctaatctgttgtctccttccgccgccgatccccaaagaaaaaagtaaaagaaatggagaggttggtcagcggagagacaacgacgtcgtcgaacatgaagaagaagaagaagaaggtgtcatcgacaacaaatccgtcacttcccgatgatttggtattggtcatcatcgcacgcgtctcaatattatactatcctattctctcactcgtctgcaagagctttcgatctctcctggcttcaccggagctttacaaggtcaggtcactcttgggccacaccgagagctgtctctatctgtccatagcgtgttatcctgattatcgcatgttcaccctctgccggaaacctgatcaaaccctaaccaccagtgaggaggaggagaagaagaaatcaaatggttattatttggctccagtcccagatccagattctcatcctgtctacttctcgagtctcgtcacggttggttctgatatctacaacattgccggttcgcacgcctcctctaacgtctcgattctggattgccggtcaaacacgtggcgcgaggctccgagattgggcgtggagctaacctcagtttctgctagcgtccttgatcgaaagatatttgtagtaggaatgtacgcagatgatgaagaatctgaatccaagatcgacttctttgaggtgttggacacagaaacacacacttgggatcctcagcccttcaattgcagcgagacaaaagacaagtttttaaactgcagacccgcatttattgacggaaagttcctcgtgaaaccttggattcatagaggggtggttgcttacaattccaaggaaagtagatgggacccggttcaaacgaagatggctatgtccatgtttaatgattcttattgccaaatacaaaatgttatctacttagcttttacggaaggatcagatg

SEQ ID NO: 165622 - DNA, 1199 bp, Arabidopsis thaliana landsberg
tggtaatgctcaaatggcgcgggtggatcaacgatgttgtcaaacgaaaagttcagcatctcgatcttgagtggggtgcattggaaatacctccaatagtttacgtgtgtaagagtttggtatctttaaagctttgtggtgtaatgttaccaaatcctgagtttgtttgtttaccgtctgtgaaagttatcgttctagattgggttaagtttgcaaatgatttggctttggaaatgcttatctcaggctgcctagttctcaaaagcttaacgttatgcagaagtaacaatgacaatgtaaaagtattacgtgtgagatctcagtctctattgagcttcaactataatggccccaataccatgggtcctgaatatgaggaactaatagttgaaattgatactcccaagcttcaggatctaacgctctctcaccgtatgactgcaagtttcataatagagaatctgagttcccttgtagaggcggatatcgatattgagtttaacttttgtcgggggaaaaagtttgatccggatgatctgccaaagagagaaatgattcgtaattttcttgtcggactctctcgtgtcaaaactatgacaatcgctgcatgtactcttgaggtaacgtttgttgatttcgtattttattgttttactttatcatgtataactttattctgatacttttcttgtatttatttttgttgtaggtcatttatgattactcaagatgtgaaccactgccgttgtttcctaacttatctttcttcagtgttgaattctatcagaaaagatgggaaatattgccattcttttttaagagctgctcgaatttaaaatccctggtcttggtaaggatttgtttacttaaaacttatcaactttctttggtaatatcaatcactcaaacttgtttcgttcacttaggtgttatatcaggaatctgattactttccaaggaagagaactagtattatatctggacctcggtgtctcctatcatctctcgagtatgttaagatagaatttgcattggacaaggggaagatggaattagtgagatacttacttgagaactcaccaatcctcaagaaactcactttatcattggatcattgttctagaaagaaatgttgtgtcatcctcagagaactccttaaaattccaagatgctcgagctcttgccgagttatcgttctc

SEQ ID NO: 165623 - DNA, 2031 bp, Arabidopsis thaliana landsberg
  unsure (1)..(2031): unsure at all n locations
atgacgagagaggagactgaaaccagtggagaggatatgatgattgatgacccaaaacccaaaatcgaaaacgatttcaatgttcattacctccgaatttactacggcaagttttaatctttatcacatttgggtatatgtctcctcataaatcaaatctgacttttttaactcataaagatatatatgcaggaaatctatttccttacactgatattcacaaatggctttcttatgggcacggtacttgtttgtttacttgtctttctttctttctgtcacactctttaaaggttagaaatggttgtgatgaattgtatatttgtctgtgtttgtaaatctgtagatgggaaacatcctggttgtgatgaatattactttggtagaagagaattctcgtttacgcttgaaaacgatgtttatttgcggtataagtctttcaagaatgcttcacttatggaagctgctatcaaatcgaattttccatacaagattgatattggtgctgtgtatagcgttgatgtaagttgcaaaaatccgtttttcaagctttggtgctggtctatgaaactagatttactcatttgagttttgtaaatgtgttttttcagccggataagagacatgcatatgctcaaagtggaaccaatttgtttactccagtggagagggagttagtctttgatattgtgagttttaatatcttattaagaatttcgtataattggttttgtgtttttgttcttacgtagtttgttttagttgcttgacttgaatatattgtttcctcaggatataacagattatgatgatgttagatactgttgttcgggagccgatgtttgctccaaatgctggcctttaatgacagttgctatcaaagtcattgatacttccttaagaggtatcaaaaatgttttcttaactctcaaatgtatgatacaactagagtttgtagtgttcctgagattttccatccctatgagtttttgtaatatttatagcccctgtaacgtgaatgtcattgtagagttcacttcttgatctagtgtttgtcaatgtgcaagactgcttggtcttatcatagaacaaacttgtagtcactcattctggtcttgtcaattgcagaggattttggtttcaaacacatcctctgggtcttcagtggacgtcgtggagtggactgttgggtttgtgatgctaaagctcgaaggtgaaacaattactaacattgtttttcacttcgcttggtgtatgaatcactttctgcatttcatcttctgttttatgaaatgaaacgttgtgtgattaaatcctgcaggttgactaatgaacaaagatcagcagttgctgaatactttcgtgtttataaggtagtgttctcaagagctcaacgatggtttattttgttggtttctggcattgtgaaattgtctgagttcaattattgcctatgtgacacagggaaatgaaaacaatgcaaaaaaggtcgatctgatgggtcattctcttcatccgtttcttgcgtaagggtttctccatcacctctgcctttctgatttcaaaaacactgtctttgttactaatttcttctgggattttcaggagatcatatgtggactttcttaagagtttctttgagggtgagttacaagcaactcaaagtatattctcaagcaaagaaaagtatgagaagatacttgggatgattacagatgaaggtatgaaagagtgttgatgtatttttccgcctacgtgacgtcctaatctcagtttgtgtcatttacaatgatttgcatcttcatgacagatattcaagcagacctcagaggaaagtgggagaattctgcgagatcatctctatcagaagaagccaccagccttttaaggtgggaacaacttaagaaagctcttcaatcgaagagaaacaaggtgtgtaatgttttaaaggaattcaaacatgtatgttaagtgttgtgaaaaccttatttgtctttcactcagctnttagcttgatgaacttgaatctta

SEQ ID NO: 165624 - DNA, 1551 bp, Arabidopsis thaliana landsberg
tgtggggatcgatgtgaacagtcctttgtcagttgggacatgcttctgcatcttactattccgacataattgggaagatcgaaagcataaacctcttgagcggacatccaatacaggtttgggttgattatgaagacaatatgcttaatgtttcgatggctcctcgtgaagtgcagaagccaagtcagactcttttgccacaacacattaatctttcagatattttcccgaacagaagacttttcgttggattctctgcagcaacagggacagctatcagttatcagtatgttctttcatggagttttagcacaagcagaggatcactgcagcggtttgacatctcaagactccctgaagttcctcatcctagagctgaacataagaacctatctccattgtttattgacctgcttggttttctggctatcatgggcttgtgtactcttactggaatgtattttttcaagaggggcaagtatgcagaaataaccgaagaatgggaaaatgaatttggtgcacatcggttctcttacaaatccttgtacaaagcaacaaaagggtttcacaaggatggatttcttggaaaaggaggttttggagaagtctacagaggaaaactccttttaagcagagaaatagctgtgaagagaatgtcacatgatggtgatcaagggttgaagcaatttgtggcagaagtggtgagcatgagatgtctgaaacataggaatcttgttccacttcttgggtattgcaggagaaagcatgagtttcttcttgtctctgattacatgaccaatggtagtctcgacgagcatttgtttgatgaccagaaaccggtactttcttggccacaaagacttgtgattattaagggtattgcatctgctctctgttaccttcatacaggtgctgaccaagttgttctgcaccgagatatcaaagcttcaaacattatgttggatgctgagttcaatggaaggttaggggattttggtatggcaaggtttcatgatcatgggaaagaccctgctacaacatgctgctgtgggaaccattggctacatggcaccagagcttgctacagtgggagcttgcactgccacggatgtgtatggctttggtgcctttttacttgaagtaacatgtgggaggagacctgtggaacctgggttgtcagctgaaagatggtatatagttaagtgggtctgcgaatgttggaaaatggcttctttgctaggagcaagagatccaagaatgagaggtgaaatctcagctgaggaagttgaaatggtattgaaactagggttgctttgcacaaatggtgtgtcagaactgaggccttctatggaagatattgttcaatacttaaacggaagcttagagctgcctgatatctctccaaattctcctggtatcgggtcctttaccccactgattatcggatcaaacccccctgtctcccccagtaccaagaccttttacacttcttcctcagccaacgattccacatttgtcactcactcaattatccatggggatggacggtag

SEQ ID NO: 165625 - DNA, 1070 bp, Arabidopsis thaliana landsberg
tttgcaacattcaagacaacatccaaagtttttcaagcaggcttttggtggcctacaatgtttaaggatgtctcattgttcatatcgcaatgcgacccttgacagagaaagggaaagatcagcaagcgtaatgagatgcctcagaaatttatcctcgaacttgaagtcttcgattgttggggtatagatttcatgggacctttcccaccttccaacaagaatctctacatcctagtagttgtggattatgtctccaaatgggtagaaactatagctaatccgaagaacgattcagcggttgtcatgaaactcttcaagtctatcatcttcccttgttttggagtgccagcatagtcattagtgacggaggtaagcatttcattaacaagattcttgcaaaattgctttacagtatggagttccgcatcgggttgctactccctaccatccacaaacgagtggccaagttgaagtttccaacaggcaaaatcaaagagattcttgagaaaacagtgggtaaagcgaaaaaggagtggtcctacaagttagatgatgcactgtgggcttacaggacagctttcaaaactccacttgggaccacaccttttcatcttctatatggtaaagcttgtcatcttccagtggaattagagcacaaagcagcttgggcagtcaagatgataaatttcgacatcaaatcagctggagaaaggagacttatttagttgaatgagcttgatgaaatacgaaataacgcttatgccaactgagaagctctacatggaacgcacaaaagcttaccacgacaagaagatcctcactcggacctttgagcctaatgaccaggtacttctttatgattctagattgacaatatttcctggaaaatttgtcttcttgttggacaggtccctacacagtccactcggttaggccatatagaacagtcattctcaaaaacaacaatggaaaccatttattgtgaatggacagagagtcaaacactattggctgaagccgagattccagtagaaaagcctttggatcttctggactcacctgttgattaa

SEQ ID NO: 165626 - DNA, 305 bp, Arabidopsis thaliana landsberg
attgtttttcgttttcttttattattattgtgttatgtgcaggattgagtaatgcgaagttcagagaaaaaaattctgtagtttttaagaattctcttggtgtgaaaaacgttctcaagattcattgtacatcaaaagacgacgacctaggctaccactatttgagacctggagtacaaatctacgaatttcgttttcatgatagtgttttgaaaactaaatttaattgtgagttatggcagggacgtggtcctacttacaagttttatgcaaattttagggcggataaaggtggcggtgagata

SEQ ID NO: 165627 - DNA, 951 bp, Arabidopsis thaliana landsberg
  unsure (1)..(951): unsure at all n locations
tctataaatactctttttttctttatacctttgagatctctctcatggcttttcctcagagaaaacgaacaccttctgtctcttcctctgttcttgactctgtttaccgctctatcgaagaatccgacggtctacaaagtgacctaaaaggatccatccacgaaaatgtatcttcgtcatcatcctcaccatcgccaaacaagagagacgacaagcttacaactccaaggcgagcaatcatggaagaagaaaactggctttacgcccgaagcagcaccactaccactaactcctcggattcctctgctttttcgtcttccgaggcagagtcctatcgaacaaagagaaggttgagaaaacttgcggaacaaggtaaaagatcaggtgatgagagacagagaacaaagagaacatcggtaatggactacgatagtagattgttttgcaagtcggatgatgataagaagcctaaaggcgtgaagatgattgaggagataaagagatcgaagcagccagtctctcctggagcgcgtctcacgagcttccttaactcgatcttccaatctaacgccaagaaagtgaagctttgttctgtcggtaagacaacagacgttaagtcctcatcctcaaagtcttgcttcagtcgaacaagaaataaaaccgacaacaacaacaacaactgcaagaagttgaaaggtctataagatcgatccggttagagtaacnnnnnnnnnnnnnnnnnnnnnnnnngctcaaaaacacattactcgcgtgaggaaaccaattccagaatttaccgctaagaagagtgtcaaagaggagattaagaccaacgatcatcacactgagtttacttgcatcacaagaaatataggtttgaaggattttgtgagaagtaacaaatatgaaggtaaagaagaggaggaggatgctggagtcaccaagtgggtt

SEQ ID NO: 165628 - DNA, 1412 bp, Arabidopsis thaliana landsberg
cttaatgatagcgaagatggtaatagtaacaatagcggtgccgatggtaatagtgatgataacagtggtggtgccgatggcgatagtgagacaacagtggtggtgccgatggcgatggtgacgacaacagtggcagtgccggtggtgatggtgacggcaacaatcgcggtgttagtggcgatggtgacgacaatggcggtgccggtgacgaaaagataattataaatatatattgatttaagaaaactaaaccctaagatactatacatagaacccaaacaaaaatcattaaacgaaatgaaatcatctcaactttcaattttcaaaaatctaacagcaaaatagaatagtacaatggtgatgatggctccggtgacgattttccggcgatgtggctctggatacgattttccggcgacaatggttttaaaggtagtggtggttgtggtggtagtggaagaaaagaagaaagaaaagagaaaatgttcacacataagaaagaagaagagggtataattgtatttattacatataatatacacaatatcaccttatagtttttgaagtgttagtttccaaattattaaatttttttaggttatacttgcaaatttcccaagattttatccaacgtcggtgccatatacaatcgttgttaccagatgatgtatgttagtaacttactaacgtttgagcacaaaaatatcatctaagaaatatatggatatttaaagataaagttgttatatataattaggggtgtcaaaataggtaactcaactcataatcaaatgagtttagggttatatgagttatgggttaatccaactcattttgttttatgggttgggtcaacccataactcatttaatttgataggttgagttgttaaatgggttaacccatttaaataataatttaattaattattattataaaacaataataaaaattatcattattaataattattaattcattatcatcaaacttagaatatttacagattctaccgtttacggatttacgtttttggcggaaaaattacgggtttacgtttttagcgagaaaatcacggatttacgtttttggcgggaaaatcacaggttttcgtttttggcagaaaaatcacgtgttttcgtttttggcgggaaaatcacgggtttacgtttttggcgggaaaatcacgggttttcgtttttggcgggaaaatcacgggttttcgtttttgactggaaaattacatgtttttcgtttttggcgggaaaatcacgggtttacgtttttggcgggaaaataacgggtttttgtttttggctggaaaattacatgtttttcgtttttggcgggaaaatcacaggttttcgtttttggcgggaaaatcacagggttttcatttttggcgggaaaat

SEQ ID NO: 165629 - DNA, 529 bp, Arabidopsis thaliana landsberg
atgtttaggatagttttgcatgcatgttgcatatttgtgttattttcaggtcattcggagctcttgacgagctaattggaagaagcggacctgatcatgcaaaaccactcgacccccaggtcgagtagtagcttcacaacctcagcagaccactcgaccccctggtcgagtagaggacatcaccacttcacctcaccactcgaccccgaggtcaagtgtcttcatcccatcacctgaccgccactcgatcacatcattcgaccccgaggtcgagtgtcttcacctccaccacctgaccatcactcgatcacgtcactttacctggaagtcgagtatctccatcaccaccactcgactacatactcgatgtcgagcttgagagtcttctccattccgcattcaactagacactcgagcacaagcaagaaaagaagactccagcttatcactcgaaaacacgctcgaccacctgggtcgagtacagttcttaacccgtcccacactactgcgtcgtttaagatattagggt

SEQ ID NO: 165630 - DNA, 3431 bp, Arabidopsis thaliana landsberg
atgattgacgagaagatgagatctaaatccattggtccttttgtgagacaagtaaaacctttgagtcctcacatggttctctttgtccttctctacgttctttccatttctgtcttctttcttacagtttcagaggctgtttgtaatcttcaggatcgaaattctctcctttggttctctggcaacgtatcatctccagtctctcctttgcattggaattcgtccattgattgttgctcctgggaaggaatctcttgtgataagtctcctgaaaatcgtgttacttcgattattttgtcctctagaggactctctggcaatcttccgtcgtctgttttggatctccagcgtctctctcgtctcgacctttctcataaccgtctctctggtccactcccacctggtttcctctctgcccttgatcagctcttggttcttgatcttagttacaacagtttcaaaggtgaattgccacttcaacaatcatttggcaatggaagcaacggaatcttcccaattcagaccgttgatctctccagcaatcttcttgagggagaaattctcagtagttctgtttttcttcagggtgctttcaatttaaccagtttcaatgtcagcaacaacagcttcacgggttctatcccttccttcatgtgcacagcttcgccgcagctcaccaaactggatttctcctacaatgatttcagcggtgatctctctcaagaattaagcagatgctcgaggctaagtgttcttcgagcaggcttcaacaatctctctggtgaaatccccaaagaaatctacaatcttcctgagctcgagcaactctttttaccagtcaaccgtctttctggcaaaattgataatgggattactcgtctcaccaaactgacattgcttgagctttactctaatcacatcgaaggagaaatacccaaggatataggtaagctttcgaaactgagtagcctccaactccatgtcaataacctcatgggttctatcccggtttctctcgccaattgcacaaaactcgtgaagttgaatttacgggttaatcagctgggaggaactttatcggcgatagacttttcccggtttcagagcctcagcattctggacctcggaaacaatagcttcaccggcgaatttccctccacggtttactcatgcaaaatgatgacagcaatgaggtttgcaggcaacaagttaacgggacagatatctcctcaagtactggaattggaatccctgtcgttctttactttttcagacaataaaatgacgaaccttacaggggctctcagcattctacaaggctgcaagaagctttctactctcattatggcaaagaatttttacgacgaaacggtaccaagcaacaaagactttcttcggtcagatggatttccaagcctccaaatttttggtatcggtgcgtgcagattgacaggtgaaataccagcttggctgatcaagctccagagggtagaagttatggacctgtccatgaaccgattcgtggggacaattccgggttggctaggaactcttccagaccttttctacttggatctttcagataaccaacttacaggagagctgccaaaggaactctttcaactaagggctctgatgtcccaaaaggtaacagaaaataactatctagagctgcctatttttctcaatcccaataacgttacaaccaatcagcaatacaataagctgtatagtttcccacctgcgatttacatcaaaaggaataacctgacagggagtataccagtcgaagttggccagttaaaggttcttcatatcctcgagcttcttggtaacaatttttctggcagcatcccagatgaactgtcgaacctcaccaacttagagaggctggacctctccaacaataatttatctggtagcatcccttggtcgttaacaaacctcaatttcatgtcttatttcaacgtggcgaacaacagtctcgaagggccaattcccagtgaaggtcagttcgatacatttccaaaagcaaattttgaaggaaaccccttgttgtgcggtggtgtactgctgacttcctgtaaacctactagagccaaagaaaatgatgagttaaacagaacatttcttatggggattgctattggatactttctcagctttgtttcgatcttagtggtgcgtgcctggtgagtgtaatgtaatcatatcaaaacgcagaatcattcaaaacggtttggagttccatttcattttccatgggggaacaaactaggactattgtaaatatcctcaatttgtacaaaaaatgaaataacagttactatggattcgatggtatcaacaaatttctctcaatttgatggccaaaggaatctaatgaggttagtgcacttggattctagagtcactctacactcacaagaccaaaatcgatttgagcatattaacttcatgagttttggaaagaaataaaaaaaacgtccaatgacacactgaaattgaacccaaactattctactagaatcagatggcaaatattgcaaaaaggaaacaacgaagataaaaaaaactggaggcatcgtatctggagatgagagaagaaatagagacggcgagattcagacggacagattttttcaaataattggattaatatcatatggtaaagcatttgggtccaaaccgaaaaatagcattgcttagtgctcgagttacacaagattacaccttcttatgacatcattactacaccactgaaagaaaaaaaaagagagaaaaatatccggatcggccggaaaaatgtaagaactaattgacgccgtgagattcctctccggcggaacattgataatagaaacccagtcgctgtagtagctaaaaaacccaaaacccgttacgtaagtaaagaggcctcaaggcccaaaagagacccgatccactagatgaatcagagatcgaccaaacaaattatgaatacccaattaagtttaatcttccaagtaattttgttagtaatcgtcgtgatctgtgtacgagcggaggagcatcgtggcgcagagtcgaattatacagagacgagcatgttgttgtttcatcagagaagtgcatttcgaagtgaagctgttcctgattttggaattagagttcgtcttctttgccaaaaatccacccatgttcgaatgaagaagatttgatgattcaactcttctatttataagcattggcttctcagagaccaatttaataaatatcgagttttttttttcattggatttgaaggaagcctgaacttggtcttgttttagctcaatttgaagattttgcgcttgaggtaatctcgccgtacaactatggagtattatacacatttgctcatttttattctatcgatacagaagattttgttttagcacaaatcaacactt

SEQ ID NO: 165631 - DNA, 1313 bp, Arabidopsis thaliana landsberg
ccagagacccaaagtctgtggtccctcatcccctttctctcaatccgttgaaacttgaaaggcaaagcaccaagttttgacctagccagaggatgcttccaatcccgctttgactatgaggaagatctacagaaagtcttggataatagaccgtatcatttcgaccagtggatggtgattcttcagcgctaggaacctgtcatctctgcttctttcccctctcagattccattctggatagagctccagggactacctatgcacttctggaaaccttctatgcttctgtcaattggatccgagataggggaagtcgtggaccacgaaataacaccagctgcagcaaagataaaggtcataattgacggtctcaaaccaataacaaaggagacaatggtagactttgatgatggcagtgagatattagtaactttggagtataaaaatctcaagaatcatggcttacactgcttaagattgtcccatgagaaaaaggactgtccggggcttcaatcctcaaaagtttctctacaaaagagccaccctcctcctcctaaagctgcgagcaaaactaaatctcaaccctcttacacaccaagagattactctagactctcagtggaaggaaaaagtcattactctgatcatatcacttcgcacaatacagacaccagcagacggggaaatgatgatgtacgttacagaacacagccatcttctgggataaggcgatatgagccaaaagatttaccttttagaagatcgccccccagatcctatgcatccaccagagaagaggctcacaagtatcctgctagatactctcacagtgactccaggcaaaatctgcaatgtagagaaaaaagcaaatcaagagacagccatagaattgaaaactcagattcatcaagaacaaggcgctcacatctagagagaaacttagaagcagaggttacccccccccccctccacctttgccaattcctactactgaagaacttatgggggaactacgagaggttacacttcaatataccagttgtgctgatccaacaaagagcgcaacacgaaaacgcagggttgttcaaggagaagcgagagatcttatggctgagactgcagctcaaatgatagaggcggccataaaagcaaaccaagactacttgagagcctctgttgataatgtccagactgaacctgaagagcattcagatctcccaattcacccagcagagctccctacatcctcaagtgtgcctgcaaaaaagaaacgaggtcgccctcctttgaacagaactcaaaatagaagccct

SEQ ID NO: 165632 - DNA, 670 bp, Arabidopsis thaliana landsberg
  unsure (1)..(670): unsure at all n locations
tttctattaatgcacaagacgcccgctttgaatccggtcccggtgttccagctctacggcgagacccacgcctggccgacacccgaccccctgcactgcgagaccatcccgtcgcgcagcagcctctacgactgggagatccgcccgcaccgccacgccgacctggtgcaactgctctacgtgcgcgccggcgaagccgagctggaagtggagggcagcgtcacccgcgtgcgcgaggccacagtgcaggtctcgccgcccctgtgcgtgcacggcttccgcttcaccgcgcagatcgacggctacgtcctcagcctggcccagcccttcgccgaggaactgctgcgccagttcnaccgcgccgtgctggaacagccgcagtgctacgcggtgggcgaggacgagcgctacctgagcaccctgttcgactccatcgagcgcgaatacgcgcgccaggagccgggccgcgagctgatgctgcgctcgctggtcagcgccttgctggtgtggctggggcgccgccacctgcaggccagtcacgcccgccagcgccgggccggaccgaggtcgcgagcacctgccggcattccgccggctgggggagaaacacttgcgcgagcacctgccgatcgagcgctaccccagcgcctgggcatcagcgcggggcacc

SEQ ID NO: 165633 - DNA, 2434 bp, Arabidopsis thaliana landsberg
ggcaaatgccaactcacaccacctctccttcctcatccagaattcaagcttcatcggaaaccggagattcgccgacggcaaccgtctccgtttcctctcaggaggaaatcgtaaaccatgctccttctccggtaaaatcaaagcaaagactaaagatctcgttctcgggaacccctccgtctccgtggagaaaggaaagtacagctacgacgtcgaatcgctgattaacaagctgagcagtctcccaccacgcgggagcatcgccaggtgcttagacatattcaaaaacaagctttcgttgaacgatttcgcactcgtgttcaaagagttcgctggtcgcggcgattggcaaaggtcgcttcgtctcttcaagtatatgcaacggcagatatggtgcaaacctaacgagcatatctacactattatgatctctttgcttggtagagaaggtctactagataaatgtcttgaggtattcgacgaaatgcctagccaaggtgtgtcacgcagcgttttctcttacactgctttgatcaatgcttatggtcgaaatggacggtatgagacttctcttgagcttcttgataggatgaagaatgaaaagatatcacctagtattttgacttacaacactgtgattaatgcttgtgctagaggtggtttagattgggagggtttattgggtttgtttgcagagatgagacatgaggggatacaacctgatatcgtgacttataatacactgcttagtgcttgtgctattagaggtttaggtgatgaggctgaaatggtttttaggactatgaatgatggtgggattgttccggatttaaccacatatagtcatctagttgagacatttgggaagttacgccggctggagaaagtatgtgatcttttaggcgagatgcgtccggcggtagtttgccggatatcacttcttataatgtgttgttagaggcatatgcgaaatccgggtctattaaggaggcaatgggggtcttccatcagatgcaagctgcagggtgtacgccgaacgcaaatacatacagtgttttgctgaatttgtttggacagagtgggaggtatgatgatgtgaggcagctttttcttgagatgaaatcaagcaatacggatcctgatgctgctacatataacattttgattgaggtttttggggaaggggggtattttaaggaggtggtaactttgttccatgatatggtggaggagaatattgaaccggacatggagacatatgagggtataatatttgcttgtgggaaggggggacttcacgaagatgctaggaagatcttacaatatatgacagctaacgatatcgtgccaagttccaaggcgtacactggggttattgaagcgtttgggcaggctgctttatatgaagaagcgcttgttgctttcaacaccatgcatgaagtaggaagcaatccaagtattgaaacattccactcactgttatattcgtttgcaaggggaggactggtcaaggagtctgaggcgattttgtccaggttggtggattctggtattcccaggaacagagatacgttcaatgcacagatagaagcgtacaagcaaggaggcaaatttgaagaggctgtgaagacatatgtagatatggagaagtcaagatgcgatcctgatgaaaggacgcttgaggctgttttaagtgtgtattcttttgcgcggcttgttgatgagtgcagagagcagtttgaggagatgaaagcttctgatatactgcccagtatcatgtgctactgtatgatgctagctgattatgggaagaacgagaggttagtgccttcgccagtaatacacggtttctgatgttttcttttgcgtgtatttttatagctcataccttactaagcatgatgatttattccatcatcatagcattttgctctttcagttgccttctgtctatacatggtcaggcatgggggagatatgctagtgtaatgtagcaccctagttaattttcttgcagctaacttgagtgttctggataagcagtaactttagccattgttttgtatataacatcttaagattttaagcaacacttcaaattttttttttggtttataggtgggacgatgtcaatgagttattggaggagatgctttcaaatagagtatcaaatattcatcaagttattgggcaaatgatcaagggagattatgatgatgactcaaattggcagatagtggaatacgtgttggacaaactcaattcagaaggatgtggtttgggaataaggttttacaatgcacttctggatgctttgtggtggctggccagaaagagcgagctgcaagagtactcaatgaggcaacaaagcgtggactttccctgagttattccggaaaacaaacttgtgtggtctgcgatgtcataggtagct

SEQ ID NO: 165634 - DNA, 977 bp, Arabidopsis thaliana landsberg
atgactgatgcaatgttctcttcttcggccaagccacacttcatcaagcctatgcttccaggcttcgaaacctatattgtaatctctctctctctctcttactctctgcatgttgttagattttcttttaacgtttttcttactctgtttttctttgtttgcaggttattcctaaagctttttactcgaactacttagagggaagacaagagggaaacgctgcagaactgagatcagacgccacggagatcacttggaaaataaagatagacggccgaagaatgaccaaagggtgggaagaatttgcggtggctcacaatcttcaggtcgacgacattcttgttttcagacacgaaggaaatctcttgtttcatgtcacaccttttggactgagtttttgtgagatactttactcacagagagacgagaaagatgtcaaagacacgacgggtaagttaagttctttacagtactttcaagttaaatacgaaaagaggaaactgttgatgtttacttgtgggtctgcttctgattcaggaaaggttacaagatctagaacggtgaagaaaaacggaaaaaatgagtgttaatcagtggacactgattttgtggtccctgttacagcctcaaaccaacgagttgattcatttgtaataagtccttcattctataacttctttagaattatatttatggaatgaaattagtattgctgtcaactttggaaattttctttgcagtatcttccaagaggttttaccacatcaagtggttcgagtaaactgtgcaatgagataattctaatagatgaaaaagacaggccatcgacgctaaaactgcgttacaataaatcaagtaatcggttttgtgttagccgaggttggagagctttctgctgcaggaatggttatagaactggttgcccctcacaatcatattggtccgaaaaggaaaaaaaaccgtgctccggatttttc

SEQ ID NO: 165635 - DNA, 3495 bp, Arabidopsis thaliana landsberg
atggaatctatgcttgcgcagcttcttgcaggcctaacaaagctcgaaagcaaacatgattctatcttcagcaagattgacaatctacgctctcatacatccgagctctcacctacatcaacctctatcaatgcactcacactacgcagcggaaagctgctcaacccaatacttcagcgcgaatgttcagctcagacttcatcttttccaattgcagaaaaagactcaatgtcgatcgatacaccagggtgtcgatcgacaccaattattcttgacgactttgttttgcctttgtcgagtggaatctacaacttcgcggaggaggaggaaattattcctgatggtgtcgatcgtcacccaacccctgtcgatcgacacccagatcgttcagataatgtgcaaattccaactgaaaccaagtcagcaaatcggcgaattcctttccccaagagtcctaaaaagtcaaggcaagccttagatgatgtcagatgcaaggctatgattgataagctgattgttgagatgcctctagttgaagctattcatctttctcccacaataagaaggtatgttaagacaatggtcactaagaatttgacgaaagaatgtagtgttatgatgatttcagagcagggcagcgacaacattcaagaacaaattccaaaaaagctacctgatcctggaacttttgtacttagtgtcaccattaatcacgattccttcccaagagctttatgtgatctcgttctagtgtgaatctgatgcctcgttcagttcctatgcgtcgtgggtattccaatcttgagcctacctttatcactcttgtgttggcagatcgttctacccgaattccatatgaaattcttattgatgttccagtgataattggaaagagcatgattcttacagactttgtagtcttgccttatgagaaggaacctaaggatccattaatcctagggagatccttcttgcacacagctggagcaatcatagatgttcgacaagggaggatagggcagaatgttggcgaccttactatgcaattcgatatgaacactttggtcaagaaaccgatcatagaagggaaaacctttttgatagattctttcacttcatcagcttcagatagtatttcagagatcgaataagaagacccactagagcgagttttggtctctttcatagaggatagtgcagatttggactgcgaaacttcaacatatactaagctgctagatgagaccgaaaatgtgatgcaacttacagttgaagaagctcttccatctgtgacttcaacaccgactcctactttagattgggatccagcaaaggctcctaaaatcgaattgaaaccacttccaccagggctaaggtacgcttttcttggtgaaaattctacttatcctattattgtgaatgcttctcttaatcccgcagagctcaccttattgctaagaaagctgcgcaatcatcacaaagctcttggctattctcttgatgacattgcaggtatatctccagacgtatcatgcataggattcaccttgaggatgagtctaagtcttcagtcgaacataagagaaggctgaatccgaatctgaaagaagtggttaagaaagagattatgaaactgttggaagcagggattatctatccaatgttagatagcagttaggttagtccagttcatgtggttcctaagaagggaggtgttacagtagtcaagaatgagaaagacgagctgattcctactcggacaatcataggacatcggatgtgcatcgattacagaaagctgaatgctgctaccaggaaagaccatttccccttaccatttatcgatcagatgttggagaggttagcaaatcataagtactattgcttccttgatggatactcaagattctttcagatcccgaatcatccaaatgaccaggagaaatcgactttcacctgcccctatggtacatttgcttatcagagaatgcccttcggtctgtgtaatgctcctgcgacatttcagagaggtatgatgtctatcttcacagatatgatcgaggatatcatggaggttttcatggatggcttttcagtttatggatcatcatttgaggattgtttagagaatctctgcaaagtgttagcatgatgtgaggagaaacatctagttttgaattgggagaaatgtcacttcatggtacaggatggaatagttttaggacacaggatttctgagcatggtatagaagttgatagagctaagattgaggtcatgacaagtcttcaagcgccagataatgtcaaagcagtgaggagtttccttggacatgttggtttctataggagattcatcaaagactttagcagaatcgcaagaccattgactgctttactctgtaaggaagtcaaattcgagtttacacaggagtgtcatgatgcatttcaacagataaaacaggccttgatcagcgcaccaattgttcagccgccagattgggatttaccttttgaggtaatgtgtgatgcaagtgattttacagatagagctgttctaggacagaggaaggataaaaagcttcatgcaatctactatgcaagtagaactcttgatgatgctcaaaggaattatgcaactacagagaaggagttgttagctgtggtgtttgcttgcggaaaattcagatcttatctcgttggatccaaggttattgttcacacagataatgaacccttccgtatttaatgcaaaaaaaggatgataagacaagacttttgagatggattttgcttcttcagaaatttgacatcgaggttagagataagaaaggagttgagaatggtgtagcagatcatttatcacgcattatgatcgatgatgatgtccctataaacgatttcttgcctgaaaagaacatatacatgattgatacagctgaagaagatgactacaaacgtgataggttgcagaatcgagcttcagtgtcgattgacactcccattatgtcgatcgacactcacatttcagaggaagtagacattcgaagttgtgcgatggtgtcgatcgacaccactgcacctgtcgatcgacacccttctagatcgacaagaaattggtcaccaattgagaattgcactgtcacaacggtcgagaaggactatccatggtatgctaacagtgttaactacctagttatagatgtggaacctgataatttcacagattacaacaagaagagattcctaagagagattaggcgatattattgggatgaaccttatctctataagcattgttctgatggagtttataggagatgcattgctgcaacagaggtacctgatactatcacattgtcaaagctctagctatggtggtcattttgcaacctttaaaacagtatccaacgttcttcaagcacgtttttggtggcctacaatgtttcgggatgctcagaagttcatatcgcaatgtgacccttgttagagaagggg

SEQ ID NO: 165636 - DNA, 1210 bp, Arabidopsis thaliana landsberg
tttagtcaaacaattcacatttggtatcagagcttgcaaacaagaaacaacctgtgtgagagagtgatcgagagagaaagataaaagagagagagaaaagtgagaaaaagagagatgtcgtcatctgagaaatttgtgcagccagctatcccgagatttgatggctattacgatttctggtcaatgacaatggagaattttctccgtagcagagaactgtggagattggtggaggaaggaattccggcaattgtcgttggaacaacaccggtcagtgaagcgcaaagaagcgcagtggaagaggctaagctaaaagacttgaaggtcaagaattttttgtttcaggctatcgatagagagattctggaaacaattcttgacaagagcacgctctagggcgatctgggaatcgatgaagaaaaagtatcaaggttctacgaaggtgaagagggcacatctacaagcattaagaaaggagtttgaattgctggccatgaaagaaggagagaagatcgatacttttctgggaagaactttgacggtggtgaacaagatgaaaaccaatggtgaggtgatggaacaaagcacaattgtaagcaaaatactcagatccttgactccaaaatttaactacgtggtttgttcgattgaggaatcaaacgatctgagtacattgagtattgatgagctccatgggagtctacttgttcacgagcagaggctgaatgggcatgtacaagaagagcaggcgttaaaggtgactcacgaggaaagaccaagtcaaggaaggggtcgtggagtgttccgaggaagtcgtggtagaggaagaggaagaggaagaagtggtactaatcgtgccattgtggagtgctacaagtgtcataatttggggcattttcagtatgagtgcccagaatgggaaaagaatgcaaattatgcggagttagaagaagaagaggaactgttattgatggcgtatgtggagcagcatcaggcaaacagagatgaagtatggttccttgattcagggtgcagcaaccacatggctgggagtaaggagtggttttcagagttagaagaagggttcagccgtactgtgaagcttggaaatgatacgagaatgtctgtggtggggaaagggagaaaaaaagttaaagttaatggtgttactcaagtcatacctgaagtttattatgttccagagatagga

SEQ ID NO: 165637 - DNA, 639 bp, Arabidopsis thaliana landsberg
aacccttgtcatgaagatcactgccttgctcgttctcaagtgcgatcccgaaacacccgaacccgttatcctggccaacgtttccgacctctcacaattcggaaaattctctttttatcgctctaacttcgaagagttcattgtattcattgcccgtactgttgccagaagaacccctccaggtcagcgccaatccgtcaaacacgaaggttcttcttctttttttttggctcttggatctgtcatatatatgtgtcctgtttataattttgtaattgacatcgctgtgttgatatgtagagtataaagtgcacgcttacaacataaatggcctctgcgccgtaggattcatggacgaccattatcccgttcgaagtgccttttctcttctcaatcaggtacaaaacaaaatctaacttctggtacggtcttgtttgaaggaaaatattttttctttcgttgacattctgtttttgacaggtattagatgtataccagaaggattatggtgacacatggaggtttgaaaactctagtcagccgtggccatacttaaaagaagcttcagacaaatttcgggttctagaagcactaacttttttgtatctatgaatcttgtttagaactttaggactattt

SEQ ID NO: 165638 - DNA, 2273 bp, Arabidopsis thaliana landsberg
  unsure (1)..(2273): unsure at all n locations
atgctccgaggcattctcgaggtcacctcgggatggttcttcgacatgatctccgaggtgtttaaaggccagttcgggatggttcttcgacgtgatctccgaggcattgatcatggtcagctcggttacctaggtgaaatccgaccccaatagtttgccccccagctcattgacttggcacgagagacgatgagcttcatgaaatggattcccgagccgacttttcatcttcttaagtctgaatttgtcgcttcatcttcccggacggtcaaacttccgttgcgtaccgccgactattttttgagaagcggaaatgtttctcgcttattcccaaggatcacgcgagtgtccctttttgccgggctcacgcgcttcaacgcgttttatctacttgctgcggacccgacgcacctccaaaaactctatatatggctagccactcctttaagaagttctcatttgaagttttcgaagaaaagaaacaaggtttgtttccttctctctgatcttgatattcatattgtttttctcttttttcgctgaagctccgccgtttctttgttatttttgatttttctggtttagaaatttcttgttttttggtcgtttctcatctcgttgagcatctccgaaccgagaatgagttctagtaagttttttttatcctgagcacctctctcgcctattccaccgactcgaatcatttacaaacggagagcggtttggacgtcctctaaagatgatgttgtatcttctttgagtgcccccgagcagatgacctctttcatggctcgggaagataccaacatcgatattgctcgagaattggatctgctcgatgatcccgagccgcctctcgttcggagatcccttgctcctatggttgatgaagccgggacatccaattggcgagatgtgcccgagcctttaatgtcgacgataaagaatgaggactttctttatttcggctccaatgagacagaagacattatgcgtctcaacgagcagagggctttcgagaaagccgagaaaaagaagaggaagaagaataaaaaggcgataatgccggatcctcctggctccacattatgcaccgagcagtctcttttggatctcaaggcccgatttggccttggtgcagtgaccttacgtgtgccaagccctgatgagcgagccgacgatccccctgcgtgtttctacattttgtacgaggggttctattatggctgcttcttgtggctgtcagtcccgaggctggttttggaatacgtgacgtcgtaccagatcgccctctcccagatcacgatgcgatccttgagacatttgctcgggattctggttcggagttatgaatctgagaccgacatcacgcttgctcatatgagaaatgtccttgagatccggcaggttcttaaatccaaagtgtatcggtacttgacgggtaggaaggttattgacgggttcccgagcaaggatgagccgtataccgatcactttttctttctggcccttgaagatgatgttcacgacgatctccttgggacagttttgacgagatgggggacttgggtagttatagctaaaattctgtttgtgcccgacgcgatttcatgattttttctgactgttgttttccttggttgcagaacgcaccctcaaattcctcgagccgattccagacgattttctttcggcgttgcgtctacttcacggtgtttcttgtccttccagcttggagtcctcggatcatcgtacccaattcttcgtagacatgcagtcgaccaagcttactttgagggaggtttacgcgaagaagaaggaggacaaggagaggcgcctgatggaggagaagcatcttaccgaggcggggttgatctcaccgcaagcttctcccgacgcgactttgcccgctgatgcnnnnnnnnnnnnnnnnnnnnnnnnnnnngagttggcgtctactgaggctcaggtggccgatctgcccgctgatgcgcctgtatccgaggcggttgttgtgttgccgacgactgataaggcagcagggaagcgtgttcggacggatgactcctcgtccaagaagaagaagagcaaaaggaagaagctctcaaacgacgaggcggagaaggagctcccgatctttgaagatcggatcgcctttgcaaaccgtcacggggcctgtgcgggtcctctactccctccgccaaaaactctcttagagtcgcggaagtatgccgagacggcatctcacttctgcaggtacgtgtaaccctttt

SEQ ID NO: 165639 - DNA, 408 bp, Arabidopsis thaliana landsberg
atgtcctcttttcgttatactttcgtcctactgacattactctctgttttgttaactcgagcgtatggtctacctagggtaagaccaatcaaagatgtccaaccgagaaaaacgctaaaggttcacaaccagatccgagccgcggtcggggtggctccactgaagtggaacaaaaccgtagcggcctatgcacagaaatttgcaaatagacaagctaaagccggagtctgcgactacagctccatgagacattctgatggaccttacggcgagaatatcgccgcgggatgggtccatcctaagggccaaatgagcggtccgatagcgtcatagtattggttggcgcaggaatcaaactgcgactcatgcgaccccagatgcacagatggctcgccccctgcagcgtca

SEQ ID NO: 165640 - DNA, 1014 bp, Arabidopsis thaliana landsberg
tttgtttcagagattcaggaagcaagaaaaatttagaaaatggaagaacaaaacctctcctcgtacgcaatgatcttatcaagctcttctgttcttcccatggttcttaagacagccattgatcttggtctctttgacatattagctgaatctggtccttcctctgcttctcagatcttttctttgttgtctaatgagacaaagaaacatcatgattcaagcttggtcaatcggattctgagatttcttgcgagttactctatactcacatgctctgtttctactgaacacggtgagccatttgcaatctatggcttagctcctgttgccaagtacttcaccaagaaccaaaatggaggtggatcgttggctccgatggtgaatctgtttcaggacaaggtcgtgactgatatgtggtaacatcattaacaacatcctcactctttcgtcttaaaacgttatcatctttgacttgttatgcaatctgatgttgtatttacctataaaaaggtacaaccttaaagattctgttcttgaaggagggcttccattcaacaacactcacggttcaagcgcggttgaactggtaggcagtgattcaagattcagagaagtgttccaaagctccatgaaaggtttcaatgaagtattcatagaagaatttctaaagaactacaatggttttgatggtgtgaagtctttggttgatgttggtggtggagatggctctcttctcagtagaatcatctctaagcatactcacattatcaaagctattaactttgatttgcccactgttatcaacacttcattaccttctccaggtacagatacaagttcttgaatatattctgttgtatagtaaatgatctttaatgtcataactttttatggttgtaggaattgagcatgttgctggagatatgtttacaaacactcctaaaggagaagctcttttcatgaaggttaaaaattttaaaagctttatcaagtcttaacagaatcatatactta

SEQ ID NO: 165641 - DNA, 1055 bp, Arabidopsis thaliana landsberg
acgtttctgctgaaatttcaagcaagtgtgtttgtcagatggagcggtatgaagtcttggagcagatcgggaaagggtcctttggctctgctcttcttgttagacacaaacaagaacgcaagaagtattctattctctctcattcattcattctctgcttttgcttctctcttgttgcttctctggtgattccatttgctctattcatcttcaccacttacagatacgttttgaaaaagattcgtctcgcccgccagtctgatagggctcgacgatcagctcatcaggaggtttgttcatgtttttcttttttttttctttttggaccaaatgaaattagttggtggtcttggattaagatgatgatgatgagtttggacctccctccccttcatgtttcagatggagctcatttctactgtccgcaatccatttgttgtcgagtacaaagattcatgggttgaaaaggtctctccttctcatctccttttgctcattcttcttctgcctccttactctactcaatagtcaatactcatcatctctcttgtttcccagggttgctatgtgtgcattgttattggatattgccaaggcggggacatgtaaattggtttttgcccattttcaactacagacaagttgtgtttagtttgaagaaattggctcttattttcattttgaatattgcaggacagataccatcaaaagagcatgtggtgttcattttcctgaggaggtttgtctcactctcacccatcccttcacttcttacaatctatcactggatctaatatttgaacaaataactactaaatgatgcagaaattatgccaatggcttgtccaactattaatggccctcgattatcttcactccaaccatattcttcaccgcgatgtcaaggtaaacatgtaacctcactatcaattttcagaattttgttcctttttatgttccaagcatctaaattaacatctaaatgtcttttcaaagttctaacatattcttgacaaaagagcaagacatacggcttggtatgttttgtagattca

SEQ ID NO: 165642 - DNA, 1094 bp, Arabidopsis thaliana landsberg
catgactattatcacgaatccatccagtttcacacttgttttaatttccattacgctggtcctggctcttgctagacgttttttaagattcatgaaaccaaaaggtcagcttcctcccggaccacggggatggccaatcattgggaacatgctccaaatgatcatcaaccggccggctcacttgtggatccaccgcgtcatggaagaactgcagacggatatagcttgcttccgctttgcccgtttccatgtcatcaccgtgacctcaagcaagattgcccgtgaagtgcttagggaaaaggatgaggttctcgcagataggtcagagtcatacgcgagccatctcataagccatggctataagaacatttctttctcttcctacggagagaactggaagctggtaaagaaagtgatgaccaccaaacttatgtccccgacaacattgagcaaaaccctcggttatagaaacatagaagcggataatatcgtcacatatgtctacaatctatgccaactagggtcagtgaggaagcctattaacgtgagagatacgatattaacttattgccacgccgtgatgatgaggatgatgtttggtcagaggcattttgatgaagtggtagagaacggcggtctcgggccaaaagagaaagagcatatggacgcaatataccttgctcttgattgttttttcagctttaacttaacgaattacatcccttttcttagaggatggaacgtagataaagcagagacagaagtaagagaagcggttcatataatcaatagatgtaacgatcccatcatccaagagagaatacatttatggaggaagaaaggtggaaaagaaatggaagaagactggctcgatatcctcatcacgttaaaagatgatcaagggttgcctttgttcacatttgatgagattagggctcaatgcaaggttagtgatgttcacacataaaataaaattaggttttgtgaaaatttatagactcttcagttttatattactattgattccttctaaattcatctcgagatcctagcatggtttaaatttaacttttatgcatatatttcctatatgt

SEQ ID NO: 165643 - DNA, 2347 bp, Arabidopsis thaliana landsberg
ttttcaaaatcacctccactttttttccggtccatgtaaaccgggtcttgtatttcaggtgagtcaaacaaaaaatgcttcttttcttttaccagtaacaggcttataacaaaaagtaaacaaaattaaattttcaaaagaaaaagcatagcattaatgataataatattttcaaaaaatctgcaattatttaaagtaacaataatatttattaattatttattacatgtattttgggaatgtgaagttggacggagtgttgatgccaccggacggaccagaggaatggccagagaaagacaataaaaaccagtggttggttttttaccgcctcgacggtttcacgttttcaggcaaaggcaccgtcgaaggcaatggtcaaaaatggtgggatctaccttgcaagccccacagggtaactatttacttataacttttacactagagatttgctgattattaattaattcataagtcgtggtcgtgacaaatagaacatcacgacaaaccatactagctactatatgctccctaaatagttttacttgtaaaaaccaaaaaaatgttgtcaaataaaataactgggattgtgtgttttattatcttttcagggtccagacggatcatcatcgtccggaccatgtgcaagtccgactgtaagtctacttaaaccgaaccaaatcattaaattagaccggttttatttggtttagtactaacctttttttttgtttcttttgatttatagatgattaggtttttcatgagcaacaatatagaggttaaaggattaagaatccaaaacagtccacaatttcacatgaaattcgacggatgtcaaggagttttaataaacgaaatccaaatatcgtcaccaaaactaagtccaaacacagatggtatccatctcggaaacacaagatctgttggcatttacaattctgtcgttagcaacggtactgttttttgttttatttactaaacttttttgtatcatgaataatgcgtatattggtagtgtatgtgttataactttggttaagaatgttattaattaacacaggggacgattgcatatcgattggaactggctgctcagatgttgacattcaaggtgtcacttgtggccctagtcacgggatcaggtttctctcttttcatttatttcctcatcttctttcttcttttgttacaaaaaatctttaaaatgttattttttcccgaattgattccattacgatgtctgtgtgttttacatgcatcacggatgttagctgaatgatccatccacccgaaattgagctttggaaattggaactacttgacaaaaaaatatcgaacttggtgctggatttaagtaaagttactcatattcataaatattattttcgaacttgaataaatatttctatgcaaaattataagaacataccaaaaaaaatattctaatttggctggtatctcatataccaatattttaatatcgtaggtctatcttaaattacgagtttaatttaggtataaaactcaagattgaatgatttttaatattggaaaatatcaactattatttttttttgtggctaaataaaatatcattttcgaatttatacaaaatatataaataaaaaaagctaagaaaatttgttgtatttttctaaaaagctaattacgcgtatgatttaggtataaaattgaaaattcaagttcttttagctgaatttttattttattttaagaaaactatatttttctcgtacaattttgtttagtcgtatatcgctttcaaaacgcgatttggattctaaccgctaaaaacctgttaaaatgtctaaaaacgcagcattgggagcttaggcgtgcacaattcacaagcctgcgtttcaaacataacagtgagaaacaccgtattcgcgattccgataacggcctccgagtcaaaacatggcaaggcggtaccggatcagtatcaaatctcctcttcgaaaacatccaaatggagaacgttctcaattgcataatcgtcgatcaatactattgccaatccaaagattgccgtaacgaaacatcggcggttaaagtattcgacgtcgagtatcggaacattaaaggtacttacgacgttagaagtccaccgattcatttcgcttgtagcgataccgtcgcgtgtacgaatataacgatgtcggaggttgagttattgccggaagaaggtgagcttgttgatgatccgttttgttggaatgcttatgggaaacaagagacgttgacgattccgccgattgattgtttgcttgatggatctccggtggtggaggaagcatatgattcgaattatggttgttga

SEQ ID NO: 165644 - DNA, 707 bp, Arabidopsis thaliana landsberg
aagagactataatgaatctgtatgctgcttgtatctctcttttaatgctcctagtttccttagttttaccaacctctctatttactaactccttcaattaaggcttagcaagttcttatggtttatctttctagtgttgtgtttatgagatctatatgaatacttgaagggcctcttttagcttattgatttacacaaactgagtagttatttgcaattttttaagctgcattatcaatcttgttgttacaaattgacagattagattagatcatgtaaatgggtttgttgtcctcatctcagaatttatactttttgtggcactgacttgcaggaggtagctgataacagctgtgtgtacagaaacgaggttcatcactctgtaagtgagcgaactcagatcttaacagacgtggcttctgaccctactcttccccgaaccaaggctgtgcgttgctctaagtgtcagcatagggaggccgttttcttccaggtataactctcttaagctccattatttatttaactacttggttatgctgtatcttcactgtttgcttccccaaaacattatgctcatattctgtacaccgcttgaggatttaatgtagctatcattgaatgtgcaggctacggctagaggtgaagaatgaatgacactgttctttgtctgttgcaacccgaattgtggtcatcgctggagaaga

SEQ ID NO: 165645 - DNA, 2228 bp, Arabidopsis thaliana landsberg
tccccaagccaatggaactccgtttctcacgacaccaaggacgttccgtctccactccatcaaggatgaggaagcaaaggtttgttgcactctcttcttagatcttgactggaattagaactagtgattggaattagaagattgatgagtctttttctgcttgaatgtgcagttcaagctttgcaaggttagatctatccagtttggtcagaagggaattccatacctgaacacttatgatggtcgcaccatccgttaccctgacccgctcatcaagccaaatgacaccatcaagctggaccttgaggagaacaagattgttgagttcatcaagtttgacgtgggtaacgttgtgatggtgactggaggcagaaacagagggcgtgtgggtgtgattaagaaccgtgaaaagcataagggaagctttgagacaatccacattcaagactcaacagggcatgagtttgccacaaggttggggaatgtgtacacaatcggcaaaggaacaaagccatgggtgtctcttccaaagggcaaaggtattaagctgaccatcattgaggaagccaggaagagacttgcttcccagcaagctgcttgaaagtccaactgctttgaatcatcaagacccgtttcttttacagactcgctgcttgtctcagtttgtgagtctatttcttttcttatgttgttggatttcaaaacccatcaaaaaatagctgagtagtgctttttgtaatgtttgtatggtggattttttggtgatttaccgtttaaatcagatgacagttggtccactcctttgcttagtcttctcctttgctttgagctattagttgttgagagatgagtaatagatattattttcttggcattaagtaatctagaagaagacctcaaggactcctgaaagtgatgtgaattcagccgccttacacaaaaaagtcaaacattttggtgttttgaatacacacgcttcacacttggtcacaagcttatcttttataattgcttgcttttccttggaaacatcctttccttctatccaactcgtaatttaatataggaagaagaagaagaagaagagtacctcatacgtaaaccattgatgggctcttttgatcgccaaagagctgttccgaaattcaaaacagcaacaccgtcaccgctccctctctctccttcgccttacttcactatgcctcctggccttactcccgccgactttctcgactctcctcttctcttcacttcctccaacgtatctatctatctcctccaacgtttcaaactatgattgtttgtccttatcttggaatattgaaagaattcaaggttcttgatttgtccatttcccttcttcttctctcatatcatcttcttcttttgatcttgaaatcacagattttgccgtctcctacgacaggcacatttccagcgcaatctctgaactataacaataacggtttgctcattgacaaaaatgaaatcaaatatgaagacacaactcctcccttgttcctaccatctgtaggatccatttttgcatttttagcttctgctttattatctcttaagacattctagttttaaactatctcattttcagatggtaactcagcctttacctcaactggatttattcaaatccgaaatcatgtcgagtaacaaaacctctgatgacggctacaattggcgcaaatacgggcagaagcaagtcaaaggaagcgaaaacccgaggagttacttcaaatgcacgtatccaaattgtctcgcaaagaagaaagaggagacgtctcttgtgaagggtcagatgattgagattgtctataaaggaagccacaatcatcccaagccccaatccacaaagcgatcatcttccaccgctatagcagcacatcagaacagcagtaatggagacggtaaagacattggtgaagatgaaacagaggccaagagatggtaattagcagactcataattaagtaactgaaaccaaaaggatgaggagacaatgagatgtctgattggatttgttgtgaatggcttataaatgcaggaaaagagaagagaatgtgaaggagccaagagtggtggttcaaacaacaagtgatatagacattcttgacgatggctacagatggagaaagtatggtcagaaagtcgtcaagggtaatcccaaatccaggggtgggtttatttttctcttggcaaatcttgatgaaaaa

SEQ ID NO: 165646 - DNA, 471 bp, Arabidopsis thaliana landsberg; identical to SEQ ID NO: 79126

SEQ ID NO: 165647 - DNA, 1574 bp, Arabidopsis thaliana landsberg
aaagcatagttgatatcattaaatcttgaattcgtgatgttctggttcatagaattctagacccgtattaatctaatttacaacgatttcgatggatttgcaattgttaattttcttaatagtaagattaacattaatagtaacatattgttttgtatgataatgaatgtataaaacagagagaaggtgataataccatataataaaccgtgcataatagtagaaggagagggacaaagagtcaccaccatcacgtataatggtcatgcagccactgacgtcagctcaactttcacttcatatccatcccatattgtcgtccgaaacttatcaatcatggtacgtaacggaacggaccaacatatcttttgacttatatactatattttgttacgtaacaatataattttgataatgataacattttatatgtttttgtggcagaacacttataatcgtttgactagtctaactaaagcaaacggtatgagttgggatataaagccagcggttgcgatttcggtttatggcgataaatcagcgttttacaactgtgatttcttggggttgcaagatacagtgtgggataatcttggcagacatcacttcaaaaattgttacatcgaaggtgctatcgatttcatttttggaagtggccaatctgtttacgaggtatgtatacttaatatctctctctattacgtacacttcgattttcaatggcaaaacacgaaaactgtacttgatcactatttacacaaagactgttacattcacagtacaaacacacttttataaaatctttgtttcaaaacgccctagaaaggagctaggcacagccacaccctgtactaaaatcaactttttgttctagaaaaagtaacatttcagtcattcaaataatagaaacaaacttggttaaaaccttgtttgtagcatgttttttcctagaacaaaactaaacatgtgacttgactagctaggaggactgattttttgtaagtcaacaagttgattttgagacaccaccgattaagatctatgtgaaacatgcatgaatcgtataaaatgtttgacaggactgtcatataaacgcaacggcaggagcattggcatcaaaagtgtcgtttgggtacataacggctcaaggaagaagtagcgattcggacccaagtgggttcgtgttcctacgaggtagtgtttcagggagcaccagtgtctatcttggacgagcctatggtccattcagtcgagtgatattcatccaaaccgatctctcttccgtcgtgcaccctgagggttggtactcttggcactatggtggatacgagtaagcacatctctaactataatatatcatatataccattatcaaactatatgtgataatgatgtttttttttgtgtgttaggatgagtttcacgtatgcagaagttgagtgtaaaggagcacgatcggatatgtcacgaagagttccttggattgataaacttcattctttttacactaaacaacaattctctatctctaatttcattgaccaagatcaatggatctctaatattcctcgctt

SEQ ID NO: 165648 - DNA, 252 bp, Arabidopsis thaliana landsberg
  unsure (1)..(252): unsure at all n locations
cattttcatgatnnnnnnnnnnnnnnnnnatcatttcatgccttgatagagcagggccattccctcatcgttatcgaacacaatacagatgtgatccgctccgcggactggatcatcgatctcggccccgaagccggtgatgccggcggcaacctgatatattcaggtgtacccgcagggttgaaaaaggtgaaagagagttatacggggaaatatatttgaatggcagattgcagttacgtataaattaca

SEQ ID NO: 165649 - DNA, 727 bp, Arabidopsis thaliana landsberg
cgggtcctgacggtttccccgctggtggctctcttctagtcggagaagaaacccgactatagtcattttaaagtgagctcttccttcgcctgagagtatgattgattgtacgcatgatgatgtctataagtggaagtcggaccatcatgctccttcaaatatcttctcagcgaagaaaacttgggacgctcttcacccaagcactgcttctacttcgtggcatagctctgtctggtttaaagacaggatcgcaaaacatgcgtttatctgttgggtggctgcgtggaataggctccacactcgtgacaagctgcgaaactagggtctcatcattccagcggtttgtgtgctctgcaacggttgcgacgagtcacatgatcacctgttctttcaatgcccgttcagctcagacatttggaagttcttcactcagagggcaggaatgtctcctccaaataattttggtgctatcctcacttggttaaaaacggcttctacctccaagaatctctcactccttatcaagctcatcttccaagcctcgctttatctaatctggagagagcgcaattgtaggattccctctaacattttcaggaatcctcctcagatcatcaaggaaattcaagtccttcttcgtgcaaagctggaccctctctctcgtgttagtcactcaaatgcttctcgcgcttctattatgatcacttggtttgagttgtttctggtt

SEQ ID NO: 165650 - DNA, 905 bp, Arabidopsis thaliana landsberg
ggtctataacatttttttttttttaggttccatcttaatttagatgtgagatacctaagagtaatgttccaatttcctcattgtgattggtaatttgttgttcacttatgttgaagcctgctgaagtgattaatgaagtgaatgcatgggctgaagtccacaccaatggactcatcaaagagattctttcagacgattctatcaagactatccgtgaaagtatgttaatacttgctaatgcagtgtacttcaaaggagcttggagcaaaaaatttgatgcaaagttaacaaaaagttacgattttcatcttcttgacggcaccatggtgaaagtccccttcatgaccaattacaagaagcaatacctagaatattatgatggtttcaaagttttgcgtcttccttatgtagaagatcaacgtcaattcgccatgtacatttatcttcctaatgatagagatggattacctactcttcttgaggaaataagctccaaaccccgatttcttgataaccatattccgcgccaacgtatattaacggaagctttcaagattccaaagtttaagttctctttcgagtttaaagcttcagatgttttgaaggaaatggggctgactttaccatttacacatggtagtctaaccgagatggttgagtcgccttccattcccgagaatctatgcgtcgctgagaatttgttcgtctcaaatgtttttcacaaagcttgcattgaggtggatgaagagggaactgaagctgcagccgtttctgttgccagcatgacaaaggacatgttgttgatgggagatttcgtagctgaccatccatttctattcacagtgagagaagagaagagtggagtgattttgttcatgggtcaagttcttgatccttcaatacat

SEQ ID NO: 165651 - DNA, 533 bp, Arabidopsis thaliana landsberg; identical to SEQ ID NO: 12973

SEQ ID NO: 165652 - DNA, 1090 bp, Arabidopsis thaliana landsberg; identical to SEQ ID NO: 55830
  unsure (1)..(1090): unsure at all n locations

SEQ ID NO: 165653 - DNA, 3851 bp, Arabidopsis thaliana landsberg
atggtgggtttgaagaatctttgagtctttaccttgacgataatcacgcgttccctcctttcgtgggggcgttgatggattacttatcgaatagtggaacaagcgcagaggctttcgcttttctgaaggctgtgacttcaaagaagtttccatctaattcaatggttctgcgtgtattcgaagctatgttgaagtctgcaaggcatagtgaagctcaggatttactgtctatgtccccaagttatatccgtcgcaatgcagaagttctagaacttttcaataccatgaaacctgaaaaatgttctttagagaaacctttgcctgctcctgctcaaattgaagcttaattcattatatgttgttttcttttgtttctggacgtggtgattcaaaaaggacaatcacttactcgactctaatcgctataattttcttcatatagcggcgatgtgggacttttgaagattgttagtagcttaaatgggcctattttagaaaaaggcctatccctcgcttccttctcaagcccatttatattattgaattttttcccaactaaagattttattttcttatgcaagtctcactcacactcacgtaaatttcaaatataatcgtggtggaactaaaacaatgaccgtctcgtttctacggatcgagattcaaaattgttctgccggaattttgagatttctcccacggaacccagatttattcgcagctataaagccttcttctgctttagcatctttatattcgactgtttctgggcaaatcgaagaaaacccgaagagatacgagcaccacaatgttgctacatgtatcgccacattgcaacgctgtgcacagcgcaaagattacgtttccggccaacagatccacggtttcatggttagaaaagggtttctggatgattcgccacgcgccggcacgagcctcgttaacatgtacgctaagtgtggtctcatgcggcgtgcggtgttggtctttggtggatccgaacgcgatgtatttggttacaacgctttgatttctgggtttgtggtaaatgggtctcctttggatgcgatggagacgtacagagaaatgagagctaatgggattttacctgataagtatacatttcctagtttgctaaaaggaagcgatgctatggagctttctgatgttaagaaggttcatggattggcgtttaaacttgggtttgattccgattgttatgtggggagtggcttagttacttcttactcgaagttcatgttagtggaggatgctcagaaggtgttcgatgaattgcctgatagagatgacagtgtgctttggaatgctttagttaatgggtattcacagatttttagatttgaggatgctttattagtctttagtaaaatgcgtgaagaaggtgtaggtgtgagcaggcataccattacaagcgtcttatcagcatttactgtttcaggggatattgacaacggtaggtcaatccatggccttgcggtgaaaacgggatctggttctgatattgttgtgtcaaatgcattgattgatatgtatgggaagagtaaatggctagaagaggcaaacagtatattcgaagcaatggatgagagagacctgtttacatggaactctgttttatgtgttcatgactactgtggtgatcatgatggaacattagctcttttcgaaaggatgctttgttctggaatccgacctgatattgttacattgacaactgttctgcccacctgcggtcgtctagcttcactgaggcagggcagagagattcatgggtacatgatcgtcagtggacttctaaaccgcaaatctagtaatgaatttatacataattctttgatggatatgtacgtgaaatgcggggacttgagggacgctcggatggttttcgactcaatgagggttaaagactcagcttcttggaatattatgattaatggctatggtgtgcagagctgcggtgagttagctttggatatgttttcatgtatgtgcagagccggtgtcaaacccgatgaaatcacatttgttgggttgctacaagcgtgtagccactctggttttttgaacgaagggagaaattttttggcacagatggagacggtatataacattctcccaacaagtgatcactacgcttgtgtaatagacatgcttggccgtgcagacaagctagaggaagcatatgagttagcaatatcaaagcccatttgcgataatcctgtagtctggcggtcaatattgtcatcttgtcgtctccacgggaacaaagatctcgcactggcggccggaaagcggctacatgagctcgagccagagcattgtggcggttatgtattaatgtctaatgtttatgtggaagctgggaagtacgaggaagtgttggacgttagagacgcaatgagacaacagaatgtgaagaagacaccaggttgcagctggattgtgctcaagaacggtgttcacacgttctttaccggcaatcagactcacccggaatttaaatctatccacgattggttaagcctagtgatttctcatatgcacggtcatgagtatatgacggtcgacgactaatttaggtagacatcagatatgtttgtaaccattgagtaataatttactatttctgttgtgcgaaagacaatagtttacggactataaaaatctacgaaccaaccacatcttaggacttgtaaattctttggccattgctctgttttattagccaagaggtcaatttgtactaacatcaacttttttttgttgttatcctttcttctttttgacatagtgaaaaacaacgtcctgatcttgaaagaccacaattagtctcttcccataagatgtcacctggatgatccaggcttaccggagcagtttccgagagcacatttggatttcgttgagacgtttggtggggttaaaactgaaccatttttattacaatctcaaatgtgttcaaatcaggcctgatcgaataatacttacattacataacgactataacaagaggagtttctggcaatagccaacagcgccaatgtgctaaattctaagacatgccatacccaacagctccaatgttccggtgtgctgctactgcaaccgcggcggctccagcaggaccatattgggattgtgcatgcaacagcttagcatcaatacccaccttgtgttgtgattggacataagggtttgggttcagctcagctggtttggcagagttgcattgggtggggacaaactgcggttttggctgagatgcagcttctgtaccactgcgcttctcttgattcatggtgtttggaaggaagtaacagttaggagatacggtctgtggagggagtactgtgcttctgtaatatgatgtccttgcatcataggacgactctttgaggtttctgtcattttcataagttacagatgattccacaacacggcctggtttacctgttagacataaggaaggcgattgactttgagaacaatactgtgcatctatttatgattttaactgtgatgggagattgctacaaattttcatccccagagaaaaagtcaattacattcatagataataattcgggaattacctgatggtactcttggtggaggccctaaaggtttagttgaatatgctgaagttgatggaaccactccatttcttgaaggttcgatagaaacacgtcgactgtctgatgcgtttaaactgggttgagcgttggagtttactgcactggaatgaactgcagatctacgaagatgaagaggtaaatattaatcacaagtgtcatactgaatcaacagagatgtatggtatgaatggatga

SEQ ID NO: 165654 - DNA, 1184 bp, Arabidopsis thaliana landsberg; identical to SEQ ID NO: 875

SEQ ID NO: 165655 - DNA, 1659 bp, Arabidopsis thaliana landsberg
caaaggtctgatgcagtttggatatcttctacttccggatattcttgattacggacgcccttgacagaaaactcatcaaggccactaatgagctctggatcagtaaccacatccacctctgtccgctccaatttatcctcaggctcctcatctgaacaatctgagtctgtaaccaaatccatgtcttccagctcagagttatctccaagctcctcatttgaataagagaaaaccgcaacagatgcatctttttctggagaacaaccaactaatgttccaagttgatcagcctgtttcattacacaaccatcatttacatcagatgtattttcactgctggaacaattgtattgcttctgcttttcagaagttgatttctcagagaagggttcatgagatgattccagaggtttaatctccatcgtaacttcaacggaggaaggccttagtaatttcacttgttccatgttgtcagcatcagacgaaccagtaaagcattctatctgcatatcaggcccatcagcttcttcgtttctgatcaagacatctatctcatgaccaccctctttcacctcaaggactaattggttcgacaaatgttgctcttcagattctctaaaccagtatttgcattcggaaaatggaccaatgaaatcagtctcatagtttttctctgtgctttcgcttatttcaattctcttctccgtttctaatacagattgaccatcacacaccatgttatgatcacacaaaacagagttcgctaccgcatttacctcaagatgattgcatggtgattgaacacaatctagtgcttcagaaggctccaaaggtacagaaacaaattcagtattacctaactgattttctgaagaagatggattgtctgcatcaccctttattgaagccaaatccccaaagaaagatgattttgcagtgaaggaatccaaaacctcaggctgctttgctacatattcagtagaatgataaacaactaacgcatctttttcttcagaaaggcaaggactaatctcgtcttcgtttccagggtgcaggcattcatttagaggttgtccaggtacatccaatgtatcagaatctccactaaaatcattggtagtacacatatcttcttcccccggattgctgactttcaactgtgagtagttgtcaaacagtgtcaactcatcgcaaggaggaccctgcatcgtagaatccatagaatctttcattggtaaagcacagtattcttctactgagaggcaagacttccttttctcatctctattatcgtcagacatattactaccatcttgtacattatttttgcagcctgagggcggcagcgcactgttaccctggaattcttgacattgttcagtagaaatcttctcagatgtgcaataagttacatcatccagaactaaatttccagtatcaccttgaatgacacattggtgctgcggattttcatttatctgaaaactcaatggacaacgcaacactttggattctacttcctgtgtgctattcaagtccactttcaacttttcctgtgaaggtttgagacatatagattgagcagagaatcttgcagctgaatctgaactgccaaaaattccagttgctgccttgcagttgacaccgggaaacttttca

SEQ ID NO: 165656 - DNA, 1980 bp, Arabidopsis thaliana landsberg
gtgagttgcataagagttacggccatcatacttccagatgtcgtagcctcaggcgaagttggcagcgaaatttctagccagaaaaatcggtggaggcttaaccatcgaggaattagaagcagaaaaggccaaaaccgagtaggccaatgctgtggccaatcccgagcaggcggcccccgtggcaaaccttgaaggatccaaaagaggccgaggcaatcgcgaaacagatgacgatgagccagaagctgctcggggaaggatcttcacaattttaggagattttgctttctgtcaagacacgacggcatcaatcaaagcttatcagaggaaggcctgactcaaatcgtaactggacgcggccatttaacggatcagacgacgaagtaacttttcatgaaagcgataccaacggcttggaccgtccgcacaacgatcctttagtcattacacttaccattggtgatttcaacgtcgaatgagttctggtcgacccgggaagcacactggatatcatttttcttacaaccctgcaagaaatgaaggtcgacatgacgcaaattataccatctccgcgacctgtgctcagattttctggagaaaccactatgactctcaggaccatcaagttaccagtccgagccaaaggggtaacaaaaatcgtcgatttctctgttaccgaccaaccgaccgtttacaatgcaattatcggtacaccatggttaaatcaattccgagctgttgcttcgacatattatctctgcctgaaatttccacgagcaatggcgtgaaaacatctggggaaatcagaaaaatgctcgaatctgcttcatggcagcacacaagctcaagaaccccgtcacagagtcgacgacagacgcgaatcataatactagctaagcttggccgagctgaagagaaacgcaattttcgagcagttatagctgctaaagattgaggagtctcgggaatccacgagaccaatccccgatccggtaatctctatctgccttgatgacaaaaatcccgagcgatgtgtgcaaatcgatagctgcgacctaggagaagaattaacagctgaacttaccgctttcctcaaagagaacgtcaatacattcgcctggtccccagaagatctgcccggagtaagtgttgacatcgtatcacacgagctcaacatcgacccgacgttcaaaccagttaagcagaagaggagaaaattgggtcgggagcgagcagaagctgtgaaagacgaggttgaaaaattactaaggatcagctccatcaccgaggcaaaatatcccgactgactcgaaaatctggtcgtagtaaaaaaaaaaacggtaagtggagagtgtgcttcgacttcaccgacctgaacaaagcctgcccaaaggacagtttcccactaccgcatatcgatcgcctcgtggaataaacctctgggaacaaattgctatcattcatggacgctttcgctggatacaaccagatcgtgatgaaccccaaagaccaaagaccaatttctacacagagcaaagaattttttgttaccgagtgatgccattcggacttaagaacgccagggcaacttaccagcgtttcgtcaacaaaatcttcacactacagatcggaaaaacaatggaagtgtacatcgacgatatgctggtaaaatccatggaagaggaagaacacatagcccatttacgcgaatgtttccagcagcttaacctctacaacgttaagtttaatccaaccaaatgtcgcttcggagtaagattcctcggatatctagttacgcattgcggcatcgaggtaaacccaaaagcaaatcgaggcgttattgggaatggcatcgctcaaaacaaacgcgaagtacagcatctaactggaagagttgcagcccttaatcgattcatctcccgatctaccgacatgtgtttggctttttacgatgtgcttcggggaaataaaaagttcgag

SEQ ID NO: 165657 - DNA, 809 bp, Arabidopsis thaliana landsberg
ggaattgtaggagcatcccatgggtgggtagctactttgaaagacggagtagtgtgtctccaagatgatctaaacccaagcacatcgaattcagacccgaaacgcatctcattgcctagtctagtaactctacctcattgccaaacccaagttgtcaccaacatggccatgtcttgctcatctcctgaggaaaatgactgtgttgtggctataagtcttaggaccacaactcagcttatgtagacccgctcaaagtaaccctgagtggatcaacatcgagattcagaactcaagcttcttctcttcccctgtcatgttttccaagagagttgagatgttctgcataccttcttctggaggtcacgttactggatcgtgggatctccacaaacacaagttgcagagggtgcgatttcgaaaccttgctaagttgacaaagaaggaatggaagcttttggcttcgtgtagcaggagcgaacatttggtggagtcagcagaaaatgaaactttcttggttaagtggtacaggaagaaaagcaaagatttgaagagaatgatgacaacaaaggctgtaatggtgttcaagcttgacaaagaaggaaatgcttaaaaaaaaaaaaaaggaaaaaaaaaaaggaggaaacgcggtttacactcaagatattggagatctctgcatttttctttcaaagtctgaacctttttgtgtccttgctagctcttttcccggactgtgccctaacaatgtcatactctttgactgtgacgaaggcggctttttcgatctggatgattccaccatcattact

SEQ ID NO: 165658 - DNA, 1494 bp, Arabidopsis thaliana landsberg
gcttctatgagtacagtaggtggatttcgcaagggagaaatcgatgagaagccatttttcatattcactctgttttctgaaacagacagtccaacctcttcttcttctgatgaagcaaccattgattttggaggcgacgacctctcagttaaacctcatttcctttgtccttctttacgtctcaagaaggcaaaaaaagccgaggattattctgttgaagaaaactttatcccgttcaatacttccccacacttccccagtataaaaagcgctaatcaccaagtccggggtttgcttgattctgacagccatgataagatttgtaagctccctgttgtcccactcttttggtgtaacaataaagaaccttactctgtacaatttttttgcggtgcatgccgagtttcaaagcttggcacagactattatatatgtctcacatgtgatgaaattttccacaaagaatgtgtggagtctccacttgagatcaaacatccttcgtatcctcttcaatctctccaattttacactcctcctagagacactttgaaatttttggtgggttgcatatgttgtaacatatctctcgaaaccatgctttatcattttccacccaaactgagtttgcatccgatttgtgcgatgaaaccaatacccattgtcatagaccaccaaaaaaggcatccccaccctctcactttttttcccaaacaaacttatctaccttgcgatgtttgtggcctcattaaagaacatattcccacttatgtctgtgttagatgtgtctacgcagtccatcaagattgtatctatttcccaaacgtcattaaaatatctcgccaccaccaccgtgtctcttttatctcctctattattccaaccagaaaatggtcttgcggagtttgtcgtcaaaagggcggtgaccattgcggcgtgtactcttgcaataattgtgacggttattttgttcattcaaaatgtgcaatacatccaaaagtgtgggatggaaaagaactcgaaggagtaccagaagaagatgatttgatagacgatggtgagccgttcgagaggatatctgatggaattatacaccatccttttcatagtcaccacttgcgacatgagatgagcataacttatgatgaaagtaagtattgtcaagggtgtgctcttccaatctatgaaggtcagttttattcatgcatggaatgtgacttcatcctccatgacagttgtgcaaatgctccacggatgaaacggtatcctttatatccacatccaataacacttaaatttgccaccgtgagaaataatagtttcacaagtcaatttcgttgtgctgtatgtgatcgtcatggtaatggtttcttctatgagcatcacggcgaagataaaatgttccggctagatttacggtgtgccttgattacaaaaccgttggtatatcaaggccacatgcatcccttattcctactgtgggacgacacagagagt

SEQ ID NO: 165659 - DNA, 1912 bp, Arabidopsis thaliana landsberg
gaagaagatcatctgaacagtgctttaaccaaaagtagtgagatgggtttctgcatttggaaacattgggataccagaagctgttagactcccataaagcaatggaagaatcagaaccctttgaggatttgaatggaccagcaacggaggtaatggtaatgagcgaagaagggtcaacacgagttcaacctgcacactcgagcaaatactcgatcttgtctgccaacgaatttggggagccgatcatcccaacttcagatgactggtctgaactgaaggcgccaaaggttgatctaaaaccacttcctaaaggtctaaggtacgcattccttggtccaaactctacttaccatgtgatcattaatcctgagttaaatgatgatgaagtgaacctgctattatttgagtttagaaagtataggagagcaattggttattcattatccgacattaagggaatttcacctagtttatgcaacgataggatccaccttgaaaacgaatcctattctagcattgaaccacagaggaggttaaatcccaatttgaaagaagtagtgaaaaaagaaattttgaaacttcttgatgctggtgtcatctaccctatctctgatagtacttgggtttctccagtgcattgcgtccctaaaaagggtggaatgactgttatcaaaaatgaaaaggatgaactgatccctactagaactataacttatcatagaatgtgcattgattataggaagttaaatgctacatctaggaaagatcattttcctttaccattcattgaccaaatgcttgaacgcttagctaatcatccatactattgttttcttgatggatatagtggtttctttcaaataccaattcaccctaatgatcaagagaaaaccactttcacatgtccttatagaacctttgcttataagagaatgccctttggtttatgcaatgctcctgcaacatttcagaggtgtatgacctctatatttttagatttaatcgaggagatggtggaggttttcatggatgatttttcggtctatggcccctctttctcctcatgtttgttgaatcttggcagggtattgaccaggtgcgaagagacgaatcttgttctcaattgggaaaagtgtcatttcatggtgaaggaaggcatagtgttgggtcacaagatatcagagaagggtatagaggttgacaaaggaaaagttgaagtgatgatgcagttgcagccaccaaaaacggtgaaggacatcagaagtttccttggtcatgctgggttctacagaatatttattaaagacttctccaagatagccaggccgttaaccagactattgtgcaaggaaaccgaatttaaattcgatgaggactgcctcaaatcctttcaaaccatcaaggatgctttggtatctgctccggttgttcgagcgcctaattgggactatccatttgagatcatgtgtgatgcatcagattacgccgtaggagctgttttaggccagaaaatagacaagaagcttcatgtcatatattacgccagccgaacgttggatgaagctcaaggaagatatgcaacaactgagaaggagctttagctgttgtattcgcatttgaatagtttagaagctagttggttggatttaaagtcactgtctatacagaccatgctgctttgaggcatctgtgtgccaagaaggatactaaaccaagactgttgagatggatacttctgttgcaagagtttgacatggaaatagtagacaagaagggcactgaaaatggttcggctgaccatctgtcaaggatgagaattgaagaacccattccgataccggactcaatgccagaagaacaactcatggttgtagaattcttcggtgagagttacagcgggaaagagttccac

SEQ ID NO: 165660 - DNA, 693 bp, Arabidopsis thaliana landsberg
gtaattaaaatcgctaagcagaaactatttttttcttatttttttgttatttgcagagattctgttaaatttcaagaaaacatgaaccacaacgagtttgagtttaccggcggtgaagttccgttaataaccggagaatattttattgtcgaccctttagctgcgaaagccaacttcaacaaagcagaaacgatggtctcagttacaatttcactgttcttcctctgtctacaaaacgccagcgagattttcaattctccgactcaaacgttccggttaaacggaggtgcgtagcgtttgactcatcatcaccgtctttgataaacgatgaactcgtatctcagattcaaaatcaacaacagtcagagatcgataggttcgtagctcagcaaacggagaagctaagaatagagattgaagcaaggcaacaaacgcaaacgcggatgttagcttctgcggttcaaaacgttctagccaacgaactaaaagagaaggacgacgacatcgtacggattcgaaacctaaattgggttttacaagagaaggtgaagagtctttacgtcgaatatcagatttggcgtggtatcgatcaaactaacaaagcaaaccctaatactcttcgaacaaacctagaccaagttcttgctcaactcgaaacgtttccaaccgcttcagcgtctcccatcgactctg

SEQ ID NO: 165661 - DNA, 1478 bp, Arabidopsis thaliana landsberg
atggggttaaagatgtcagaatcagccaagccttactttgcaatggtttgtcttcaattcggatacgccggcatgaacctcgtgacgaaggttgtgctagaccgcggcatgagccattacgtccttgtggcttaccgtaatgcctttgccacggctgctatcgcaccttttgctctactctccgagaggtatcatattttatagaaatatatattaaaaaagttcgattgattctcatcaaatacaaacatttgataacttgataacggtgttgtaggaaagtgaggccgaagatgacatttccaatattcatgcagatttttgttctagctcttctcgggttagtcttcttaaaatttgaattatttttcaaaaacatgcacttgatgagtatatgaatactttatgaattatttaccacaggcctttgatcgatcaaaacttatattacgccggtctcaaacttacttcaccaacttttgccggcgcagtcacaaatatcgttccagctttgacctttatcatttccataatttgcaggtacctaaatttaacgcatagctttattattagttatccattgcggtagccaaatacaataggttaattcatacaatatggtacgttgatgatgatgcgtggtttatattttggtgaaaaaaataaaggatggagaaggtggagatgagaaaagtaagattccaagcaaaagtggtggggacattagtgatagtggttggagccatgttgatgattttattcaaaattcctctaatcacctttctccgatctcacctcaccggccatgctttgtcgccggcaggtgaggactacctcaaagccaccgtcttcctcctcatcgcctcattttcttgggcttcctttttcgttcttcaggtacatcatttaaattttacatcgactgatctctttaactcgtgaagccccttctaaaagtatctttatctacggattaatatatacatatctaatagtagtgatccgatagtactatatctaaataagggagtcttctaacgaattaggacaattatgtttcatcatttctttaggcggctacgttgaagagatactcatctcacctttcattatcgacgatggtgtgtttcatgggcacgttacagtccacagccttaacgtttgtgatggagccaaacctttctgcatggaacattggctttgacatgaaccttcttgcctctgcttatgcggtttgtccttctcatgattatataaattatgttatatacggaaccatataatacttataatctgatgtgtgaatatatatatacttttatagggcataatgtcgtcgagcatagcgttctacgttcaaggaatgatgacgaagcaaaagagtgttatctttgttactgcttttaatcctcttgttgtcataatcggatccatcattggcttcctcatcctcaaccaaactttaaaccttggcggaa

SEQ ID NO: 165662 - DNA, 887 bp, Arabidopsis thaliana landsberg
  unsure (1)..(887): unsure at all n locations
acgaaggcaagaagttgttagggaggaggggcattgttgttgcatggcgagggaccattcagctgtacgagtgggctaacgatttcgatttcccacttgaatcagctgttatggttttccctggagctaacccgaatgacgagcctcgcgtagcaaatggttggctatccctttatacatccactgatccacgatcacgttttgacaagaccagtgcacaagaacaggtctatacaaaaaaacctgttcccttacaaacttcacatctgaatcgacatccactgatccacgatcacgtttggtttgcaggttcaagaagagctcaaaaggttactagaattgtacaaaaacgaagacgttaccatcaccttaacaggccatagcttgggcgcagttatgtcgattctatccgccgcagactttctccataacgaatggcctaagatcacaccaagtctacaacacagcctatgtgtcacagtatttgctttcgggagtccccaaatcggtgaccgaagcttcaaaagactcgtagagtctctcgaacacctccacatcctaagagtaacaaacgtcccggacctcattccccgttaccccgtattcaggttcacagatataggcgaggagcttcaaatcaacacattaaaatcagagtacctaaaacgatctctaaacctgggacatttccataacctggaggcttacttacacggcgtggcagggacacaacacaaccaaggagaattcaaactagagattaaccgagatatagcactggtaaacaaaggtttagatgctcttgaagataagtacttagtaccaggacattggtgggttcttgagaacaaaaggatggttcanagtgatgatgggacatggaaact

SEQ ID NO: 165663 - DNA, 576 bp, Arabidopsis thaliana landsberg; identical to SEQ ID NO: 38149

SEQ ID NO: 165664 - DNA, 1084 bp, Arabidopsis thaliana landsberg
  unsure (1)..(1084): unsure at all n locations
actccgattcttttatggcttccaaccaaagatttagttaagacaagtttttatttaccagatggagaaatctttggcgtgaaggtccaggtctagacttaaactccgttgacttccctttcccttacagagatatcatcaagaactacactgaaagatttcttgagtttaacagtgcgtcaggccttcaaaagttcaagatgacaaatannnnnnnnnnnnnnnnnnnnnnnnnnnncagattaaaggagtggatcgccgcagcggttgatcgcgggattcaacatttagatttcgagaccaaaaatccttctctctttctcaaagattccatgcctatgaacatttataagagtaagacattggtgtctttaaagcttgtatgcgtagagcttgagaatccaaagtttgttgtttctctaccttgtctcaagatcatgcatctagaaaataattggtacggttatgatgctcctttggttgtggagaaactcatcgcagggtgtcttgttcttgaagatcttaccgtggtaaggattcatgatatggtaataccagatctgcctcttctacatgtgaagtctctgacactgaagatcttacgtttagtgtttgatttggagatgatgactactatacctatttcggtggagattgatgctccaaaactagagtatatgagttttataaataggcactctgatacaatcatggtaaagaatctgagttcattgttcaagttaaatcttgatactgaatttggctacagttccttggaaccgagagatattatccgtgacgttctcactggtatatcgagtgtaagacagatgatcatctctcaacgtactctagaggtaaataatgtttctctgtgattaacaatttagtttttctagctatggaatgattcctcacttaataacattctgtttctcttttgcaggtcatatgtcgttattcaaaactcgggcctattcccaaattccatcacctatctcatttgaaggctgcattctccagcacatcattacaactattgcccgcctttcttgagagctgcccaaacctgaaaaaactcatc

SEQ ID NO: 165665 - DNA, 421 bp, Arabidopsis thaliana landsberg
agatatatcccatgatacataaatgtaagagtgggcaccaatatgaattagactcattggcgatctaaggtctaaatttttatttctttttttgtcgccaagttctaaagtttttaatttctaaggttctaaaataagttacaaaataatgtaatttaaaacgacgaaccaattatattgcagataggtgagactcatcccttatcgttcctggtgcgtttttatccgactttttatcaaaagactggatagtccgtatttctcacatatatcaagaagctaacagttttattgacaggttagctaaccatgcgttttctttgccgttggacctccatatttttgatgaggttccactttctgttgttacgctttttagcgaggatatagcgggtctgcgcgcctaaaacaaattcgattg

SEQ ID NO: 165666 - DNA, 2019 bp, Arabidopsis thaliana landsberg
  unsure (1)..(2019): unsure at all n locations
atttgggttgtggtgtctaaagaggtgaatgtagagaatattctagatgaaatcgctcagaaagttcatattagtggagagaagtgggacacaaaatataaataccaaaagggcgtttatttatacaatttcttaaggaaaaagagatttgtattgtttttagatgacatatgggagaaggttaatttagttgagatcggagtcccctttccaccaataaaaaacaaatgtaaagtggtattcaccactcggtccttagatgtatgcacaagcatgggggttgaaaaaccaatggaagtccaatgcctggcggacaacgacgcatatgatttgttccaaaaaaaggttggacaaataacactaggaagcgacccagagatccgtgaactttctagagtagttgctaaaaaatgttgtggtttaccattggcgctcaatgtggtaagtgagaccatgtcatgcaagaggacggtacaagaatggcgtcatgcgatatatgttttaaattcatatgctgcaaagttttctggcatggacgataagatccttccgcttttaaagtatagctatgatagtctcaaaggggaggatgtcaaaatgtgtttgctatattgcgctttgtttccagaagatgctaaaataaggaaggagaatctgatagagtactggatatgcgaggaaattatagatggaagtgaaggtattgataaggctgagaaccaaggttatgagataattggtagtcttgttcgtgcatcattgttgatggaagagaatcaagaaacggtgaagatgcannnnnnnnnnnnnnnnnnggcattgtggatagcatctgattttggaaagcaaaaagaaaactttatagtgcaagccggcttacagtcgaggaacatacctgagattgagaagtggaaagttgcgagaagggtatcattgatgtttaactacattgaaactatacgtgatgctcctgaatctccccaacttataactttgctcctccgaaagaactacttggcgcatatctcaagcagcttctttcggttgatgccaatgctagttgttcttgatctatcaatgaacaaggatctcagacatttgccagacgaaatatcagaatgtgtctcattgcagtatctgagcttatcacgtacaaggataaggatttggcctgctggtttagtagagttgaggaaacttttatacctgaatttggaatacacaaggatggtagagagtctctgtggcatatcaggtttaacaagtttgaaagtgttgagattatttgtttccggtttccccgaagatccctgtgttttgaacgagttgcagcttttggaaaacttgcaaactttaaccataactcttggtcttgcctctattttggaacaattccttagcaaccagaggttggcaagctgtacacgagctctgcgcatcgagaatcttaatccgcaatcatctgaaatctcatttgttgctactatggacagtcttcaagagcttcattttgcagactctgacatttcggagatcaaggtaaagaggaaggagacggttttacctctgcaaatcccaaccactaccacattcttcccaaacctctcgcaagtgtctttagaattctgcaaaggattgagggatttgacgtggctgatctttgctccaaatcttacggttctacgagtaatttcagcaagtcacctggaagaagtaataaacaaagagaaagctgagcagcaaaaccttattcccttccaagaactaaaagagttgcggctagaaaatgttaagatgctaaaacgcatccaccggggtcccctgccatttccctgtttacagaaaatcttggttaatggatgctcacagctgagaaaacttccactcaatttcacgagtgtcccaagaggtgatcttgtcatagaggcacataaaaaatggatagaaatccttgaatgggaagatgaagccaccaaagcccgtttcttgccttcacttaaggttttttctctcgcattt

SEQ ID NO: 165667 - DNA, 770 bp, Arabidopsis thaliana landsberg
tgatcctgtttgtcgtgaaatcattgaagaacccaagaagtgctgtaagtaaaaccgcatgtatgacatctgaagacatcttcagctatataatgaccatatattcgatcaattggatcccctggtaaatcatcttttgcagctactcttggaattctcctcaaatagcagatatttgtgtttactataatagaaattccgaaatcctttcttacagcttactcaactcctccttaaatcttcccaagacaagcgatttgtttgtgaagtagcggaaagagcattagtagcaatgactacacatgtttctcctgccttgctgttgccaaagcttcgaccttgtctcaagaataagagtccccggatccgcgcaaaagcatctgcgtgcttctccagatgtgttccccgactggtaaatcaaacttcactcgttatcataaaaccagtcttgttcttttgttttggatttgtcatgtcatcaacatgacaaccatttggatccagtgtatgttcccaccaacatcacctttctttggctatggttatcatcagggcattgaaggcatgagagaatatggaattgagaccaactcccagaatctcaggaggctgcacggacagtcttcctggaacttgagacagtgtataagaaaactactcctgtcgaacccgaggaggagaatccagaggcagccacttggccaatcttctgccaatcaaacctctcacctcttagtgcacaggctgtgcttcgtgtcaccaatgtcact

SEQ ID NO: 165668 - DNA, 564 bp, Arabidopsis thaliana landsberg
gcgtcgttcattagatcgctaccgtctgccggaaacttcgccaacctattgccgaccgggaccgccctcatattcgaaaccctactaccgtctttctccaatggcggcgagtgcaacaacaaacccgtcaataaactcctcaccattactctcatctccttttgcgccgcggcttgcttcttctcctccttcaccgactcatatgtaggccaagatggccgcatttactacggaattgccacctctaacggtctccacatcctcaacgactatccagacgaaggttatgatccagagtccggcttaacggctgataagagacagagatataagctgagttttgtagatttcgtgcatgctttcgtgtcggttatcgtgttcttagcgttagccgtagagagctcggattttcggaggtgtttgctcccggaggacgatgaaaacagttggggtggtcattttgtacttttgattaagtactttgctgttatggtgttgacaatggcaagcttcttctttgctatctttccctcaaaacggagaggcatcggatatacagacatt

SEQ ID NO: 165669 - DNA, 789 bp, Arabidopsis thaliana landsberg
gcggctcggacgatgaagctgtggaaacgagctgccgccgcaatcaaagaccggaaaagcttactagccgttggtttctcacggcgaaacagctcttaccggaacgcagatctcgaagcagctatcatcaaagccacctcccacgacgattcctccgtcgactattccaacgctcaccgtgtctacaaatggatccgttcttctcctcttaatctcaagactctcgtctacgcaatctcttctcgcgttaaccacacgcgtagctggatcgttgctcttaaatccttaatgcttcttcatggtgttctctgttgtaaagtaccttccgttgtcggagagtttcgtcgtcttcctttcgatctttcagatttctccgatggtcattcttgtcttagcaagacttggggattcaacgtctttgttcgaacttacttcgcttttcttcatcattactcttccttcttgtccgatcagattcatcgtctccgtggtaacaacagaagatcgttggagaagacatctgattctgttatccaagagcttgaacggattcagaaactccagtctctcctagatatgattcttcagattcgacctgttgctgacaacatgaagaagactttgatcttagaagctatggattgtctcgtcatcgaaagtatcaacatctacggtagaatttgcggcgcggttatgaaagtccttccgtaggctgaaaaatcagaggctgcaacggttttgaaaatcgtcaacaagaccacatctcagggagaagatctcatcgtcgat

SEQ ID NO: 165670 - DNA, 1350 bp, Arabidopsis thaliana landsberg; identical to SEQ ID NO: 16920

SEQ ID NO: 165671 - DNA, 833 bp, Arabidopsis thaliana landsberg
  unsure (1)..(833): unsure at all n locations
nnnnnnnnnnnnnnnnnnnnnnnnnnnnnattgttattgaatatactttcttcccttccaagtaaagatgtggtagtcacaagtgtcttgtcaaaacgatggcgatctctttggaaggaggggaaaacattaaggtatgatggtgaatccataggtagaacttactgaaagtttgtgcaatttattagcaaaagaccaagcgttgagaccatgcagctcaagatgactcctccttgtccaagtagagacatcaaacctttgattaacatcgcagttgctcgatctttgagagagctaaaaatcgagatggtttttaattccttcgatttgcctaatagcttttacatgttttcacaacttgatactgataactttagagaaactaagtttgatggatcctccacctgatgttcatttgccttgcctcaaacgtctccaccttttatcggtcaagttctcgggggacgaatctgtgaaattttttttaagcatatgccccattcttgaagagttggtagtgaaacgaagctcccttaccaatgttatgatatttactatcgatgtgcctacgctgaggatattatctatcgataatacttctgggaaatctcggcctaaaggtgttcatggatttgtgataaataccccttctttgaggtgctttagcattagggacaacttcagcaactattacagtttgaaaacatgcccgaactagtcaaagcgagtgtcaatgttgtttttgacaacccttacaagtttctagcacctcttggctcaacccaatatctttctctgtgctctgtcacttcacatgtttttaataattgttt

SEQ ID NO: 165672 - DNA, 537 bp, Arabidopsis thaliana landsberg
tatgttcaagacccaccaaatattgatcaaccaaaaaacatttgtgttggtaatgccccaaggaatcatcaccaaagacaagggatagtgcccccaccagttcagaacaacaactttgtgatgaagagtggtctcatctcaatgatccaaggaaacaagtttcatggcttacctatggaagaccccctggaccatcttgacagctttgataggctctgtggccttatcaagatcaatggtgtcactgaagatatgtttaagcttagactatttcccttctctttggtagacaaggcacaccactgggagaagactctgcccccagactccgtcaactcatgggacgattgtaagaaagcttttcttgccaagttcttctctaaaagctacactactcagtgcccccatcacggtttcaagaaagcttcattaaacagaggagctttaccaaagatcagaatgctactcgacaccgcctctaatggaaacttcctggccaaggaagtagcagaaggatgagagctggtcgagaatcta

SEQ ID NO: 165673 - DNA, 1075 bp, Arabidopsis thaliana landsberg
acaagtcaagatagtataagtttgttaccggatgatttgctgtgtcggatactctctaatcttcctacaaaggttgctgttaggactagtgttttgtccaagagatggaaaagattcagtctttcggttcctctgttggaatttaacgtttcagagttccatggttactatgaatttgcgcgtgttgtccatggttttctagatacctctagagagacatgcatacacaaactcaaacttgcttttgaaaaaaaacagcatgataggtcttacttgacgcagtggatccacaatgcggttaagcgtaaagtacaacatttggatataggtcgttggagttatttaggtcaggagctgataccccatagcctttacacctgtgagactctggtatccttgcgactccataatgtgtcattgcctgattttgatcatgtttctctacctcgtctcaaaacaatgcatttaatagacaacatttaccctaatgatgctcttctggagaatctaatctcatcttgcccagttcttgaagatttaaatgtctctagagatgtagagaacattgttaaggttttacgagtgcgttctctgtcgttaaagagtctcatacttgctctcgatggtgatcggtatggggatattgaagatgatagttggcaggttgtgattgatgctcctagactcagctatttgagtcttagagatgaccagtctaaaagtttcgtattaagtagtgtgacttcacctgccaaggtagatattgatgtaactttcgatgtggtgagaagtgtattgaaaaatttcctgttaacgagaagtgtagtgagaaacttcttcaccaggctctcgagcgtaagggacatgactatgagtggaacaactttgaaggtatatatatatatatgtcaatgggagtaactgagtattttaaagtctctttaaagttgtattttctttgtgtttgcaggtcctctctcgctacatgagacacgaaccactgcctcagtttcctaacatgatccaattatatgcggtcttttgtaactctgatttggaaaagttgccaaacttt

SEQ ID NO: 165674 - DNA, 308 bp, Arabidopsis thaliana landsberg
gttgtatctataatttgcttataaatatattttaaattgtatttattttctgtattacatataaatttgatgggaaaaatgtcaaatccttttcttggcggaaaatgttgaatgtcgttttggcgggaaaatgttgaattgcgtttttgatgggaaaatgttgaatatcgtttttggcgcgaaaatgttgaattgcgttttggcgggaaaattttgaatgtcgtttttggcggaaaaatgttgaatgtcttttttggcgggaaaatgttgattgtcttttttggcgagaaaatgttgaatgtcttttt

SEQ ID NO: 165675 - DNA, 772 bp, Arabidopsis thaliana landsberg
tctagtaagttttttcagacagacaagtagaaactttaattaccttgaaacatgttaagggaaactgattttgttctttcagggtggaggtggacttgctgagttcgctgttgcaaccgagaagctgactgtcaaaagacctcaagaagtgggagcagctgaagcagcagctttacctgtggcgggtctaaccgctctccaagctcttactaatcctgcggggttgaagctggatggtacaggcaagaaggcgaacatcctggtcacagcagcatctggtggggttggtcactatgcagtccagctggcaaaacttgcaaatgctcacgtaaccgctacatgtggtgcccggaacatagagtttgtcaaatcgttgggagcggatgaggttctcgactacaagactcccgagggagccgccctcaagagtccgtcgggtaaaaaatatgacgctgtggtccattgtgcaaacgggattccattttcggtattcgaaccaaatttgtcggaaaacgggaaggtgatagacatcacaccggggcctaatgcaatgtggacttatgcggttaagaaaataaccatgtcaaagaagcagttagtgccactcttgttgatcccaaaagctgagaatttggagtttatggtgaatctagtgaaagaagggaaagtgaagacagtgattgactcaaagcatcctttgagcaaagcggaggatgcttgggccaaaagtatcgatggccatgctactgggaagatcattgtcgagccataa

SEQ ID NO: 165676 - DNA, 503 bp, Arabidopsis thaliana landsberg; identical to SEQ ID NO: 39939

SEQ ID NO: 165677 - DNA, 623 bp, Arabidopsis thaliana landsberg
gttcctgcccttgaacacaatggaaaaatcactggggagagtcttgatataatcaaatatgtcgatagcaattttgatggaccttcactttaccctgaggtaagaccttgttgggatgttatagacttgttcttgtcatgtaagtaacaatatttcgatgagatgctgtttttttgaaatttttggtctaggattctgcaaagagagagtttggtgaagaattgttgaaatatgtcgatgaaacatttgtaaaaactgtgtttggctctttcaaaggtgacccggttaaagaaacaggtagggttgatttttgtgtgtcttgtcaattgttttgggcatctgaaggcttaaacatgtgtggttttgacgcagcatcaaccttcggttacgtggaaaatgtcctctgaaaaagtttgatgatggtcctttctcccttggcgagcttagtttggtatattagtcttatcacaatgttaagtgcgaatgaaccttttttgaatgtgtcactatggttacaaaattactcgattttgtttgctaggttgatattgcatatatcccatttatcgaacgctttcaagtcttcctcgacgaagtttttaaatataaatataatgacggcc

SEQ ID NO: 165678 - DNA, 599 bp, Arabidopsis thaliana landsberg; identical to SEQ ID NO: 72797

SEQ ID NO: 165679 - DNA, 709 bp, Arabidopsis thaliana landsberg; identical to SEQ ID NO: 39900

SEQ ID NO: 165680 - DNA, 557 bp, Arabidopsis thaliana landsberg
  unsure (1)..(557): unsure at all n locations
tgatcatccagcagatgtacaacggcagctggccaccgcatcacagagtaccctcggagagcgaactggtcagcgagctgggcttcagccgtatgaccatcaaccgcgcccnnnnnnnnnnnnnnnnnnnnngccttctggtgcgcatgcaaggggtcgggaccttcgtggccgagcccaaggggcgttcggcgctgttcgaggtcaacaacatcgccgatgaaattgccgctcgtggccaccagcatagctgccaggtgatcaccctcaccgaggaaacggccggttccgagcgggccctggccctggacatgcgcgaaggccagcgggtgttccactcgctgatcgtgcatttcgagaacggcgtgccggtgcagatcgaggaccgctacgtcaatgctgcgattgcccccgactacctcaagcaggacttcacccggcagacgccttacgcctacctgtcgcaggtggnccccccacgaggccaacacgtggtcgaggcaataaaaccgagcaaaaagaatccgcctgttgcagatcgacggggcgggccctcc

SEQ ID NO: 165681 - DNA, 3346 bp, Arabidopsis thaliana landsberg; identical to SEQ ID NO: 38202

SEQ ID NO: 165682 - DNA, 1859 bp, Arabidopsis thaliana landsberg
ttttgattgtgtttctttcttgcttcaatttgtagtaatagaaaagtttcaatatttattgtttttcctccaggatgtggaaattgttgctgcaatcggaggcagatctcgtgatgagttagagattgcgcttactactttagacacacagactgttagttctgttgattgtgctgcgtctgcagagcatcttggattgggaaagggagatattgaagaagatgaaatggtgtcaaaggccttggcattatctgaaatggaagcatcgttaaagggaagttttgatactcagagagttgtgtctgggtcgttagatgtaaatcagatctctgaggatgacacattggtaacttctgtggacattgaagctggttgtgctaccacccttggcagtaatatctgtcagctgtccaaatttgatgatcagttttcttctacggaatcagaagattgtgatgttgggaataagaccaatgtaggtaaagaggtatcttcaacggaattgggagatgagacttttggtaatgttgagactgagaatagcagcaaaatgactgatgtgctgatctctgtggagaagactaatctggagtcgaccaaaaatgatatcatttctgaagctataactttggttaatgcaggtagactcatgggtatctctgcatgaacttgcatctggagatatgttaaattttcttactaaaatcacctcattgcatctccagatcttagtgaaaaatcccaggatgatgatgtctcccagtcagtttatgaagtccagtctcttcttggacaaagctctccggaagggaagggtacaaaagggctcacgcaagaagagggtaaattcttacacatccattcttacatatctacgcattatatctgttgtggataaagataactccattcttttttttcttctgagtttcaggtgaattgatcaaaggattctttgaagaaagtgtcactcaactaacttggcatgggtgcgtgatcttattgtttgctaaggaagatttctgtgactggctacattggttttatcttttcaagttaataattatcatttcctccaggctctttaccttggaaaatgaccttaaagaatgggaactttgtgtcctgttccgcaacaatcacttcgctaccatgctgcaggttatttacttatattatgtaaagctgtagtgtttctttttttggttcccagtcacttaaatcgataatcaggaagtgtttttgaagcgatttcaacagtttatacataacattctagaaggttaattctgttttcttttgcagcatgaagaaagactctatactttggttacctatgaaggctatcagatgcagcaagacttggtttgggaaagattcaacaaggtatttacgaattatgtattagttgtccttgtaaagagaagatgaattttgctatatttcaaagtctctttgattgctatggtttggttttaatactttcagattgatggcgattctgccttctttactggttacttcacgaaattcatcttcaaggatcaacagcacacaattagtaaaactgaggtaagaacgtcctgctgcttttattattcatgtagaaacttacctggctgttactaaactaaaatctctttttgtctttctcagaattctatctccagaatcaagagtgaaaacatggatactactgagtaaatatctggatctatgagaacttaatattccatctgtttaggctattttccccccccctttgtttctaaatctataacattattaagagtcgctctctttttttttggtttttatggcaggttcgatcgtctattggcgttggagttggagcaaaa

SEQ ID NO: 165683 - DNA, 2180 bp, Arabidopsis thaliana landsberg
aatgccaaacccggtacgagacaaacactactgggagcccccttaagaactagaaatccttacagaaggagctggatttcccgccaggaatccacctgcaaatataccaggccacccaaataagcccagcaagcccaccaagtagagaacctgcgcaaatctggagcccatgtatgaattaggtatttgggcctaataagtctggtcacctgacatccgtgacactaatgtggagaacctctaccaaaattcgaattcttccgaataagaacaaattctcccccctcgcaaaccaaggatggggaacattatgtctcgatacagccgcctcccaacagagataaccaacctccgctcaacctggctaaccccaccaaacaggtgcctccgagacctgcaatcgagatggccgaactctgcccaatgatcctgaacctgatcaacataagcaaaaatcaagaaattgggcaccggaacctcgctgaaatagtaggtcagtagaaatgcgattctacccgcatggcacaagtaacagagcgtgacctcgcgggaaaggaaatcccttcccaggaaactgagatccctgcccagaactccatagatctgacaggagcctctaccccgacagatcatactccaaggactcgtttagatttgtctcgatagaggttcacctcctatcaaccagcaggtcacatttttacaggcacccgtgacactctcgtcgatacccaacaacagggaatgagacacgtacaatgcctaccttcccaagcgtaccgctagctactcgcccctgaggtacacgtggacgagaaaccaaacaaccgcgtccagctcctgcgttcccgggaactcaacgcaacaacgaacctccattgctaatctaccatccgttccctggataccaggaagtgacctctttaacggtccaaccgatcctcgagcaccaatcgattcgcgtaacgtcttggatatggaaacattccgcaattacgcagctcaaacaaatgcgaacatggctcaaatgcattcacgagtgcatctagcagtgagcgatcctcccgacatagatcgagtgatcgaagaaaccaggcgtaccccattcacggataggattacccattatcgcatcagagacgtcgagagattccgtttcccaggatacgacggaacgagcgacccaaaggctcatctgagagcctttcgtctggctatatttcgagcgtacctgacagacgaagaagggaaaggaggtcactgccgtttcttcgcagaaaaactcgtagatcacgccctcgaatggtttgctagtcttgaagggaactctattgataccttcgaccagctcgtcgtcgcctttttaaaacagtactcggtacttatcgtaaacaggacgtctaaagccgacctttggggtctcacccaatgtcaaaacgaatctctgcgatcttacatcaaaaaattcaaagcaatcaaatcaaagattgtgaacctaaacgaggaggtagccatagccgcccttcgcaacagcttgtggttttcctcaaggtttcgcgaggaactcaccgttaggcaacctgtctctttagacgatgcccgacacaaacccctccacttcgccaaagccgaagaggagctccctgtgctagccttaagattcaaaaaatctaaaacgcaaaacgctccccttgcaattaaacaacccttcaaaaaggaaaaccaaacgcaagggcagcataccctattcgcaatagaagaggcagctgaggacgagagtccagaacttgacctcaggaaatattgcaagtaccacaaaaaaagaggacattccacagaggaatgttgcgcccttaaaaaattaatcgcagttgggggcaaaactaaaaaaggttcaaaccccaaagttgaaacccctcctcccgacgaacaggaggaggagcaaaccctcaaacaaaagaaacgggaccgaacaccggagggaggtgactctcctccacctactaggagagaacgcatagacctagtctttgtagaactcgatctgcgaactatgaaagccgtcccatcaacctaccaccaatgcattaaattccccttggacaaggggataacagtcgtatacagcagccaacgcagatcccgaaaatgctatatgggcagctacgagcatatcaaaa

SEQ ID NO: 165684 - DNA, 1376 bp, Arabidopsis thaliana landsberg
atgaccagcgtaatcacctcacgtgctcgtcacgtggccgtgatcggactaggagccgccggcctcgtggcggttcgagagcttcgtcgtgaaggtcataccgtcattggtttcgagcgtgagaaacatgttggtggactgtgggtgtacactgatcgagtcgaaccagactcacttagcgttgacccggatcgaaccatcgtccactcgagcatctaccagtccctccgcaccaatctaccacgagagtgtatgggttacagtgactttccattcgttacccgatccagtgacggtgacccaagacggtacccggatcatagggaagtcttgatgtaccttcaagattttgccaaagagttcaagatcgaagatatgatccgatttgagacagaggttttgtgtgtggagccgtcgccggagaataaccgtaaatggagagttcagtttaagagctcaagtggtgtctccggtgaagatatctttgacgcggtcgttgtttgcaatggtcacttcactgagcctcgtcttgctcatattcctggtaagtaattttttggttacttaaaagtgtgattagtgtgtaatttaatggttgattagtttcttaattatcttgtttttagtgttttagggatagagtcatggccaggaaagcagatccatagccacaattatcgaattccagatccattcaaagatcaggtatttgcaaaatttattatcttcttattcataatcgtagctcttaattatactaatagattcttttaagttatctacattgattgttgtttgacatgttttgtaggtggtgatagttataggaagtcaagctagtggaaacgacattagtacagacatagcaaccattgcaaaagaagtccatatctcgtctaaaatggttgcatccgattcatatggctgttacgacaacctacggattcaccctacggtagaaaaatgaaatataaagacaactaagaatatgaatatgatcatttgatttcttatatgtctcttgatatgtttgtagatatatcgcgcccgcgaggatggttccgtggtattccgaaacgggaaagtggtttttgctgatgctatagttcattgcactggttacaagtatcatttcccgtttcttaaaaccagtggttatgtgactgtcgaggataaccgtgttggacctctctacaaacatgttttcccacccgcacttgcgcctgggatctcctttattggtttacctttcatggttagtattacgacatgttagatacatatgggagttttaaaagattaagaatggtaggattatccttaaaaaccagggtaaaaattattgggaatatatccatgaagtaaaaaaaaagctt

SEQ ID NO: 165685 - DNA, 2042 bp, Arabidopsis thaliana landsberg
  unsure (1)..(2042): unsure at all n locations
atcgaaaaagactggctagaactcattctcggttcggagatgctcgacgagatgagaacgaccagaaaacaaggaatttctaaaccggaaaaatcaaaaataacaatgaaacggcggagcttcaccggaaaaagagagaacaatagaaatatcaagatcagagagaagaaagcaaaccttgtttcttttcttcgaaancttcaaatgaaatctcgaaggaatggctccccatatataaagagtttttaaaggcgcgtcggatccgcagcaaacatttaaaacgcgttcaagctcgtgggctcgacagaaggaaaagattcgcgtgatcctcgggaatgagctagaaacgtttccacttctcaagaatagtcggcgacgcgcaacagaagtttgaccgtccgggaagatagagcgacagaattagaagacaagcagtcggctcggtaatccattcatgaagctcatcgtctctccactaagtcaatgagctggggggcaaactgttggggtcggattccacccaggtaaacgagccaaccatgtttaaacgcctcgggggatgtcaaagagttaccccgagccaggttacaaaacacctcggagatcacatcaagaatccatatcgaggcgacatcgagaacgcctcggagcattatcgcgaaatggtcccccgacccgacctcgaaacacctcggacataaacctagcaaatcatcccgaggcgggttccaagacgcctctggaatgcattttcgaatatcacggtccgagccgcccgagcacgacccaaggtcagctaaattccggctccgaagaactttggactaggtaagaaaaccttcaaaaaaaagggacttaaccaatataagatcaaacataccatttccgaaaactcggaagagatattagagaatcttcaaagatgtcaccggatacagaagttcccagaatctttggaagataaaaacaatctccttcgccaacttaaagataaagagagatcttccgggaatatcgcgagaagcgatattctcggaccctataaaaagcacctcagagaacaaacaaaagggatacgcacaaaaacgctctcaacttcaggctatcaaaaacgctctgactttgaaggcagaaacacttattttcatattctagcacacttgtacgatcaaatcattactttctcattaatataatcaagaacaccgtccgcggtaattgagaattctgttgttctttgagaatctcacaaagatccgttctttgaagaaacccttaaaataaattctattgtgcaactcagaagggaaattgccctcggacaaatggaaagctccgaaactcaaagctcagactgcacgtttcgttctagtagatgaaaaactttacaagtggcgattatccggacccttaatgacatgcgtggaaggagacgcggtttgcaagatcatgaaggaaattcacggtggctcgtgcgaaaatcattccgggggaagagctttatccattaaaataaaacggcacggattcttctggccgacaatgatcaaagactacgaaattttttcaaaacgatgcgaaatatgtcaaagactcttatcaccaatcgcctcgccgtatccattcatgcgatggtcaatggatatatttggacctatgcatccctcaaagcagaaaaagttagttctcgtcttgaccgactatttctctaagtggatagaggtcgaattttacgccagcataaaagacgctcaagtcgagaacttcgtgtggaaacatatccaatgtcgccacggaataccttatgagatcgtgacggataacggctcgcagtttatatcaacccgcttccaaggcttttgtgacaaatggggaatccgactttgcaagtcaacaccacgatatcctcaaggaaacggccaagccgaggccgccaacaaatcaatcctcgacggattgaaaaaacggctcgatgcgtaaataccgtagtcgaacttggattttgtatatatatacattttagaccggaccataatccggtt

SEQ ID NO: 165686 - DNA, 347 bp, Arabidopsis thaliana landsberg
tccaccatgggcaagaaacgcaagcgcgacgcaactcctccatctgaggattttggtgactcggagtattcagaggaggagttctcctctgaatccgaggggtatccggctcccatccctctgcgtgagtgatgattcagacgactcccaggggctcgcggtggaggtctggacttacatccgggccgtcgagcgttcggggctcgcgggctcggatgagtcggaggactcctcggacgaggatgactcgtccgaggaggacggcgacgacggtggcgagggcgacgacgatgacgacgacgacgactgaggcggtagcggtgacgacgacggtgactgccgcggcg

SEQ ID NO: 165687 - DNA, 2164 bp, Arabidopsis thaliana landsberg
gttcttatatatccatccacattctgatcacaccggttttgatgttccttttttcgctgaagagacgatcttatatgttttgtttctgttatgcaagatgagaaggtggaagaagtgggaagaggagactaagactatcgaatatcagtattcacacggtataatttacaaacttggaatgaaaaattgattaaatgtaaaacttgagtgtgaagtttcaacaaggaatgtttcggataatgtagatcccgagaggtttaggtttgcgcgggatacatctttcgggcgtagacatctgagtttctggagcaaatcaactattacgctgtggattgtatgtttcttcagacagttctttagatctgtaaccaaagttgattacttaacactgagacatggtttcatcatggtataagtcaatcttttgatctttaacttttctgttgtataataacttatctctcaaggcaaagatcttacagcattgcacgaatgcttcttctttttcttctgtttcaggcccatttggctcctgggagcgacgcaagattcgatttccgaaagtatattcagagatcactagaggaagacttcaaaaccattgtcgagatcaagtatggaactaattacgattacaaactccacttcactaaccactacttaatctgatgttttaactgcttatatcttcagccctgtgatctggttcatagctgtgctattcctcctgacaaacacaaacggtacactcgttttcaaaacgtcgctgcatcgatacctctttaaaagccttcaacaatccaaaactaatagattactctgcttttctaatgaacaggattgaattcttacctctggttaccgttcattcccttcatcgtaagcaacaaacaaaacctttagactaaacctattttgtttcggtttcaactccgtaacaagaatgaaatgtataaacaaactgcaggtgattcttattgttggaacaaaacttcaagtgataataacaaaactaggacttagaatccaagagaaaggcgacgtagtgaaaggcacaccgctagttcagcccggtgatcatttcttctggttcggtcgtccacgtttcattctcttcctcattcacttagtcctcttcacggtatacattcatcttttactttctactctctctccttacaaaaatgcctgaaatttaaccatttctttttcgccatcatcagaacgcgtttcaactagctttctttgtctggagtacggtaagcaagcaatcctgcattctccacgaacttgaaccgtaataatacctatacaatcatcattttcatcaaaatcatttgttatctcttcagtatgaattcggtctaaagaactgtttccatgaaagcagagttgacgtgatcatcagaatctcaatcgggtaagtggaaaacataagcttcaaaacccttcatagaaaccatcccttaacatctaacaaagtcacaaccttttggaaaacataagcttcaaacatagaactgagaaaccattccttaaaatctaacaaagtcacgaccttttggatcttgcagacttttagttcagattctttgcagctacgttactcttcctctatatgctcttgttactcaagtaagacccacacacaaaaaaacacaaagattgaaactttcaatttcaaaaactgacatttttgaattcaattttggtgaagatgggttcaaagatgaaaccaacagtgttcaacgagagagtagcaacagcgttaaagagttggcatcacacagctaagaaaaatatcaaacatggaagaacttcagaatcaacaacacctttctctagtagaccaacaacaccaacacatggttcttctccgattcatctccttcgtaatgctcctcacaaacgaagcagaagcgttgacgaaagctttgcgaattcgttttctccgagaaactctgatttcgattcgtgggatcctgagtctcaacatgaaactgctgagacttcgaattcgaatcatcgttctaggtttggagaagaagaatcggagaaaaagtttgtttcttcatcagtggaacttcctccaggacctggacaaatacgaacacagcatgagattagtactataagcttaagggatttttcgtttaagcgatga

SEQ ID NO: 165688 - DNA, 1432 bp, Arabidopsis thaliana landsberg
aaaaatttggtagtcaaatgaaataataaaagtgttggtgggtttttttagactgaggttcattatcttgggagacttcatcatatgaatcttgtgaagctaattggatattgcttagagggagagaaaagacttttggtttacgagtacatgcctaaaggaagcctggagaaccatctatttcgaagtaagtaaggatcgatttgggctgagctagagttacattcaagttatcctatattgactatcgggagtttttcatttttggtggttttgcttgtgtaggaggcgcagagccaattccgtggaagactaggatgaaagtagcttttagcgcagcgagaggactatctttcctccacgaagctaaagtcatataccgagacttcaaggcctctaatattctacttgatgtggtacgccatctactatcaatgcttgtccatattttatttaggaagttgttaaagcaaaagaaaatagaaagctccactttattaaatctagagtagtatactaatatatgaaagatatgaatcattttcctcattgccagttggttttgagttaaaaattcataaatccgaatatagtattaagttctagtttgaccgaagtagattatttgtcgagtttagagcgtgctttgattcgagattcgtcaaagagccatcatctcattacgactaaaatataaatgaaaaagcactccaatggaaaatagtgaaattagaattctaaacatataatttctaaataaatacgtaagtctatatagaaaaaagtaaaaaccgagttttcttgccacttacggacgtgtacactagaaatatataacattgattcccaaaatcttaaaatcgtcttgtaaatgcaggatttcaatgcaaagctatctgattttgggttggcaaaagctggaccaacaggagatagaacacatgtgacaactcaagtgataggcacacaagggtacgcagctccggaatacatagcaaccggcccgttaacctccaagagtgatgtctatagctttggagtggtgttgctcgaactactctcgggtcgtcccaccctagacaaatcgaaagtaggagtggaacgtaacctggtggattgggcaataccttatttggtggacagaagaaaagtgtttagaataatggacacaaagcttggaggacagtaccctcacaaaggggcttgtgcagctgccaacatcgcattgcggtgtctcaataccgaacctaagctcagaccggatatggctgatgtcttatccactttacaacagcttgagacttcttcaaaaaagatgggttctactcaaaatatagtcatgtctccttcatctcatatgtcgtagtataacaaggttcgagatatttctgcgtttaaggtgggaagtaggagatctaaggacccttttgag

SEQ ID NO: 165689 - DNA, 1307 bp, Arabidopsis thaliana landsberg
atggagtctacgcctccttatcaccgatccaacactaaatcagcttcgcgtctccaagattcttcgaatcctccaagtctctctcttgatttggttctatcgtctcccaatactccaaccccatcatcacctgttcctcttcgcgatatcctcctcttacctccttctccacttcgaaaatcgaggacccgtttatccgatcgactcgaaatgacttctgaagatgctatggcggtggttcggaaacggggcaaagggaaaggagggcgaaagagtcttttagcatctccaaggaatccccggagatcgaggcgaagatctcaatctgtgcaagagaaagaagctaatttggtctccgaagaaatcaaaaagcatcctcctagaaagcggaaggttaatggcccacctaagaaggataagcacagttcagctcctcctctttgtcttcctcagatcttccaaggactcttctttctcttattatctgctttatgtgtttctctgcttaattctgatttgcttgtgtgttgggtttggtgaagatacatgtcagagcgatttgaatcggattggagagattataagtgatttggtaatgtggagagatgttgcgaaatcgactctctggtttggttttggatgtttgtctttcctatcttcttgctttgccaaaggagtcaactttaggtaccaaatctctagcttgtgtttgtaggctcaattagatttgtgaaagtcatgacctttttctttgttttgaagcgttttctcggcggtttccaatctcggacttgtgttactttgcgggtccttcttgtcaaacactctttgtcaaaggtacatttacttctgtggtctcttttgtttgtccttctccagaaggtaatagttagtgtgatccttcaacgtgttgttacttttaggaaaaatgaagacacaaagagagtgttccatgtgagtgaagatgatgtcttgcgtttagcgagacgagtgcttcctgcaaccaactttttgatctctatgactagtgagcttttttcaggagaaccatcaatgacactcaaagtaaacaaaatcaaatcagttttggtgattgctatatgtggtggtttacttgccctttcatctgctgtttttctttttgtcacaggtgacaccatttctgctactgggagctgagtatggtcatctcataacactgtggaggctatctgcatttggtaattaacatttggaacataagctgaaacattgttaagcatgataggaattgtgatgatgatatgtgtgtatgggtactgaaacag

SEQ ID NO: 165690 - DNA, 909 bp, Arabidopsis thaliana landsberg
acaccgttgccttacgatgctgatcctaggtactttcgttttgtttatggctctagtcattcaggtgaagaatcagaaccgttaagaggtgatactgaaatgagttctgaagctttgggtgatggtggagccaagtggagtaagtctgattctgaagatggttcgaaagaagtgtatacgaaaggttcatcaacctttacaaagtcgaaaacaatgccggggatagaagtttattatgcagattcggatgatgaagatatttgtccaacctgccttgatggtaatactaaaaaattagtttgatgctattgttattattctctttgaacctattatatgcagttttgttggtaaagagtgtgttaggttgttagtagatctttataagttgctttcttggtttcatttcttcatttagtgcactcctgagtcctgagccattaggccattaatagtatagtttacgtagatgaggcaatcgttgcgagtgcattaaggtaatattggtttcatagttctttgttttaacaatatgcagattacactttggagaatccgaagataatcaccaagtgttctcaccatttccaccttagctgtatttatgaatggatggagagaagtgaaacttgccccgtctgtggaaaggtaactcgtcgctttctacaaaactttaaaacccggatttggtcgaatgtgccatcaatctccttcatcgatattaaaagtgcatcattttgtattagaatttgatatctccattttaagtagtggtccatttctcatacaattattggtcatatagagaaccatgagatgagttaactttttggagttaatgcatccatacctaattgtttcactctaatctttcaggtgatggcatttgatgaaaatgaaacttcttag

SEQ ID NO: 165691 - DNA, 608 bp, Arabidopsis thaliana landsberg
gcactcaatacattaacccagccatttcaaaaaacagaacaaatgcccatcctgtttcttggaccatggcagctccccatgaaatgcctatttgaaagaccaatgaatttactaaaagggcctgggaaagaattaaggccaaaacactaccaaaggccaacagctggattatgtatatctgcgcattgggaaacccgtggaacattagtgacagccgttacaaaacctaaaaccatacatgagttcggaggtctcccgaaagcattatttgatgtacgctacccggctccggtgagacccgaactggcaaaagaaacacaaaaaataattacaaaaacagcccgtggccatgatgagcaatggggggctgatcatggctgctggagtgttgataaacatatatacccaaatgcagaaataccaattattcaaatgagcccggattatacacaagggccgaataacactatgagctggcaaagagctggcttcactccccaaaaagggtcttgatattggcagggaaatttagtcacaccttggaaggttgccgggacaaatcaagaccaggattggggagacgggccataaagccattaaaatgaaaa

SEQ ID NO: 165692 - DNA, 375 bp, Arabidopsis thaliana landsberg
ttgggtactgaggtgaaatcggtgcggaacggccgcggaaagctcgacggaatctatgtcgtgatccgtggcaaggaggccttcctcgtaggcgcttctatccctccattccaacagaagaacaccccggattcattcgatgcagagcgcccacgcaagcttcttctgacggtaaaggagatagccgagctcgagcagaagagcgagcgccaaggattgacagtagtgcctattaaattgtataataaaggctcaaagttgaagcttgagatcgcggtcgcccgaggcaagaagaagaccgataagcgccaatccatacaggcgcgggacaccaagcgtgatatcgaacgagaactcaagatgcggtacaaataa

SEQ ID NO: 165693 - DNA, 434 bp, Arabidopsis thaliana landsberg; identical to SEQ ID NO: 68740

SEQ ID NO: 165694 - DNA, 397 bp, Arabidopsis thaliana landsberg
agacgacgaaacctgccggagaacagaaaaacccggcgaaaatgggaattcgatttcgtcgtcctctgttgatcatgacttcacttctgcttccaggttttcatcggaaccaatctcacctccactctctaataaacttcttcaattgtgagtttgtaattttgttgcagagctttcactcagaagaagctcgatgatctcaaatctctcttaagcatcacacgatgtgtggtggatttcgattgtcacaggagtattttggtccgagtggttctttaggagaaaaggatgtttgatatggtcactcaacgcaagaaagatgataaaatgacttatgaagatcttgttattgctaaggtacactcaagtcttttttatcgtcttaatcaatcattgg

SEQ ID NO: 165695 - DNA, 1158 bp, Arabidopsis thaliana landsberg
cttcgtcgagtttgctgttaagttttctttcagcccttttatatatgattacacatcttttgtttactgacattaccttttgtttttgtagaaaacacaccattgggatcctttgataactggtactgtccagtattatattaatgagatctgtttaaggcgaatgaaaggcatggttagcaccgtgagaactagtcaaaagaaacctaaatggatcgggaaaactctatggaaaacaatgactgcatactgggacactgaagaagctcaagaaagaagtcaaatctattcaaatgcccgtatgtctgaccgtaacagtctaggtcctcacatacacttctcagggtcgaagtcatatcatcaaatccgtgacgaattggtaagtcttctctctgtttactcctttgcaactttaactcgatgtttcaatgtacttttctatgacttgtttttttttcattaggggaagagcaattgggcaaaactgtcagtattggtgacgttttcatcaaaacacatacaaaacctgatgggacgtatgttgatcgaaaggcagagaagattgcagagttatatcagaagaatttacagctgaggcagtctgagctcgaggctgaagcttctgctgtttcagatggcacttcgcgggcacgggagctcacagctgaggaatatacaaccatatttcttcaggtaacgttttatgtttcccaatttagtgttttcgagttgtctttttcattctctaatctcagcttttatcatactttgcagtccactgagagggattcgagaggcgttccttatggagtaggaagcctcaaagagtctcttgtcaatggcaagcggaagcaagcatgtgactcaacttcttttgtggctttgcaagaacaattactggaagctcaacgcaagatagaagagcaggtctcttacaatcaaaggcgtgaatctgagattgcttggcgtgaagctgagaattcccgagctgtagatgagcagaagaagaagcttgagcacttgtccttagtggagaagtttttgcgcgaaaatgatcctcagttcctcaatttcctcgaatctcattcagctaaggagacaaccacatatcctatctcaacctctccagctgcctctccctcttcatctgcttcatag

SEQ ID NO: 165696 - DNA, 1910 bp, Arabidopsis thaliana landsberg
ggtactacttttgcatgggtgcagcagttttactggcggtgacggttcttgtgtggatccaagataacgttgggtggggtctaggtttaggcattccgacagtagctatgttcttatccgttattgcttttgtcggcggttttcaactttaccgtcacttggttcccgcgggtagtccatttacccgcttgatccaagtgggagtcgcggcatttcgcaaaaggaaactgaggatggtttctgatccctctcttctctattttaacgacgagattgatgcacctatctccttaggtggtaaactcacccacaccaaacacatgaggtaactattctattcatgttcttcttgtctaagtcctaattcattatctctatataattctcggaataaatatcaaactatttactactataagataatgtaaatgttttgattatatatccagatagtcacgaggagacgtagtagaatctgaatctaaaaatgatatttctgtcaataggacctgagactaaatatcaatatagtaaacgtaaacaattgagtaatcgtacaacaacttgtccactgggtgaaaccagacaaattaaaagtaaaactacaaaatacatccaaaaacttacataataattgtaatcggtggtggttcattgtaaagaaagaaaattccaaaagcaagaagacaacatatcaaagttgtcactttttttttttttttttttggcatatactgtatatgcagaaataattggattattggacctatttcgaaaatagtaagatttagataattaatagtaatataatgactggcctaatcacttttcatttgtcacttacttgtcttgctcaatttgtaaaatataaaactaagagtagttgtagagttttcatttatttttattttctaaaagctaactatgactaaacattttcaccaaattaaatttaaaatggttgcacatttcttattattttgcaaactctgctcttcaatgtagtttcttggacaaggcggcaatagtaacggaggaagacaatttaaaaccgggtcaaatcccaaaccattggaggctaagcacagtccatcgagtcgaagaactcaaatccgtcatccgaatgggtccaatcggagcatccgggattctcctaatcacagcctatgctcaacaaggaaccttctcattacaacaagccaaaaccatgaaccgtcacctaacaaactccttccaaatcccagccggttcaatgtccgtcttcacaaccgtcgctatgcttaccacaatcatcttctacgaccgcgtcttcgtcaaagtcgctcgcaaattcaccggtctcgaaagaggcatcacgttcctccaccgtatgggaatcggattcgtaatctcgataatcgccacgttagttgccggattcgtcgaagtaaagcgaaagagcgtcgcgattgagcacggtctcctcgataaacctcacacgattgttccaatctcgtttctttggttgattcctcaatatggtctccatggagtcgctgaagctttcatgtccatcggacatttagagttcttctacgatcaggtaatgaaaacattatacatactctgttatataaacagagagttagttaaagagtctaactaacttttgttaactaacgacttctctaaccgaataactaactatttaatcatttctttaatgtcaggcaccggagagtatgaggagcacggcaacggcgcttttttggatggcgatttcgatcggaaactatgtgagcactttgctggtgactttggttcataaattcagtgctaaaccggatggcagcaattggttaccggataacaatttgaaccgagggaggcttgagtatttttactggttgattactgtgttacaggctgta

SEQ ID NO: 165697 - DNA, 1182 bp, Arabidopsis thaliana landsberg
  unsure (1)..(1182): unsure at all n locations
atggcttcaatagggctatatgaagcattcataggtttcctctgctttctcatcttcttttatttccttgtcaagaaacctttcagatacttactcatcaagaaaactcttcaaaggctacccttggaactggccggttcttggaatgcttcccggtgttctcttgaggctccagcgcatctatgactgcagcgtcgaggtgctcgagaattccaacatgacgtttcaattcaaaggcccatggttcgttggaatggatgtattagccacggctgatccagctaatattcatcatataatgagctcaaacttctcaaattacatcaaaggtcctagattccacgaaatatttgaagcttttggagatgggatcattaattcggacgcggagctatggagggattggaggaacgcatctcagcttatattcaatcatcaaaggtaccaaaacttctcagcaagtaccacgaaaactaaagtcaatgatgggcttgtacctcttttcaatcactttgcaaatgaagagattgttgtggacttggaagatgtgttccagagattcatgtatgatataaccttcattttcataaccgggaccgatcctagaagtctctccattgaaatgccagaggtcgaattttccaaagctcttgatgatgttggagatgcgattgtgcataggcatattacaccgaggttcgtgtggaagttacaaaaatggattggaatcggaacagagaagaagatgttgaaagctcatgccacttttgaccgtgtttgtgaaaaaataatagcagcaaagagagaagagctaggatcacaagggattacatacaactctaatggagaaagtgaggatcttttaacatccttcatnnnnnnnnnnnnnnnnnnnnnnnnnnnnnnnaaacccagtcatgataagttcctcagggacttcacaataggtttcatggcagctgggagagattccacggccactacactcacttggttcttttggaatttatctgaaaaccctaacgtcttaaccaagattctccaagagatcaacacaaatctaccaagaaccggaagtgaccaagacatgtcatcgtacttgaacaagtaagtgtacttacatggtgcattgagtgaatcaatgaggctttacccaccaataccattccaacgcaagtctcc

SEQ ID NO: 165698 - DNA, 957 bp, Arabidopsis thaliana landsberg
ctgagctcgatttggttgataaacaaaggcttcaagaattctaccggaatcaatggaggttctggtaggttctacgtttagggatcgtagcagcgtcacgacgcatgatcaggccgtaccggcgtctctgtctagccggattggtttgaggagatgtggtagatctcctccgccggagagttcgtcgtccgttggagaaaccagcgaaaacgaggaagatgaagacgacgccgtttcgtcatcacaaggaagatggctcaattcgtttagttcatctttggaagattctcttccgattaagtacgtttctttattaattatcttctaattattctgttatctacacctgaatatattcgatcgatttcttttattacaagaataaagtaaatcattagattctcttatgttcttgggtttgattttattgatgaatctgtaagatgttgaaattgtttcttacttattagattctcagtttaaatgttattactacatgttgtgtttttgtttagtcatgtggtttaggttttggtttttgttacaggagaggattatcaaaccattacatagggaaatcgaaatcgtttgggaatttaatggaagcgagtaacacaaacgatttggtgaaagtggagagtccattgaacaagagaagaagattgcttattgctaataagctaagaagaagatcgtccttgtcttctttcagcatctacactaaaattaaccctaattctatgccgttgcttgcattgcaagaatctgacaacgaggatcataaactcaatgatgatgatgatgatgatgatagtagcagtgatgatgaaactagtaagctgaaagagaagaggatgaagatgacaaaccatagagattttatggttcctcagactaagagctgttttagcttaactagttttcaagatgatgatgatcgatgatcattcttcttct

SEQ ID NO: 165699 - DNA, 1874 bp, Arabidopsis thaliana landsberg; identical to SEQ ID NO: 29780
  unsure (1)..(1874): unsure at all n locations

SEQ ID NO: 165700 - DNA, 700 bp, Arabidopsis thaliana landsberg
atggaaaactaccaccgtttgtacgagttgtctcccttaataactggttggacgatatgtgttatgattcttcggatttacaagaaaatgctaaatgatcactcctttgaattgcatcttatcttgcaagatgaagcggtaatagtttatttgtaatctttgatttcattttctgttgatttcgatgcgtaatataatacgagtgtttgttttattagggcaagaggatagaggtaacaattgggtctcggttttctgctttctattatgacaggctcatagagaatcaatggaaaatgatcagtacgttcctcatgcggcctaattcagaatccataagatccactccccatgagtttcgaattatttttttgtagcaaaccgttgttacttcatcacagccgaaggaaaccgttttacttaacaactttactccatttgattacattctcgaacactcggttcggaaagatactctggttggtaagtattaccctattttctcatgatatttctccaaatatttactttaatattgacttacacttaatatttgtctcagacttgcttggggcactcattgatttcgactggctgaccaatagtgcgccaaatgggtccgatatggacggattcaagcttcaattcaggttcatggatagcaagtacttttcttcactacctttttatagggttttct

SEQ ID NO: 165701 - DNA, 1020 bp, Arabidopsis thaliana landsberg; identical to SEQ ID NO: 10884

SEQ ID NO: 165702 - DNA, 1542 bp, Arabidopsis thaliana landsberg
  unsure (1)..(1542): unsure at all n locations
atgaacttcgtcactggactgccaacggggatcaagtccaaacacaatgcggtatgggttgtggtagacctattgactaagtctgcgtacttcatggcgatctcggataaggatggagcagaaatcattgccgagaagtatatagacgagatcgtgcggttacatgggattccggttagtatagtgtcagaccgagacacaaggttcacatcaaagttttggaaggctttcaaaaggccttaggaactcgagtgaacctaagtactgcctaccacccacagacggacggacagtccgaacgaacgattcaaaccctcgaggacatgttgagggcatgcgtcttggattggggaggaaactgggaaaaatatctaaggttagtagagtttgcatacaataatagttttcaagctagtattggtatgtctccctatgaggcgttgtatggccgagcttgtagaacaccgttgtgttggacgcccgtggcgaacgtcggttgtttgnnnnnnnnnnnnnnnnnnnnnnnnnnnagagaatgaagttcttaaaaatcaagttaaaggaagcccaagatcgacagaaaagctacgccaacaaacgtcgaaaagaattagaattccaagtaggagatttggtgtacttaaaggcgatgacctacaaagggacagggcgattcacctcaaggaaaaagttaagcccaaggtatgttggcccgtacaaggtgatcgaacgagtaggggcggtggcatacaaacttgaccttcctccaaaactaaacgcatttcacaacgtcttccatgtaccacaactacggaagtgtttaagtgatcaagaagaaagcgtggaagatgtacctcccgggttaaaggagaacatgacggtggaagcatggccggtacggatcatggatcgaatgaagaaagggactcggggaaaatcaatggatttgttaaaagtcttgtggaattgtggaggccgtgaaaaatacacttgggaaaccgagaagaagatgaaggccaatttttcggagtggttcaaggagatgggtaaagatcaacttgatgcggattcgggaacgaatccaattcaaggggggagacttgtaacgcccgcgatcctcaataggatcgttggctaggacttggtccgagaaaagaaggtggagtctcggacaagtgggaaggagctggccataagctcggacaaagggtaaatcatgcgagctaagctaggatcgtaaggaaatcagctgggttagctcgcccaaagctcaagctcagctggaaggagtgacggttactcaggtcgagtgacagtccagctcgggcaactggacgagtgacagttgagctcgaggcagctggacgagtgacggttgagctcgaggtagctggtcgactttccgactagttgggcggttatggtcgaacggttgcttgcccaaagggtggataagggcgaacagttacgggcgaagagatgcaactcttaggaaaggtgcaactcttcggaaaggtgcaactcttcggtaaggtgcaaggg

SEQ ID NO: 165703 - DNA, 567 bp, Arabidopsis thaliana landsberg
catgaatttaaattggttgtacgttacacaacttatgccgtatcaaaaaacttatgccgtatcttttctccaaaccatcatctctgtgttacgttaatatatgagatgataatcacttgttatcaatatgcatgtgaaaatctaactaattgcgtagaaaacgtgagcctagaaacaataaaacccaagtttcatgatccatctaatccaactccattaggttcttcatgcaattattctcttttgcactctcagtacaagttatatatgagctttcgtcttttttgtacaagacattgtcacaaaaagaaaaagggatgattgtaatgaaaaagagtcaggtttttacagtgatgttacttatggttatggtccagtcaggtctggtgagagagacgctgggacacccatgtggtcgtacatttttgtcggctttgattcagctagtgccgtgtagaccatcagtggctccgtttagcacattgcctccgaacgggctatgttgcgctgccatcaagacacttggtcaaccttgtttatgcgttcttgccaaggggccacacatcg

SEQ ID NO: 165704 - DNA, 676 bp, Arabidopsis thaliana landsberg
ttttttttttttctcttctttgaatctcaacaatggaagaaaaaagcttgctttgttaatgggtttttgttttgtttcaggagattataaattgtgctttccaagatattgtttctgatgaattgaaaaagattgaggattcgtcgagaaacctttcggggaataagactctgactgaagattgtgatgatatattatgggaatatgaggaaggtcttaaaggtgtttatgaaggtgatagtgaagagatattgttagaaatgcaacagatattctataaggatttgttatcagagactaacgtaaatggtacataaaccattcttctttgcttttacaattgctccatgagatttcgaatgaatgccttgtgggtcatcttcttcttttaggatcatttgttcagattgaaacatgggaagacgaggaagatgattacttggccgctttagtttctcagaatatgtgtttaaacagtgaacaggtaggttctctttcacagagtagaattgttcttctcaagaccttagaaaccagttaactggtttgatgtgtttgtcaggaggaaagccagatatggtgtccgatatgcaagaaaggagagcttatggagaatcacagacatatcgattgcaacatgtgtgatatgcagcttaataaaggccgaaaggtgcag

SEQ ID NO: 165705 - DNA, 419 bp, Arabidopsis thaliana landsberg
cccatccaaggtcaactacatttcgatttcacattatatgtgtacatcccatgacatcttaccaaacctgtgatgtacttgacagggggcaaggttaaggttgtgtgtcctgtcgggattcatatggaaagctagtggctaaggttacaatctctagctacccaacggacttgaagggatacttctacttcatcacgtacggactctcacacaaggtgaataacatcagcagctgcaaagtgaaactcgagagctctccggtcttcacgtgtaagactccgaccaatgtcaacaaaggtgtcaccggagctccactctctcccgacaactccaagttccttagccacgacaacttgaccctctacacccttgaacctttctatttctcaagtccagtggctcccaaacccgtttactag

SEQ ID NO: 165706 - DNA, 1233 bp, Arabidopsis thaliana landsberg
  unsure (1)..(1233): unsure at all n locations
acaactatctagacattgctttctctagatttgtgattattggaagaattaaggaagctttgtgttgaagaactcttttgtaataaacgaattaactcgattcaaccaatcaaggaggcggagatggagaaactgattgactcaattgctgaatctgcttctcagaaaactctggttaacttgagtgatacgtttctttctttaaacgttaacgtaatttgcaaggcagtatttggtgtgaatttccaaggaactgtgcttaacaatgataagttccaagatttagtccacgaggcacttgagatgttggggagcttctctgcttcggatttcttcccgtatgtcggttggattgtcgattggttcacgggtttacacgctcggagggagagaagcgtacgagatcttgatgctttctatgaacaaatgattgatttacatctacagaaaaacagagaagaaagtgaagatgattttgtggacttgctcttgaggttggaaaaggaagaagctgttcttggatatggcaaactcacaagaaaccacatcaaagcaatcttgatggtaagacatatctcattaaaacctttaagattagtatattgtaaaacatattatctatcttttgtatgtagaacattcttttggggggaatcaatacttctgcaataaccatgacatgggcaatggcggaactcataagaaacccacgagtgatgaagaaagttcaatccgaaatcagagcccaaatagggaaaaacaacaaaacaagaatcataagtttagatgagataaatcatctcagttacctaaatatggttatcaaagaaacatgccggttacatccagtagcacctcttctagtcccaagagaagtgatatctgaattcaagatcaacggctacacgattcaaccgaagacaaggcttcatgtcaacgtatgggctatcggacgtgatcccgagatatggaaagatccagaagagtttctcccagagaggtttatggactgtgacattgatgttaaaggacaagactatgagttgttaccatttggaagtggtcgaagaatttgtccagcagtgtacatggggataacaacagttgagtttggtcttgctaatctcttgtatcactttgattggaagttaccagnnnnnnnnnnnnnnnnnnntatttacatggatgaagctttctgactcacttctcataagaaacatgaccttttacttg

SEQ ID NO: 165707 - DNA, 875 bp, Arabidopsis thaliana landsberg
aattccgtcaagtcattataatgaaaatatttcactgtgatggcttatttttatgcaccatcctaaaagacactagaatcgtggtttggaatccgtgtactggtcaaaagaagtggatccaaaccggcgaaaatctcgacgaaaacggtcaagactttgttcttggatattaccaagacaataaatcaagcgataagagctacaagatattgagctacaagggttataattatggcgaccaagaattcaaaatctatgacataaaatctaatacatggaggaatcttgatgtcactccgattccaggcaactacttcacttgttctgattaccgtgtgtctttgaagggaaatacttactggtttgcttatgatttgaaagacgagcagttagggttaatcagttttgattataccacagagagatttgaacgtctatggcttccctttcagtgtgatatttctgatcatgattattctctatcagttgttggagaagaaaaactttcggtggtattacagcttaaggatgcaccaagaagagagatatggataacaaataagatggatgatgagaccaaagagatgtcgtggagaaagcttttcgaagtggaagtcggtactagatattatatgtggagcggtagacctttcttggtcgacgaggaaaagaagattgtcgtgtgttgtgagaaatgccaaaaaaaatgccaaccggttataacagtatccatggttgaggcggatagtaatgccacacgagtgtattttccagtagtgacaatgacttcatattggccacattttgttgattatgttccaagtttgattcaaatccaacaatcggaggcaaacgaaaaagagctgaatagttag

SEQ ID NO: 165708 - DNA, 1815 bp, Arabidopsis thaliana landsberg
acatgtgaaattttttgagtaaacgaaaacatatgttacatttgttgggtaagggtagttcgtcctttaaggataacaaattattaggcggcttaatttagagcccaggagtgtaaaaattgtaatctcaccgactctcattaatttaatcacaaaataaaatcaatttccctatgaagaaaaggaaaacctgaataccttcgttccttgactacaaagctaacctttttctctttcgctagaactcgagtttccttctaggttttataatttccggttctgtatcttcaagagacttgatcaagatgatgaaatctgatgatcgtagtttttccaagcagagatgtttgacgagattacgtgaaattcttcagaaaccccaaacctttggtcgctttgaggtggaacaaatttcgagacgtcagtgggatgtgcacaaagagtacggtactaatgaagacaaaagctttaaacagttgtatccgcccgtcatgtcgttagagtacgagactaagaaagacaaatcgaaaaagaaggaacctagggttaactcagggcgggttaatatgcaggagttgatgtacgaagttgtcgcagagttgccgcttgacagcctcttagaacgtagatcaattacttccgtactagaaaaccctaatccggattcagagtcgtctatgtcatcttgtgtcagtcagtccaagaaaaaacgttgttctgttaaggtggaagagagacgtcccaagaaatgcaaagtcgttagtcctttagaggtgcaaccaattcaaacgactccacccgattggcttttgaacgttatgaggaacgagaatggctacaatccgaagctgatctcaacgagggaattgtttaagtctgatctcgataaaggtaaagcacgtctccaagtcccttctaaccaagtgaaaactccggactttttgacagaggacgagacaagaatcatacatgaaaatgccatgaagattcgtgacgatggtgtgcctgtgaatttggtggatcctcgcttgagttgaggaagtggaagatgaagggaaactggaattatgtctttgttaaaggttggaacgatgtgcttgatgctaacaagtcgaattcgtttaaggaaaaagacgtctttcctctctggtctttccgatctggaacaggcaaactctgttttgctctcaccccaaaaattccagcaacggctctacttcaggagaatctggcagtggcggcgatggtgcttctacttgaggtgaatctggtcaggtaccgttacccattccttcggcaatagattctagccactctggccaaggctgttcaggagagagcagctctagttcttcctaatcataactctgcttattgcttaagccacaagtaaaacggatttagttttcaggcaaatctggcttggttttctttcttttttttgttcagttgatgaaatagtggggttttgtccaaattgtgagacccatgatatgatgttttgatttgagtttctttctttatgtttgatttttttttatctctctctgatgctgcctatgtttacttatgattagcattgaaaatgcagaacaaaggagagagaacttgttttcttatattatcacaaaaagatccatcaggctacaacaacacacaacaagtgtaaagtttcttggctctactaaaaactcaaaagtcaaagttggatcaatcatcaccataggccttgaaacaataccgctcaatataaggagcgttaaagaaaagatcagcttccaaccatttcggataccgaacaagatctccagctaa

SEQ ID NO: 165709 - DNA, 1251 bp, Arabidopsis thaliana landsberg
agtattgtgtttaaagggcagaatctacttaatatggaaccagaggatagatctcttgccggtctctttatgagtttccagtccccagttgagatccctggtgttagcaatatggatttcttgaatatggcattcaatgctcggaaaagaaagcttggtcagccagagcttgatccaatccaggtgccttatcgaattaaatgacttggatttggtttgcactgtttcttacttgttgttgtttgctaaatggtcccaattgtagaactgtctatgtattatgtcttactgatatcacatggctcatgcagttctacagccacttggtatcaaaactcgaagttgtgaatatgaagaccgattttctcaacagaaatgtcaatgaaggatttagtggtggtgaaaggaaacgcaatgagattctacagttagcggtaatggttctgcttcccttgtttctcagtatccataaggactgcatatgataagaaacaaatgtgattagagaaggtagtggattactaagcttgttccatgctacagtgtgcaaaaccacaaggctaatagttaggaatttcaggatatctgggtagattagcttaagcagttacaggttttaccataagtagacgcggttattgcatggcagttagtattctattacaagtatttgactgcagttttagctaaaaagacatggcatgttatatgtcttcatatctctttatattttcctgatcttgaaatatctgcctcccaaggagtggtcatttctggtttatcgataacatgagaacactattagtctcctattctttgtaagcaatatatggaaagaggtcatggaagtacgctaatgcaacgttttcctgtccttgcaggtccttggagctgagttggctatactggacgagattgattcagggttggatgttgatgctcttcaagatgtggcaaaggcggtgaacgggcttttgacaccaaaaaactctgttctgatgataacgcactaccaacgcctacttgactacatcaaaccaactctcatacatatcatggtgagcattgttgccaaaccagccttctttactggctacacaatgatcatatatattttggtaagctcatgtatgtttccttgggtttcaggagaatgggagaatcattaaaaccggagacaactccttggccaaactactggaaaaggaaggctacaaagcgatatccggttagttatcgcggatcatacat

SEQ ID NO: 165710 - DNA, 829 bp, Arabidopsis thaliana landsberg
cttcgtttgcaatactagctgtgatggtctgatattcctcttcagtttctatgaactgccgagtatgggcgtcggtcccaccactcgatggcatcgaactttccctaaatgcaactatcaactagtcgctgccgacaagggtgagagacacgagtgctttaaagtcgcatgccctactcctggatttggcaaagacaaaatcagtggcacttacaagccagtttggttatataattccgctgagttagacctaaatgacaagcctactacttgtgaagttttcgattttgccaccaacgcttggaggtacgttttccccgcgtcccctcatctgattcttcacacccaagatcctgtttatgtagacgggtcacttcattggttcactgccttgtcacacgagggcgaaaccatggttttgtctttggatcttcactccgaaacgttccaagtcatctctaaagctccctttctcaatgtctctgatgaatattatatcgtcatgtgcaacctcggtgatcgtttgtgcgtatccgagcaaaagtggcccaaccaagtcatatggtcgttggatgattcagaccacaagacatggaagcaaatatattccatagacctcattatcacctcttctttgttctttagtgccatattcgcattcaccccactagcagttttggacaaggacaagttattgttttatgatagtacacacggggatgcattcctaacacatgatccagataccaaatcttatgatttgccttacacatctaatcgctgtgcaactgttgtttgttatttcccgagtttaatttctattttgtag

SEQ ID NO: 165711 - DNA, 847 bp, Arabidopsis thaliana landsberg
attaccgaattttgatctactgatttatccgaattccgaagtaagtttacaaaaactttattttacaggatattaaatgctaagggtgatacatactccctccgtttcattataagttgttttcaaatttctatgtaaattatatattattttaatattttacgattatttctattatccagtttctttattgactgaactttttaaaagtaaatattcttaatttgcatgtttttagctaaaacaacttatattgtgaaacggagggagtatcaaactaacataatacatcgctggatctcggtctatgtcccaaattgaacacaaacccctaggtgattttctaacaaaatcaaaacaaagagaaattaatttcacatagcctccatgaacagaaaatgactcaagcttccaattcgaaggcaatctgaaatccaaacgaaagccattgttgaagatgagagattggaaactgaaattgaagacgaaggagatgaatcatctcacgattcttgtgtaaacgaagatgattgcccagttattgttgaagataacagaggatatatagaggtagagatagatccagctgaaaaagaaagattttgggcttgatgctagtgtagatgcaactagtattgactctgacagcaacggggatgatatttgggacgacaagaagataccagatccattatcattatcagatgatgaagaagagaaagttgaaagaccattcacttttagagagagttgtgatgatctattagcattgcataagacattcaacaatgcagatgaaatcaagaatgcactattgaggtattcacttaaaactcaatacgatatc

SEQ ID NO: 165712 - DNA, 1266 bp, Arabidopsis thaliana landsberg
atgaatctgttggccctcgtcgttggatttggaatcatgggtattgttgtggtagatgggctaggtgtgaactggggaacaatggctacacacaagctaccaccaaagaaagtagttcaaatgcttaaggacaataacattaacaaagttaagatttttgatgcggatgagaccacaatgagtgcacttactggctctggtcttgaagttatggttgcaattcctaatgatcagcttaaggttatgggaagttatgaccgagctaaagattgggttcataagaatgtcactcgttataacttcaatggtggtgttaatatcacgttagtgagtttctccctctgcttattatagattggttctaatgttgtctgaaaatgttaaacatgtttaaagaaaatttgtgtgttttatgtaatagtggaggtaatgtcctgttgatgtgttttcaggtttgtagcagttgggaatgagccattcctcaaatcatacaatggatctttcataaacctcacattccctgcacttgcgaacattcaaaacgctttaaatgaagccggactaggaaactctgtcaaagcaacagtccctttaaacgcggatgtatacgattcaccagcaagcaatcccgttccatctgcaggaagattccgtcccgatatcatcggtcaaatgactcagattgttgactttcttggcaagaacaatgctcccatcacaattaacatctaccctttcttaagtctctatgggaatgatgatttcccactcaactacgccttcttcgatggtgctgaaccgataaacgacaacggtattgattatacaaacgttttcgatgccaatttcgatactttggtgtcgtctttgaaagctgttggtcacggagatatgccaataatcgttggagaagttggttggccaacagagggtgacaaacacgctaatgcaggttgatatctgaccttctttagatggatttttatcctttatgaagtgttttagttttgattttgaaaacggttttttcacaggcagtgcttacagattctacaacgggcttttaccgaggcttggaacaaacaaaggcactccattgagaccaacctacattgaggtatacttgttcggattactcgacgaggatgcaaaaagtatagcaccgggaccgttcgaacgccattggggaatatttaaattcgacgggcaaccaaagtttcctatagatctttcaggtcaaggacagagtaagttcttgattggtgc

SEQ ID NO: 165713 - DNA, 533 bp, Arabidopsis thaliana landsberg
  unsure (1)..(533): unsure at all n locations
tctcctgcgaaaccccgctgggtcgtgatccaggtcgtgcagccgctgctctacntgatcctctcgccccgctgctgaagtcgatcgcggccatgcccggcttcccgcccggcggggcctacaacgtcttgtcaccgggctcctggtccagctcggcctcttcagcgcctccagcgtcggcttcggcctgatctcggacctgcgccacggcatcgtcgagcggatgcgggtcacgccgctcagccggctgtcgatgctgctcggcagggccgcccgggatgtcgtcaccctgctcatccaggccctgatcatcgtcctctgctcgctgcccctcgggctcagcctgcatccactcggcgtnnnnnnnnnnnnnnnnnnnnnnnnnnnnnnnnnnnnnnnnnnnnnnnnnnnntcctacgccctggcgctgcgcctgaagagcgaggacgcctacgcgccgctggtcttcacggccacactgcccctgacctgctctccggcgtcctcctgccgatgacgctgcgccggccggc

SEQ ID NO: 165714 - DNA, 1843 bp, Arabidopsis thaliana landsberg
gtttctagaaactatatgcgcctttatatttgtggagagcttgtaggagagcaagtcataacttccttgatgaccaatggtacaaattcagatcgcgcacgaaagatatcgttatttagtgttggtgaagatggttatagtgttcagggtttcatccacagtgcagaagttttgccttctaatctctctgcaagttatcactacacaaaggtagtttcttgtctttgccttctcttctttttcaacaaaagactcttgtcctgtgtttctttatttcgcttcatttcttttccaggacccacctttatggttatctgttgataagccatctacatctggaattgaattggatgaagatggtgtttggagtgtcgttagtggaacattttgttccttggatgttgttttaaccaatgctattggacagcctgtgcacaaggatgtgaaggttcatactcttatgctttctataaatttctgcatttgtttagctcaggaagtatttctgatagcgcgttatcgatttgatgttgcaggttgtggcttctctactgtatgctgatagtgggacgcatgttgagaagaggagtgactttgaggcattccttttagtaagctatgaaggcattgaattatctgctgaagataagccgtgcaacttattgaacggatgtgcttctttcaagttcaaattatctcaggtggtgattataaatctaggccatcggaatgggatttcacattcttgttagaatttttttgtctatgctaaaaggcattgaaggatccttgttttcttttgttttgtagctttcttccaagagtgataagaggttgttctgcatcaaattcgaaataccagaagtgaaggccgattatcctttcctcgaaactgtcaccaaccaaatccgttgcatttcgagaaaccgtgattctgtttcctctatgaaacggatcagattaggagaagaaaaggtttctgagagtaaggtggataatccaatttctctgagttacgttttgttttgctttgtatccatatcccacttactgttattctgcattgttgttgctctcgagttagattgtgaatggaaatggtacgagtatggaatggaggcctcagaaccacgaagaagataactcttcaactgattccgaaaacactgaaatgagagactcgactgctttcaggagatattcaatcccagactggattattttcaaatactgccttggaaacttaacagagagagctcttcttctgaaggaaatcacaaacaattcatcagacgaagaagtctcggaatttgcagatcaagtttctctctattccggatgctcccaccacgggtaaagaaatcaaattaaactcacacctgcctcaaataaaatagaacactaatcttccaaattttccagctatcaaatcaaaatggcaagaaaactgatagcagaaggaacaaatgcgtggaatctgatctctcggaactatcgacatgttcattgggacaatgtggtaattgagattgaagaacatttcatgagaatagctaaatgcagcagtagatctctcactcaccaggtcttgtctctttctcttctcatattgcttgaactttcaccaagatcaaagtcttgatcttttgtatttgtgattctgacatgaaattgtaatcaggattttgaccttctaagaaggatatgtggatgctatgaatacataactcaagagaattttgagacaatgtggtgttggttgttccctgttgcttcggctgtatcaagggggttgattaatggaatgtggcgctctgcttcgcctaaatggataccagggttt

SEQ ID NO: 165715 - DNA, 1434 bp, Arabidopsis thaliana landsberg
gaaacgaccatgctttgcagccagtatctcccacaagctacgacagctcactcgaggtattcacattcagtccaaactctttttttgctttccgaataaccgattaaatagctggtcgcaaagaatgaattttagtttgtatctcacttcttgggattgatattgagatggatcattcttcaggtggctccatataatgcagcagtttctccgggaagttcgttggagttccgtggaagaagacgtgctggtgagcctaacaacaatctcaagacatcaaccgaacttcttaaagtgctgaaccgaatctggagcctcgaggagcagcattccgctaatatctccttaataaaatctttaaaaaccgagcttgctcactcacgtgcccggatcaaagagcttctcagatgcaagcaagccgataaacgcgatatggatgatttcgttaagcaactcgcaaaagaaaagctgtcaaaagatacgaaggaacacgatcggttaagctctgcggttcaatcattagaagatgagcggaaactaaggaaacgttctgagagtttgtataggaaattggcacaagagctctcggaagtgaagtcgacgttgtctaactgcattaaggagatggaaagagggactaagtcaaagaaaattatggagagtttatgtgatgagtttgcaaaagggatcaagagttacgaaagggagattcatggtttaaagcagaagttggataagaactggaaaggttgggatgaacaagatcagatggttctatgtattgcggaatcatggcttgatgaaaggattcagagtggcaacggatcggctttggagaagctcgagtttgagatagaaacatttcttaagactaagcagaacgcagactctaatgaaatagcgagaaatcgccgtacttcacttgagtcggttccatttaacgccatgagcgccccgatttgggaagtagaccgtgaggaggaggaggattctggcggaagcggttcgaattgttttgagctcaagaaacatgggagtgatgttgcaaagccaccacttggcgatgaaactgagaaagcggaactaacaaaagttggtgttagtgaaagaccacaaagacggagtcaaagcccgtcgagtttacaagtgaagttcgaggatcaaatggcgtgggcgatgtcttttaatgagaaaaagaaaactagagccaatgaaatggagcctgaaacggataaatgtggtaaagaaccgcacaatgtggttcgaccaatgatcagcacacatcggaggccattgtcagcgggtggggagattgatgaagattattgcagttatccatcaagaagacgagagagcccgattcgtcaatggaatacaaaaaccgtaagacctgatcttggtgcgccacgaggagtaaaccactccacactttga

SEQ ID NO: 165716 - DNA, 1870 bp, Arabidopsis thaliana landsberg
tatctttgtcctgattggtgcatcggcaagcgacacaaccgtgtgtcaagctttgtgcagatcagttgatgtggagatccaaaggagtgataagtagagatcgttttcaattggtgttcttgagttatccgcgggataactttgtcgattattgtggtgtttacgttcaagacaatgttaattgggctcttgggtttgggatcccttgtttgttcatggtcatggcccttgctctcttcttgtttggaagaaaaacttatagatatccaagaggagatcgcgaggagaagaataacgcttttgcgaggatcggtagagttttcttggtggcgttcaagaatcggaaactgaagttaacacattcaggtcagttggaagatggttcgtccaagaaatgtaaaggacaacttgagtaagttccaaagtcttgaatcttttgagttttggtttattgtgacttgagtataaagttttctttattttgactaaggttcctagcaaaagcgttgctaccaggagaaggaggtctagagccatgtagtagtagggacgtggaagacgcgatggctttggttaggcttattccgatatggatcacatcagtagtgagcacgattccttacgctcaatatgctactttcttcacaaaacaaggcgttacagtggacagaaaaattttgccaggtttcgagatccctccggcttcttttcaagcactcatcggtttatcgattttcatctcagttccaacttatgagcgtgttttccttccgttagctagattgattaccaaaaagccttcagggatcacaatgctacagagaataggagctggaatggtgctatccagcttaaatatggtggttgcagcgttagtagaaatgaaacggctcgagacggctaaagaacatgggcttgtggatagaccggacgcaaccatcccaatgtccatatggtggttcgttcctcagtatttactacttgggatgatcgatgtattctcactagtggggacacaagaattcttctacgaccaagtccccacggagctaaggagtattggtcttgcactttctttgagtgcgatgggtcttgcgagcttcttgagcggttttctaatcactgtgattaattgggctaccgggaaaaatggcggcgatagctggttcaatactaacctgaacagagcccatgtcgattatttttactggttgcttgctgctttcactgccattgggttcttggcgtttttgttattatccaggctgtatgtgtatcgccgtgtagatcaagtctaagaaaaaaaaagtcaacgtgtatctactttcatatcatatttggttattcataacgtggttagaaactctttaacctattttttattcaacaattttagtttattaagatgaaatctctggaagttagcttggaacacagctggataatatacacgataaggaaaagactatacaccaaacatgaaaaaatatacatttactggtgttgagccatgtaatggtagggacgtggaagatgcgatggatttggtaaggcttattccgatatggatcacatacgtggtgagcacgattccgtacgctcagtacataactttcttcacgaagcaaggggtcacggtggacagaagaatcttaccgggagtagaaattccagcggcttctttattgtcattcgttggtgtatctattctcatctcagtgcccatatatgagcgtgtatttctcccgatagctaggaagattaccaaaaagccttttgggatcacaatgctccaaaggataggagctggaatggtgctttcagtcttcaatatgatgctcgctgcattagtagaatcaaaacggctaaa

SEQ ID NO: 165717 - DNA, 1699 bp, Arabidopsis thaliana landsberg
gtttactcgtgacacatcttcgaggctggttcgaaagattactagagtatggacaaaaaaatttgatggtgtcttctatagctggtcatgtgttccacgggatcgaagagaaagatacttcctcgagtttgcggtatagtttttttctcttgcattcacttaaatgtttagctggtaattatcttcactaacatgtttttgttatttgtagaaaacacaccattgggatcctttgattacaggaaaagttcagtactattttgaagatatatgtcaaaaacggatgaaatatatgactagcactgtgaggactagtcgagagtgtcctaaatggatcatcgattcccatatctgggaaacgatgtgtgcatactgggatactaaagaagcaattgcaaagagtctgacatattccaaggctcgcatgtctgaccgtaatgggctcggtcctcacatccatttattagggccaacgtcctatcaacaaatccaatgagcaatggtaaataacttcttcttctctctgttatttgtttacatagtccattgcaagtttagatgttgtcttagtccttgttcatttttaacattgcaggaagaggaattaggaaggacagtgggtattggtgaggtctttgtcaagacgcataccaaaccagatggcacttatgtcaataagaaggctgagaagattgcaaagaactatgagcagaaattgtaggagaaagtctctgaaatggaggcagagacttcaaatggttcagacggggaatcacgacctcgggagctcacagcagatgactgtactctcatcttcctacaggtaaagtttacattttcataattatggtctgcatattcttatgctctttagtaattgtttgtctctttcttttcacagtccacaaagacagataatcgaggaaattattatggagtgggcagtcttaaggagcatcttccggatttagtcacaggaaaacgcaaacacttaggagaatcttcttctttcgtggcattgcaagtgcaactgaaggaagctcaacaaaaaattgaagagcaagctgctcataatgcaaaacgtgaggaagagcaaaccaaggctgtagctgagcagaaggacaagttggcacacttgtccttggttgagaagtatttgcgccaaactgatccatcatttctcacacttcatcgagtctcattcacctgaatcaactacaaagcctatctcatctccaactacatcttaagttacttctccctctttaaaactagcatgaacttgtagtcttttgctaatttagtgtaagttgaattgtgtttttgagaatttagtgtttgaatcttgtattttggttacaatattaatgaatttggtattttggttagaatcatgagtttggttttgaaatttagataagaatagttgtgaatgcattacaggattaagcaatgtaaattagaaatacaaatgacatttttttcttttgtctgaaaccatagtcgttactcagtcacatattagtcggtaattagtcgcagactatccctacaataatcgaaagttcatacagtttaatcgtaactttgtcgtaacatagtcttaacatatagcgactattttacgagtcgtaaattggcgactaaaaattacgactattgcgttcagcgactgtggatttgcgacaacagtgattag

SEQ ID NO: 165718 - DNA, 717 bp, Arabidopsis thaliana landsberg
gccgcgaggaaaggtaagcacaaggaggaggaaagcgtagtggtttaagatttcgtgtcgacgtcggtgaagccgggaaaggggagaggcgtgagacagagaccttggggaaaattcgcggcggagattagagatccgtcgagccgtactcggatttggcttgggacttttgtcacggcggaggaagctgctatagcgtacgatagagccgcgattcatctcaaaggacctaaagcgctcacgaatttcctaactccgccgacgccaacgccggttatcgatctccaaacggtttccgcctgcgattacggtagagattctcggcagagccttcattcaccgacctctgttctaagattcaacgtcaacgaggaaacagagcatgagattgaagcgatcgagctatctccggagagaaagtcgacggttataaaagaagaagaagaatcgtcggcgggtttggtgttcccggatccgtatctgttaccggatttatctctcgccggcgaatgtttttgggataccgaaattgcccctgaccttttgtttctcgatgaagaaaccaaaatccaatcaacgttgttaccaaacacagaggtttcgaaacaaggagaaaacgaaactgaagatttcgagtttggtttgattgatgatttcgagtcttctccatgggatgtggatcatttcttcgaccatcatcatcactctttcgattaa

SEQ ID NO: 165719 - DNA, 875 bp, Arabidopsis thaliana landsberg
tcttacattagatgaccgaactgacagacgagtacaagaaaccatgccatggatactttggccagcaccctatggtgccactgtacgagagcatggggattgatgattctgatattgcagagaaagcagacgcctttacagaaaaactatggcctcaaggcaacatcagtttcacgtcagaagactgtctctacttatatcgtatagatagacgtatattgatcagacagttctattactaccagcacaacaaagcagtcgtgttctaagaaggtatcagagctagacataactatcaaaggaatgatcatggagagcttgggactcgataaatacatcgatgaacatttttacttaacgaattacctgatgccagtcatgaagggcaaaagacctgatacctaggaaacaaaagtggggctaaacgctcatactgatataaacagagtcactgtactttaccagaaccatgttgagggtctagaggtgcagaccaaagacaagaactggatcaaagtgaagccgacacaagactctttcaccgtcatgattggagattctctctatgtaagccatttgtttatacttccttcaaatacagaatcaattcctgaaaaagcaagatcaacccaaatgttttgatgtcacaggcattgctaaatggtcgactacactctccttatcgccgtgtcatgatgacgggaacagagacaagatactccctcggattattctcgataccaaaagcaggacacattgtgagttcaccagatgaactcgttgacgaagagcatcctcgactaattaagccctttgaccatgtcgaattccttcaattctactacacagaagctggacaaagataacaatctact

SEQ ID NO: 165720 - DNA, 2531 bp, Arabidopsis thaliana landsberg
acggattgcaacgatcccggttactggttggtcactctgatacttaaaagagtaacatttttatccatgttcgttggttgcattcgttaaacaaacaagttgtgattattatcgaccattgtcgaaggaaaaataagcattcattatttatactaggaattaaatatttgccgtctaaactcaaataataaaaattgggagaccgaacagattatagaatatttgtgttaatgcttacgtgatttatttattttagtcgatgcttatgtgatcactgatcattatgaatacaaaaaaatagaagctactttaatataataaaactaagttgaccaaaataataataataattagcgtttccaaagcttgtaataaattacaccaaaaagcgtctaattctttttttcgtctctcagtcttttgcaatctcacattataaaaccacttgtttcaaattactctcaaaaacattataatccgttacatattgacccgacccgaaatggaggcccaataccggaaccacgacggagacacctctttctctagcctccgtgtctacctcaactctctctccgacactccctcccgtttttcccgccgagccgtttccgtttccacctcttacgacgagatgagccgcgtccgcgccgtctccggcgagcagatgcgtcgtactctccgttggtacgatctcatcggactcggaatcggtggaatgatcggagccggagtcttcgtcaccaccggccgtgctagtcgtctctacgctggtccatcaatcgtcgtctcttacgcaatcgccggactctgtgctctactctccgccttctgttacaccgagttcgccgttcacctccccgtcgccggcggtgctttcagctacatccgtatcacattcggtcagtaacattctcccgccaaaatcaaaactcccaaatcgcagagaaattcaaatttcattttttcctctccgatcattcatttttttccgttacaggcgagtttccggcgtttataaccggagcaaatctgataatggactacgtactgtcaaacgccgccgtttcaagaggattcaccgcttatctcggatctgcattcggaatctcaccatcggagtggagattcatcgtctcccgtctcccaaacggattcaacgaaatcgatcccatcgccgttatcgtcgtcctcgccgtcacgttcgtcatctgttacagtacgagagagagttcgaaggtgaatatggtattatcggcgttacacattgcatttatagtattcgtgatcgtcatgggtttctcgaaaggagacgtaaagaatttaacccgacccgataacccggaaaacccatccggattcttcccgtttggagtttcgggtgtgtttaacggagcagcaatggtttatctaagttacataggatacgacgccgtttcgacaatggctgaagaagtaaaagacccagtcaaagacataccaatgggaatctctggctcagtcgcaatcgtcattgtactttactgtttaatggctatctctatgtcaatgcttctcccgtacgatctggtccgtaccatcaaatacacatttttaatttaagcttttttctatgggttttgtgggtgaatgatttggtgtggttgtgtgtacgtaagcagatagatgcggaggcaccgtattcggcggcgtttagtaaatcggaaggatgggaatgggtgacgagagtggttgggattggagcaagtttcgggatattaacgtcgttgatagtagccatgttgggtcaggctcggtacatgttgcttcatcggacggtcaagagttgtccccatttggtttgctaaggttcatcccaagacatctactccagtcaacgcttccgcttttcttggtaactttttgtccttactctcaaacatatttattttcattctattaaaattaacatctttgatcaaatataataagttaaatattatttatttttaaggttatgttggaattttcctttcgtaaagatcggttttatgttttttctctgttttattttcatcaagtgataaagagacagtttgatagtggggacatccattttgggtttttgtttgtttgtttgtttccatgatctttttggatttcattgtattgttgatcttacttttcacgtgattttacatacatatactcgtagggaaggagaaatcacgaaaatcgaattttgttgtttactatttaaaacataaaatttctccaactgatcttgtttgggattgtggatcgtagctgtgtgactgtgtgatctatattaatgtaagccatagtcttttgttcttatatgattcttggtgatgggtcttaatttagagcatcgtgtacgataaaaatctcgtggtcgtgttcaccaaatggcttcaatcttttcaacggttttgtttgggacatattgttgagtctctttggtccttttttgttttttagtttatgtattcaagcatttttctctatttcaagctctcaaattttcaact

SEQ ID NO: 165721 - DNA, 530 bp, Arabidopsis thaliana landsberg
  unsure (1)..(530): unsure at all n locations
attacaatgattaaattttcaagcaaaactatcaatttcctttttaggtctgatagttggattttatctgaattttggtacttgaactctggaatttacacatgaatgtacttcctccggctttacagactctaatcgaggacctcggttcactacctggggtcggtccgcgcacggcagaacgctacgcatattttttactaaaagcagacaagaatattgctgatcggttgagcgcaagtgtctcaaaaattcatgacagcataggttactgcaaaaagacctttgccatagtggcaaaaggcaaggaattgtcagatctatatacggatccatcccgcgacaagcatctagtggctgtagttggcgaaccatttgatattgttgcccttgaaaaaacaggccaatatcgtggcacttatcacgtccttggtgggttggtttcaccgatagacggcgtanggcccgagcagctccacatcgcagaactaatgactcgtattcatgaagataggtcaaagagataatcc

SEQ ID NO: 165722 - DNA, 872 bp, Arabidopsis thaliana landsberg
  unsure (1)..(872): unsure at all n locations
caagatatggaaaagatcaattctgatgacttgctggtgaagattttatcatttcttccaacaaaagttgctgtgaccactagcattttgtctaaacgatgggagtctctttggaagtgggtgcctaaacttgagtgcgattgtactgagcctgcacttcgggattttattctcaagaatctgccgttacaagctcggatcatagaaagcttgtacctcannnnnnnnnnnnnnnnnnnnnngtttcaggatatcaaactctggggtggaattgcaatttctcactgcttgcgtgagctacgtatcgactttttttctcactatgccaatccatatgttatattgcccagaagcttgtatacctgcaaatctctggtgaccttgaaactcctaggcttgggtattcgtgtggatgttcctcgagatgtttgtctcccttctttaaaaactttgctacttcaatgtgtggcatactcagaagaagatcctcttcgactgcttctttcctgttgccctgttcttgaagatctggttattgaactagatgatgcaaaccaaaatgtgaaagcgctagttgttattgtcccaactttgcagtgtctatccttgaagatacctgcttcatgttctgatgaacggtatttgattgttaccccttctttgaagtatttcaaagttgaggatgacagagaaattttcaatgctttgattgagaatatgccagagctggaagaagcggatatctatgttacgcaacatattgagacgcttctcgaatcagttacatctgtcaaacgacttacactacngccattgtacaacagcatagatgaggtaatttgtttctgtctatcaactntaagctctcaatc

SEQ ID NO: 165723 - DNA, 5115 bp, Arabidopsis thaliana landsberg
  unsure (1)..(5115): unsure at all n locations
agtttacccaaaatctgtgtggcaacgatcttgcagaatctcacatctaaagaaaagaaagatgaaatcttaagaatgaaagaagctgaactccatgaagaactttttcaattgttggaaacatcgaaaccattaattgtctttgatgacatatggaaagaagaagattgggacctaataaagccaatttttccacccaaaaaaggttggaaacaactcttcttgattacgttttttgtgtttagttattttgaaacaactaagtttttactacaggttggaaggtgcttcttacttctcgaaatgagagtgtcgcagtacttggggatacaaaatatctcaactttaaaccagaatgcctagccattgaggatagttggacacttttccaaagaatagcatttccaaataaagatgcatctggtaagcattccatgacacagttgttttaacccttagtacctcattttgatatctctttattgcatgaagttgacatgtattttatttttatatggcctgatttaaataatttagtgataatgttatgcagaatctaaggttgacgaggaaatggaagatatgggtaagcaaatgttaaaacattgtggagggctaccattagccatcaaagtgttaggaggtttgttagctgcaaagtacacaatgcatgattgggaaagactatctataaatataggatctcatatcgtgggaagaaccagcagtaacaacagttcaatataccatgtattgtctatgagctttgaggagttgcctagttatttgaaacattgcttcctctacctggcccattttccagaagatcataagattaacgtggagaaattgtcttattgttgggctgcagaaggaatatccannnnnnnnnnnnnnnnnnnnnnagagaccattcaagatgttggacagagctacctagaggagttagtgaggaggaatatgataatttgggaaagagatgctactgcttctagatttgaaacttgtcatttgcatgacatgatgagagaagtttgtttgtttaaagccaaggaagaaaacttcctagaaattgctgtaaaaagtgtaggtataaccagctcctcgaccggaaactctcaatctccttgtagatctcgcaggcttgtttaccaatgtccaactacattacatgttgagagagatataaacaatccaaaacttagatctctcgtggttctctggcatgatttatgggtagaaaattggaagctattaggtacaagctttacaaggttaaaacttctcagagtgttagatctcttttatgtagattttgaaggaatgaagctaccttctggcattggaaaccttatccacttacgatacttgagcttacaagatgctaaggtatctcatctaccttcttctctaggaaacctaatgttactgatctatctaaatttagatgtcgatacggaatttatattcgtgccggatgtcttcatgaggatgcatgaattgagataccttaaactaccgttacatatgcacaagaagacaaggttgagtttgagaaatctagtaaagttggagaccttggtttatttctcaacatggcatagtagctcaaaggatctatgtggtatgaccagattgatgactcttgctatcagattaactcgtgtgacgagtacagaaactctatcggcatcaataagtggactgagaaaccttgaatatctttatattgtgggtactcactctaaaaaaatgagagaagagggtattgtactggatttcattcatctcaaacatctattgttggatttatatatgccaaggcaacaacacttcccttctcgactaacactcgtaaagctaagtgagtgtggcttggaggaggatccaatgcctattctagagaagctgcttcacttgaaaggtgttattttattgaaaggctcttactgtgggaggaggatggtttgctcgggtggcgggtttcctcagttgaagaagcttgaaatagttacgttggactaaataagtgggaagagtggatagtaaaagaaggctccatgccacttcttgaaactctccgtatttgggaatgcgcaaattaaagcagcttggtgatgaacactttccttctcgccttacttccatatctctagggtcttgttgtttggagaaggatcctattccgactctagagagattggttcacttgaaagagcttgaattctataaatctttcggtgggaggataatggtttgcacgggcggtgggtttcctcaattgcacaagctaaaattatctgagctagatgggttggaagagtggatagttgaggatggctccatgccactgcttcatactctagaaattcgttggtgtccaaagttaaagaagcttcctaatgggtttccacaattgcagaatcttaacttatatatgctaacggaatgggaagagtggatagtagaagaaggctccatgccccgtcttcatactctgactatatggaattgtcaaaaattaaagcagcttcctgatgggttgcgattcatctattcattaaagaagttgattatatcaaagagatggaaggagagactgtcgcaaggatgggaagcttcaacgtagtccaaggcattccttctgttgaattcgacgactagccctgctctcagcactcacagactactatgtatctatatatgtagatatatatgtacacataaagagctgcattgatggtgttcgatgaattgtctaactgtgactatccttgacgagatatgtaatcataagcctctgtttccacccaaaatcaggtaatctcatgatcattgcctttaaaaatttcaaagaaaagcttatcaaacaagagacctgaataatcatgttctttctgcttagaatcaccaaacaagaacattttgcaggtcggaagatagttgcaggtaggaagctaatcaaacaagacaccttattcttcacgacgagatgttgaacctgaagaatgttggacaccattttgatggataaaacattttcataggagaaatgatgtgagtaagctttcagatcattatgataatcttctcctcctatagtcatttctctcgttactcttacaaagtcctatgtagtatcttcagttcaaggtctatttctttcatataaaactatattatgtaatgttcataacctgaatgttagtagtaataccttgtgattagaaatggttaagagatgacatagtgacttactcaactctcataatcttatttctgaagtcaagaactctagcttgcaaagttgcaaaatttgtttagctcatactgtaccttttactgtagttgtagatgatcttggtttcttactaaaaactttgttgaaatttcatatactttccttacatgcagagagtccaggggaaaagttgtttagcttttcaagccttgccgtgtgcatggacaaatttcttattcactatctgtttttgtgtgtagtaagaatctgaattttatgggtgaatttgtacgggtaaacagagaagttcatatcctatgctgagactaatgtctgctaaattcggacacaatgtcaaattctcaagctcatcgttaaagcaacagagagaatttgattgactttttttcattattctgttttgtagacgaggttgaagctaccttatcaaaatgtcttcccaagtgaatcttggtcatctgcctatttatacatatattaaactcttttcattgttgtcttgatgtgtgtgtgtgtgttgtataatcgatcatactttatgatttatgttgaagtatcatgacagaagaacaaaaatatttatatcaacattggttatatgtttgctggtttgactgatgatgatatgtcgatctcaactctcattttgctggatcattcctaattcatagcttatggttgaggcaggttatgggagtgctgcggcgaagctcccgttccttgagccggaagttaaaaaggcgaaaagctacagaacccttttggaagcggtgttgcctatctttaagagcgtcggaggtgatataactgggagactcttgatgagatgttggcctatctggaatacttcccagttgcgagaccaacggagctgaacaccgtcaacaacgcacctacaacccatctcaagagcttggacacgagggagaaggttggtgcctggatcaaacagtggtgcatccaaaacgcaagccatgtagctttttgttttgggttctacatggccattgcgaagaagggtgaccagttaccctaaagacgtcctgcgctttgagggaactcagaagacaatttgaactttttttctttagcactcatagaagaagagcaaagagaccaaacggataatatgaagtcttctttaccatacttaagtgatgttggtagtgttgtatttgtcattattggcacaagagctgatcttgcttggtttgtgggagtgacatgttgtcccatgatatgttgtctattagcttcagtatatgttgctaaaccattacaaaagtttttcaataataacttcgtgtaccatatttgaaagtttaacattgattgcaatcttgtttgtttttctcttttgtggtatatgtgaagttgggaaaggtgatgaggataaaaaaaatacgaaacacgaggaatgaaaatggagacagaagtggaagttgtcttacgacccaggaaaagcttatttggggagagattaaggatcttgcatcttgccaaaacaaggagattgtggactatttgtttgtcaaacatgtcatgaaacctttgttgggtcacaaatatgttactcctggagtaagtctcccttgccatgattgtaacacgttataacggttacaagaatctccaagttgcattaatttaggatgttttaaaggttttttgaccttttagttttgatgatttgggaatgttgtagatttgccttcctgtagaaaaggagtttcttgagtctgttaagaagatagtaacgtctcagcgtcattcttggcgagctaatacactcagtgtggatactaaccgcagtttcgcgcttctcatggatgatttgaccattttctcccatg

SEQ ID NO: 165724 - DNA, 1470 bp, Arabidopsis thaliana landsberg
tgccccactccttattcttgaaaaatctaatctgcacgagcatctacttgcattcttcgtggatggcacgattggagggacatagagagtgcaaagcgtgcggcggtcgggtttccgcggttatcgatggtacggatgttatcaatgtgatacactcttccatggagaatgtgctgagttttttccagaagcaaaacacacttctcacccgcaacacacactcaaacacatcacatctgaagaagcacccgattacgccgacaacaagtgtcttctttgcgaggaggagtttgatcaacaacatcccaaaattcaccattgtgatgtttgtaatttcaccatatgtagagcatgtatgaaaaacgcaccaccggttcgtgttgaaagccttacgacccatgaacatcaactacatctcgttccaagacgcattgatttcacttgcaatgcttgcgggacgctaggtgaccgaagtccttacttttgtcttcaatgcaatttcatgattcatcgccagtgtatcgatttaccacgggtcataaacatcaaccgccacgatcaccgcatctcttacacccgtcgccttggacatggagaatggaaatgcaaagtctgccgcaaaaaagtagatgggttctacggggcttatacttgcctcaaatgtcctagttttgttgttcattcactatgcgcaacaagaaaagatgtgtgggacatgatagagctagaagggatgccggaagaagaggaaattgcgccatacgagatgattgatgctaacacgataaaacatttcagccatgatcataacttacaaatcaacaatgatggtcattgccgaattcaacctgaaaatatagtttgtgaagcatgtgtgttccagatcttgtcagaaccgttctacagttgcaaccaatgtagttttatactccacaaaaaatgtgcaaaccatccacggaagaaacgtcacatgcgcaacaacaagccattcatattgttcacagattcttgcaacaaagttgaggcttcgtgtgatctttgtaaacaacacttcactggtttcagatacgaagcaggcccttatgttactatagatgtacgatgcgctgcaattttggatacaattgagcatggaagccatcaacatcctttatattactactttacatctgactggaagccttgtagccgatgtagagagcgcggcggcattttctttcgttgtgatgagtgtgactatattttggatggaaactgtgctgtttttccaaaaaaggtaatgagaaataggtacgatgatcatcttctttctttgtctttcggtgacaagaatgtgagtggtgactattggtgtgaagcatgtgaaacaaaagtgaacccaaaggaatggttctatacgtgcaatgattgtggaaccatattacatatatcttgtattgtgggagatttctcatatatcatgccaggttc

SEQ ID NO: 165725 - DNA, 865 bp, Arabidopsis thaliana landsberg
atggataggataagtgggctgcctgatgagctactcttgagagtattgtcgttactacctaatgtgaaagatgttgttgtcacaatggttttgtctaaacgatggtttctttggatgatggtgccaaaacttgtttatgatgatagctatcagaatctcgagtatggaaagttttcacggtttgttgacagatctttgtttatgcgaaaggctccaggtatagaaactttgcatttcaaacttggtcatatctgtggtagtggagatactctgattggagctgcagagaaatgttgtgtgcgtaaactgattatcaagattgatgacacttcttctcgtagtagtaaaactgatcaagtcattcttccgatgagcttgtgtagtggggttcatataatgcttgcggacctgaaactacaaaacgtggttctggtggacgtttctactccagtttctttcccatccttaaaaaggttaaggcttaaatccgtgaagtacccaggtaatgaatttgtcaacaatcttatatcgagttgtcctgttcttgaagacttggttgtgaagcaatgttcagatgacaatgtcaccattttgaccgttagagtgccatctctaaagcgtttatccttaatacaaagagctgaacttgaaatcgatgttcctcatgattttgtgatagatactccttctttggaacacttaaagatagttgattatacgtatgggtctcgtgtcattaagagtactatgaataggattatcaccgcaagtatggacattttttctccccaaactaaggagattttgggctctctaactacaaccaaacgtctttttctctgcttaccaacttcaaaggtaacat

SEQ ID NO: 165726 - DNA, 527 bp, Arabidopsis thaliana landsberg
agatcaaggaatctgagaagtcttggacttggaatgtgctttccaagggtgacgaaactaggagttgtgaacgcaattgcaaaaattccattgcttgaaaccctcgaggtcactcactcatgtataaaactggatttaaaaggctataggcccacgcgtgcccacagctaaagacattgaagctaaactccttaggccgcctagggccagccagtgacaagtatgacagcaacgtgttagacgatatggggcctctcgaatgtgatgatgatgctttagcaattgctgaaagcatgcccaaactacaccacctccagcttatgggtaacagactaaccaacacaggcttgaatgccattctcgacggttgtcctcacctggaacaccttgatgtacgcaagtgtttcaggattagccttgtcgggaatcttgagaagcgatgtttggagatgatcaaagagttgagacgccccggtgactcaaccgcagattacccatataatggtgtgtgagttgtgcttcagctg

SEQ ID NO: 165727 - DNA, 5515 bp, Arabidopsis thaliana landsberg
atgttgagggcttgtgtactatactgtgaagaaaattggctaaggtacctaccattggtggaatttgcgtacaacaacagttatccctccggtatatgaatgccaccatatgaggctctatatggtaggccatgtcgtaccccactctattggactgaagttagggagcgtaaaaagctagagccagaaatggtcaaagagactataaagcatgtggatttgtttcgagataggctaaaggaagcccatgacagacagaagagttatgccgacaagcgtaggaaggatttggaagttgtactttacttgaaaatgaggatatttagtggagcatataaaacaagaaagttgagaaagcttaagccaatatatatggggtcctatgtcattacatagcggattggggctgtagcttatcatttggcattacccctagagctatcaagcttccatgatgttacatagcggattgccaaacccacatgctgatttaaattggaacttgactactttaagtagacccgtggaaattttggaccgtcaagaaacagaagatcaagggaagatcataaagtaaatgaaagtatgttgggaaagagacgggattcgagatgagacttgggaatcaaaaaaacagatgaaggtggactacccagatcttttgaaggacaaaagtgaagaacaaggtgacaaatcaaatttggagacgaattccattgtagttaggaagaattgtaacgatccaaatttttggattaaacctgaaccaaaccctacgattcccacgagtgtataaaagaaagacacaagcctcaaaacaagcctcaaaaatggttggccgtcaagttacaccgtaagcctcgcatcctggttttgagtctcaatttctcataggtttgatcgagtcctaactcgaacctcgtttgtggcctgttataacaccacccaagtcaccgaagactttcgtcgtggtgagtttgtgcggccttatgattgtcactggaacgataaaaccatcacttaatcttgattccaatctctgtttttgttatggattgttgtatcaatctaattagtgaaagctggaatcatcacagatattggtatagaaatgtggttagtgtaatccgggaaatcaagtgtgataaccggaacactccactataaatagaatctttgattgtgatcaatactcaagagaaataacagaaagtttgttagattctatgcttgttattcgatcttctcttcatctaacatggtatcagagcgttgacctccaaagctcgactgattctctgatcatcgagtttttctttcatagagctcttagattcttccgtttcatcatcaaaaatccgattgaatcatctcaaaaccagctgtgaaaactttagatcttgcgatggtttccgttaaacgattacgacgtcgtccaagaagatcgagcaaagaatcagattagaagattcaaaatagaacttcatcttcaccgattgcaccaatttcttccccgattccaccaattccaccaatttattttccatttcaatagaatttcacaaacaagaccgacgattcttgaattcaatttcaacgattctcattagactccatatgcgttatcgaatggcgataatccaggaaaaacaattgtttccgaggtacttaatggctcaaacttctcttcttggaaaattgcgatgtttgttgccttagatgctaagaacaagtttgattttgttgacggaaccttaagaagaccttctaaatctgatcctagctttagagtttggtcacgatgcaatagtatggtcaagttttggttattgaattctgttactaaggagatttacaagagtattctgcgttttaatgatggtgctgaaacttggaaagatttgacctcaagatttcatatcacctatcttccaagttcttaccaatggacacaacaaatttggaacttacaacaaggagtattatattgccttgaagactttatgggatgatttggatgaagctatgatgcttgttttatttcgcctcaggcttttacctaaaagaccacacgactactgcaagtgcacagtatatcggagtagtatttgaggatcgaatccacagggagtgtagctacaaagaagaattcaagttagtttacttggatcaagacaaacaaaagagtgggagttgttttatgcggtagaaataagtaaagaatgcaataaaagtaaaaagcaataaaaggaaactaatgaaaaggcaataaaagtagaaagcaataaagagagcggtgtaaaataagtaaaacaaaacgctaggtcatcaggggttttctccgggcgtcaaggtttaatcaataaggtatagattccaatctagatgatataacatggctaggtttgtttacttccaaattctcggacatacgaaactctatcaagaccagctaacccaaacggttagtaggtgaaagtcagctattatcactaatatcttgcggactcagttgccttatcggttagtaggtgctaacatggtttcaaaatacaagatcaaagcattaagttcaaattcgattctagtccataagttcctatcactcggcgagtgtgcaatagttatagttatttattcagttgagctagctcaagcattcaaacgagattttaccaaagaatgaaatacctaaggtcaggtactaggtgacgttccagacatacaagcattaagattaaactcaactagaaagaatagtgtaaaccatcaaacaagaccatagaaacggccaacctagacatttgatctattagtccccatgaattcccctttgaaaccccctcaaacccaactagagatctactcgctcatggcaaaggatctaatcaaaagttgggttgagtaaaccataacaaaaagatgaataaaacatagaaagggtttaaagattacttctttgaatgtagaatacaagaggcaaagctccaccttaaagagtcttacacaaaacgagaaagagaaagagagagatggtgatcttcaagcttcaagaggtgcggtggcgagttggcagcgatgaaggcacacctagggttagggcttagaacaagtatttatacttgagggccaagaattaggtttaggggtaagaacgtcattctgccaggtaagtaagtgatcgggccgagtagtgggctttagggaaggagcctaatgatggtggcgcaaagagagaaggacttgggcgtgccctagtggttggtggtgagcttcgcggagctgccctagttcaagtctctttggccggatactttttggatttattatttctaaacggctggttcttgacatgtctttactcttcgggtcatatcttccaaacggcttcatggattgcttcgattcgacttcgacgttaatcttgactcttctagctttcgatacataccaaaatatctggttgccgtgatgggaaagacttcggccggatgctaaacttctcaagtactagaatgatcgccttttgatgcttttagcttcaaaacttttaaaaccttcttggcacctagaatacgtgtttctcctcttattggctctagaatggtgttggggtcggattccacccaggatagcgagccaaccacacctcaacgcctcgagagacatcgatgagttatcccgaaccgggccacaaaacgcctcggagatctcgtcaagaatcaacaccgaggggatgtcgacaacgcttcggagcaggctcatgaaatggtcccctgacccgacctctaaacgcctcgggcataaaacccggcaaatcgtcccgaggcgggctccaagacacctcgggaatctgtcctcaaataccgtggaccgagcatcccaagcacgacccgaggccagcttaatcacggctcggaagagtctcgggttagacgaggaaaacttcaaaagacttagccggtataagttcaaaacacatcatctctgaaaaccccggaagagattatcttcaaagatatcaccggatacagaaagtcccagaatcttcggaagataagggcaatctccttcaacaagataaagataaagagaaatcttccgagaatatcgcgagaggtgatattctcgaactctataaaaagcacctcagaggacaaataaagaggacatacactaaaacgctctcaacttcaggctatcaaaaacgctctgactttgaaggaagaaacacttattttcatattctagcacacttgtacgatcaaatcattactttctcattaatataatcaagaacaccgtcctcggtaattgagtttttttttgttctttgagaatctcacaaagatccgttctttgaagaaacccttaaaataaattttattgtgcgagttttgactctcacaatttggcgctagaaggaggggagagatttctcttactcccggaacacagaaccaaccacccaattcacaatggtcagcaataaaatccccggtaacacagttgatgcagaggggaacccaatcctccgatccagacagacgctcctgaagccgctgctcccgcgaccctagcggaactaagaagtatgatggctcaacttcaacagaaggtgaacaatcaagaacaggcaaatcgatccttggtgcagcaactcgaagcagctacctcccaaggacagatcaggactactcgtttcagcgcgaggcatcttcaggatcgacgggcagcagcagatctcaatcccacacggctcgtattccacacacctggcaatacgacaaggcccgtccgcagaaccgcaccggaaatcggaagagaccgaaccgagccggcaattttgggaaatcgggaaacaaatcgaaacgaaccgcaactccctcctccccgagcagaggttaccgaggccgatcatatcgacgcctcggacaatgaagactccgaggagaatattaggtgggctgaagagtacgccagagaacaggaaataagcgccatcaagctatccctagccaaggcagagaacgagatgaagctcgtgagatcccaaatgcataacgcagtctcctctgcaccaaacatcgaccgcattctggaagagtcccacaacacaccgttcacacatatgatttccaacgcgataatctcggatccaggaaaactaagaatcgagtacttcaacggatcttccgacccgaaaggacacttgaagttattcatcatctccgtggcccgagccaaattgagaccagaagaaagagacgccggtctctgtcacctgttcgtcgagcacttgaaagggccagctctggattggttcacaagactaaaaggaaattctgtggacagttttcaggagttatcgacactcttcctgaagcaatattcggtgctaatcgatcccggcacatcagacgccgacctatggtcactatctcagtagcctaatgagccacttcgagacttcctcgcaaaattccgatctaccctagccaaagtcgaaggaatc

SEQ ID NO: 165728 - DNA, 3153 bp, Arabidopsis thaliana landsberg
gacttgctccccatgaagtggaccatcaagcccggtagttattaggtcatgcatatgagcttcattttacttcttgccttatctgaccaattatattttccacttcgcagcttttattgcacctacccttcctactgctgagttcggcgcattcttcaagatcgtcatcgaaggggaaaccctttggaactccttcactcttaaccggttcatagaagctaatcacaagcttaggttgagcccccctgttcatctcctccagctgcctctgccccctcctttacctaaagggacttctgctcgagccatcgcagctcgtcgcaagacaatgtccaagtcgattgtggaggcttgcgagatgaacaaatcattcctccaatccacagtcgacaagaaggaatacagcagaaccctgttagtcgacgatggcagtgtcgaaggggtaaggtctgccggtgcttacagacccactcctcaccatgaaggtcatagcagccgatcatcccacaaggagcgatcaccttgccgcgactcacctcgacccacttcccgatctggactcagcagcgagccaattgccgacctgattcggaagaagagagatagaccatcccacaacagctcctcccccaaaagagacaaggcgagggcccgaactgaccgctctcctcgaccgtcgtcgccaccccgatctatgggtcctcctcctcccgtcaccatatctccctcgtccggatcaggaggggaaaaggcggagcaaagtactatcccttggcgggatgaaactgaggtccaagatgtcggagctaaagctattttggttcctcagtccaagtcgctcacgggttagaaatttcttcccatttttttttgttatcacattttttgccatttcggcttattgactcagcgtccttcgaccggtctgacccctttttttttaaaacagcgatggaaacggagaggaacgtctttcgatgtttgagaatccgaaaagacaccatccttccaaccttcgatagatggcgtcctgcaatccgcgagcgattcctactccatgcccatcactcatctcgggttagttcctttttaccgtaataaaccttttaatctttgcttctttaccctgtcgctaaccccttcttgttattatctgatccaggcgaacagtgaactcaacgacatgattgagtactatgaaaggctactgcttgacagggaaaaagatgttatggcgtggagagataagtcttcatcccttgagtccgatctccactcttcaaatgatgctaggctgaaattggaggatcagttggataacctctccatcgaactcatgaagtccaacggcaagctgcaggagcagtaccaaacgtacgacaaggtccaagaagaactctcaacttcccgggacaaactttcaaaatccgaatctagtgcctaagagttgtccaaccagctctccgaattgcagcttaagtacatagggtggccaactatcgggatgctgagttggcgaagtcgacgtcaaaggccaggaaagaggtgaaaggtcgcgggatggaattgatccaaggggcaattgtcttcatccaaaccgagaaggctggagcggagctggaatctgacgttagggagtacgagagtaatctcctcctttttgaccaaactcatgaatatgatttttctgaagaacgagagagggacgagttgaaagccgttctggaagagaagcaaaatcgtttagctgccttacctttctcgtcgttcaacccccagcagttcgaggagttcttcactgaatcgcctcctttgagtgaatccggtttagactgggctggtaaatcccaactcttctccctttttctttaaaaagtcgatccacagtgaactactcttatattaatccgagataattgcctcaggtgtcagcggttccgtggaacccaaagtgcctattgccccggcatcagttccgcggcgataatcacgttgcctgaaattcctccatccacgaactcggagatagtggttatcgaggatgatgatggttcagactccgtgattcctggcgagcagcccgctactgacgagccgagtgagattgagacaactgccgtagatcctgagttagttcaaaccgaacccgagatacccgagaactcgtagtggctgtgtccacttctcggcttgtcccttaaactcgaaatttactattgtttttttttaaattactttacttgcctaagtaggctttaaacaaatactttgcctgaggaggcttttaaacctttcctttaagactacgatcccaagagggttttctttgtgctaatcttgagtatggatttgcaaagtccatttctttaaatagagtttttgtttaaccatgtggtcaagttacgggacttgtaggttgatcagacctatccctaaaaatgcggactttaatccgcgaactccccaactcgggtttagtcagttcgattatttttgcgggctttgagcctttactatttactctgcatttaatggcccagttatcttaaatgtgacagttgcctttttggccttggaaatctggaaaattgtcacgcttctaaggcaataattgccttttcctcgatttccaaaaatggataaactcattcggacacgccacaattattaactttgtggtttcgagtaaaaccctaaatcactataaataagagcataaactttcttaactctcgaaagacatgatcgcagaaatttacttgaacaacacatgtagaatggaacgcgaaggagcatccaccgtctgccccctcgaccccaggagtcctttgttcttgtccggcgatggcttcgagcccgccggcgtcctctttccacacgcttgtttccactttccttcgaaggaaaagaaggaggcgtacgactttatgaacaaggtaaagactctcttgttctctttttcggaacgagttctacttgttttctaaccagttcgtactttaggtcgtcgacaagcatcgccgcctgtgcgatgaaaggcagcgtttaggccttaagaggcaaacgctcaaggcccgaattgctcgcatcgagagtaaaataagtgccatggagagcgaaccttttcagtgggagtggaggaacttcgactgc

SEQ ID NO: 165729 - DNA, 747 bp, Arabidopsis thaliana landsberg
gataaagtgatcaattatggagtctgtgttaatgtgcaggaaatgagatcccctagaaccttggaggtttggaagctaggcactgtcaactatttgaaatcccttaaactgcaggagaaattagtttcagagagaaaagctcatcagattccagataccctcctctcgcttcagcatccaccaacttatacgctcggaaagcgtagaaccgatcacaatctacttatccctgaatctgaacttacaaaaatcggagctgaacttgattatactcaaagaggaggagacatcaccttccatggccctcatcaagccatcttatatcccatcattaccttacgcagcattggttttggtgctaggaactacgtggagacattggagcggacaatgatcgagtttgcttcgatttatggcgtgaaagctcgagcaggaaacaaatgtgagactggggtttgggttggggataggaagatcggtgctattggggttaggatatcttctggaatcactagtcatggtttggccttaaatatagatcctgatatgaagtactttgagcacattgtgccttgtgggattgctgataaagaagttacatctttgcgaagagagacggatactctgcttccttcagaagaagtgattcatgaacagttggtttcttgtttagccaaagcgttttcttatgatgatgttgtctggaaggaagatccttcactcattttggacacccaagataaagaa

SEQ ID NO: 165730 - DNA, 842 bp, Arabidopsis thaliana landsberg
tcttccttggagtggaggttcatcaaagtgaagatggcatacttatctctcaaaagaagtatgctaaagaagggttggagtggttcaatatggggaactgtaattctgtcaagaatccgattgtcccaggtactgaacttttgagagaaggcgtccggggaactgatgcaacactctacaaacagctcgttggctccctaatgtatcttacggtaactcgtcctgacttgatgtttgtagtgtatttgctttctcgtttcttggctgacccgaaggaagaacatatgatggctgctaagagagtactaagatacttaagtggaacactggattttggagtcttttacaagagatcgtcggtgttgaatttgttgggtttcacagacagtgattatgcaagagatcggtatgacaggagaagcacttctgggtatgtgttcttgcttaatggtgcagcaatatgttggagctcacgcaaacaggacattgtcactttatcgtctacagaagcagagtatgttgcagcaacttcctcggcgtgtcattctgtttggctgaagggaatcttgcaggaattgggtgttgaaagctgtgagtgtattgacattatgtgcgacaacagttctgcaatcaagttgtcaaagaatccagtcatgcataggagaacaaaacatattgatgtgaggtatcattatcttcgtgacttggtaaatgagggagctatgagattgttgttttgtggaacagaagatcaagtggctgatatcatgactaagccaatcaagctggatcagttcgagaagcttagagagatgcttggagttcggcgcttgaaggattaa

SEQ ID NO: 165731 - DNA, 258 bp, Arabidopsis thaliana landsberg
tagaccatgaacatggataagaaatggtacatcgtgaatgtccaaaccggttgcgaagcgacggcgaaaaaagccatcgaagagaagatcaagacttcgaagatggaaaacctcttcggcgacatcctgatcccctctgaaaacgtggtcgagctcgtcaaaggtcaaaaacagaccaaatcgagaaaatttttcccgggctacatgttcgttcagatgtttttgaacgacgagacttggcattggatgagacatgcg

SEQ ID NO: 165732 - DNA, 2695 bp, Arabidopsis thaliana landsberg
  unsure (1)..(2695): unsure at all n locations
gaaacacaagattagaatatgtcatagtaatataagtatgtattcatgtctctaaaaacttctatgacatatagtttatgcatcttcaaatttgactggcaggtagaatctgtgaagtgtatatttgaaagacatccagactttgcatcaaaattccgtccaaagaatcggcacttgaagtcaacatacatgactgtcctcctaggactaattaagacgttgtgccagttacctgaggagctcactgacgatgatctggacgaagcatccgttgcagtgtcatacgtggaaaatggtggcttaagattggattggttggagaagaagcttgcggaagttaaggcaaagaagaagaaagtagagacgggtaaggctcgactgcaacgagcggaggaagagttgcagaaattaaatcagaaatgcttagagctgaaagcttttcttgagaaagagaacgcagatgtgtccgaggccaatgttcctctatcgttcgaagatgttgtttgatgttcttgtgttcacagaacctttagattgataatatacttggtgtttttgctgtgtcttagctctgaatttattagtcttcttttaaagtggaagcaatattaatggaatccttccttttgttctagtgaaccaatgggtttaaattataaagataaatttcttgatgacaaagtaatcgctctgtatcctaacagtgtggtgaattggaaatatgttatggtatgttttcatcaggtctcaagattaaaactgatagctaataaagcagaggattttgttgctaaaaatcctctctcgtgcgatcttaagcacttaagagttcacatatctagttttgttacatattgtgaaaaattgcgcaaagaatctctcatcacatggattatacaatatgaatcttgatgaaaaaaattgtaacctatcttagtatgaacacttttttttttgacagcaatcttagtataaaaacttaaaacagatagagtaacgaaaaaaataatatcatcaagtgggtactagccactagatgacttgccaatagagtggctctaggacttaattaaatcacagtcgcaattaaaaaaaaaaaacaattttccattaagtaccacaacggagtctcctcatctaaaccttttacggagaaaaaaggattcaaggctcattgatttcaccctatacggtaagaaatcgtgttagagtggcatttagacttgtcaagacttcgattccatatggaaatcttaatttcaattgtggttactctgcttgagattgttgatagattatcaaattaatttctagggttttgttttataattcaagaaaaaaaaaagttttttaggttttttttttctcttcacgttatggtattttggttgcagaataatctttgccaagatcaatggggaagcaacttgctaagaagatcacttgggctatcgagaatttttcatctttacattcaaagaaaatttattctgatccattcatcgtcggtggatgtaaatggtaaggcgttttccttcggtgattgatcctctacacaggtttgctgactctcttattaattagactttatttttgcaggcgttttcttgtctatcccaagggaaataatgttgattacttatttctgtatttggaattatctgattatgaatcattgtcacccgaatggagaagacatgcccgatatctcctaaatgtagtaaatcaaaattcggtgaaacgttccaaacaaaatggtacttatttcttctcactactgttttctccaaatatattttaatgatcacaaacacaaacattttgttttgctacatcgtatatctggtgagtggtgatttgtgagactcgttttgggacttgagttaaatgttgctcaagggtgtttgtgtgggatcatggtgttactgttgtattagttgttagcattgttgttcaatccacagaaacatatataattcatttagtcctttgtttgcacgtaaatggagtgattatataaattctgtttctgattttacagaagaacaaaagtggtttgatgtgcagtctcctcgctggggtcgcctatccatgtttcctctaaatgaaatcaatgccaaagatagcgggtttctggttaatggagaactcaagattgttgccgagatagaggttcttgaagttattgggaaactcgatgtgtcagaggaaacttcaacaataatggaaagcatggattttaatggctttcaacttcttccctcacaggttaaaattaagaatgctactaacgttttgtgtagaatatattcaacaacaagagacaacatgatgtgttcaatatttatggattctattttgtaactctcaggtggactttgtgaggcatatgtttgaaaaacacccagagattgcatctgaattccgtttaaagaacccaaatcttatggcaggttacatgagcttgctactcagtctcattgagactctgcgccagtcgcctcaggagctcaacaaggttgatctagctaaagaatatgttgcactcagatccataactgatgctggatttaaggttggttggttggaaaatagacttgtttagatatcagaaaataagaatatataggagtctggtgatactcggatgcnnnnnnnnnnnnnnnnnnnnnnnagtttgatacaatgatgctta

SEQ ID NO: 165733 - DNA, 280 bp, Arabidopsis thaliana landsberg
cgcggtcagtgtcaacgatctagccgagcccttctccatgtcgctgccgtcgatcatgaagcacctcgacgtgctgaaagacgccggcctcgtcacccggaagaagagcgaccgcaccgtgtcctgccggttgaacgccgggcctatgcgggaagccaatgaatggctgggtcgctaccagcgcttctggacggtccggctcgatcagctcaaagctttcctggaggaagaagaatgaccaccgtcgccacacagccaatcatctcgccgagcctgacga

SEQ ID NO: 165734 - DNA, 926 bp, Arabidopsis thaliana landsberg
  unsure (1)..(926): unsure at all n locations
tcgacgaaaaagatgaagccacaagaagaagaagagaagaacgaaaatatggcgaggaaaagaagtaaatcatcatcgtcgttgtccatacctctcgatatagccacagatatattcttaaggcttcctgcgaagtctgtcgtaaggtttagttgtgtggcgaagcattggtcatcaatcaccaccgctccatatttcaccaactcgttcgaaactcgacctaatcttttgttcttcttcaaagaagctgacaggttctttgttgtcacggttcctaaacctaatcggagaccgaacgagtccgtttctcatacttcttctcagattcttgatagttaccaaacaccctatccaaaacatagctgcttcaccattaaaaccgagtcggtccacggtttgatctgcttccagagaggtacaaagcctatagtttggaaccctactatgagaaagttcaaacctttacgcaaaccggacaagagctgggagagtttaacagtctttttagggtatgatccactcgaacggacgcacaaagtagtggccatgccgtgtgataaagcttctgatgagtgtaggattttaacattgggttcagcagatcaagaatcatggagaacagtcagaaccaattataagcatcaccctagccgtggcaatcgcaaaaacaattatggaccatgcagatgcatcaacggtgttctatattatctagccgagattgatcgtcatcgactcatcggtttataatgacttttgaagtaaaatctgaaaagttccaagcgattagattaccatgtggttgtgagccaaagatgatgatatcttataaagggaagttcgcttttctcggtcattccaatgtgaaggatagtcttcccatgtgggttttagagggtgnnnngnagggagagaggcaaaaatat

SEQ ID NO: 165735 - DNA, 458 bp, Arabidopsis thaliana landsberg
cgtttatggattcgccttgtgaacttcctcataaggtactcaatcctctttctccgacatataaacatcttatttgttgtttttgctactgagtttcatttaataactttatagagatttttttcacgcacaagagcttttcgatagctcagcaatattgcaaatcacggtgtccaagcttgagcaagaatcagtttccctgagatatctacttaggcaagacaaaaacgagcggcgtctctctgcaattctacaaaagaagtctcattattctgctcctccaaagttcactaatgctcaaaatttccctaacaagtcggtacgactctcttcacaaagttttcccccttcttttgttctagtttctaaacatataattccttctggtttgacaggtcacgacgaacagacacagtaaaccagtggattctttggatactgaaaatttgcaagtagca

SEQ ID NO: 165736 - DNA, 318 bp, Arabidopsis thaliana landsberg
gaatgattgaccgtttggtcacccaaacacatcctcacagcgctataagatcacacagattctccttgcccctcaaagcatccggactagccaagaagccaggttcacactctaggactatcttgagaatcgcaaacccgctctgtagccatcagatgattcaaagtaagctcagagacgatattggttaagctattccactacgcaaataaatttatatgccgccaaatcagctttcgagattatcagttaagcgtgtaagatcgctgtcgcgttcctgaaaagcgaaagcatttcactatcaaaaaaggcttgagt

SEQ ID NO: 165737 - DNA, 1872 bp, Arabidopsis thaliana landsberg; identical to SEQ ID NO: 29275

SEQ ID NO: 165738 - DNA, 2324 bp, Arabidopsis thaliana landsberg
gtaaatgctcaaaatctctgcctatcattcattactcatataatctctcttggcaactctatggattcgtcggattcagagtcgtcgaagccctcatcactcattactcaatttatgtctctcgacatgcaagctacggaggtaagatgatcgttgactttgaattcggacagcttgagattgtcttgtgattcattaattattttcatatactccatgttctgttgtaatttgcattcatactcaaaatctctgcctatcattcattactcagataatctctcttggcaactctatggattcgtcggattcagagtcgaagctcatatcactcgttactcaatttatatctctcgacacgactcgtttcggttgggggatcccgtcacatatctttgaaataatctctctgctgagctcaatggatttggattcgatgccgaagccggagtcggagctcatgtcagtcacaagtcaaataatctctgtcttcaactcaatggatctgaattcccagccggaggcactgtcccagggccatatcactcattactgatcgcgtgaatgatccagaatccggtttccgatatctatttggattcagattttgaagactatattgcggttatattgaatctcgagccggagccggagctcctatcactcatctatcaagtattcacccttgtcagctctatgaattcaaagtgggagaagcttatttctgtacgccctcaagtagtacacagattgggaagagacaaagtttatatgaatgatgaacaagtctcgtgtagaaggtataacaagtgggcgtgtctccctaaaaactggtttatgttgtggtttataggagaagacgacgaaacgcactttctttgcagagcttgcgaaggccataaccataaagaacataacaacgctccagttgagatcaaacaccatcttcatcccaagcactcacttctgcttgtcaatattgaaatatatcctagagagaggaaatgctattgttgcgacgaagatctcggaactttcttttatcattgctcggcttgcgatttcactctgaatatagcttgtgtggagaaaccaccggtcttatctatagaccatcccaagtggcatgagcatacacttgttctgttttcaagaacaacttctttaacttgcgacgtctgtgccttggcctattcaacatctcctttctatatatgtccaccttgtggctttgtggtccatggaagatgcatagacttaccacgtgtcataaagatatcccgccatctccaccgtatatcatttacattttcttttgaccgaggagatttgtcttgtagtgtttgtcgcagaaaaatagacgaagattacgggggctatacttgcatcaaggacggctgttcgtatgcggctcattcgaaatgtgcaacacaaaaaaatgtgtgggatggcatcgaacttgagggagagcctgaagaagttgaagaagaagtagttgacccgtttgtgacaataagcgacggagtcatacaacatttcggtcacccacaacatcatttgagacttgacgagaacacgagcagagattacgacgaggataagttgtgtcaagcttgcgtcatgccaatctattttggtaacttctactcctgtacgcaatgcaattatatactccacgaagcatgtgccaatttctctcgcaaaatgcatcatccggtacatccacatgtgctcactttagtgaactctgacggtgctatcaacgttagaaaaaaatgttcagcttgtccttggatgtgcacaactggtttcttctatgagtgcagtaaagaagatttccagctacatgtgcagtgtgccaacgtttctgagccactagtccatgaaagtcatatgcatcctttattcctaacaaccaaaccagaagagtggagagtatgttccgcttgcaaagagtcagattgtactgtgacaaatgaaacattcaactgcatagagtgtgattttgctttgtgctttagatgtgctactttacctcaaaagttgaggtataagcatgacaagcatacgctcactctttcgtatggcgaggagacaagtaccatgccatcttggtgtgaaatttgcgagagaaatataaatccacaggagcgattttatatgtgtgatgagtactgctgtgtcaccctacacattgaatgtatgcttggggtggctttatacatcaagcctggtttatagtggatcagcttcaacaataaaaagatgtatgctctggccaacaatcatcatatgtctcgacctctttgcttcagttgcaagga

SEQ ID NO: 165739 - DNA, 2101 bp, Arabidopsis thaliana landsberg
ttttgatgatgtgctaatctatagcccggatctgcaatctcatgtgaagcacttggaagcggcctacaagcttgtgagtcgcaatcagtattatgtgaatgcgaacaaatgctcttttgggctggaaaaggtatctttcttggggcatgtgatatcagaagaaggggtagcagctgatccagaaaaggtatcttccatgttgacgtggcctgtgcccaaaacagtcacggagttgagaggcttcttggggttgacagtttactacaggaagtttgtgaggaactatggtcagattgctaggccgcttactgagcttctgcagaagaatgggttcaaatggtcagatcaagcggaggcagcctttggagccttgaaatcagcagtgactagtcttcctgtgttggcgctaccagacttccacctgcccttcaccatagagactgatgcatccggagtagggataggtgcagttttgtctcaagggaagcgacccattgcattctatagtcaagctttctcatccaaagggagggtcaagtcagtgtatgagcgtgagttgttagccatagtgaaggcggtatcaaagtggaagcactacctcacaggacaacaattcatcatacggacagatcagaggagcttgaggcaccttttagagcagaaatcagtgtcaacggtacaacaaaggtgggctgctaaactgttggggttgaactataagattgagtacaaaccgggagtgcaaaacagagtcgcagatgccttgtccagaaaaccacctcttgaggaattgaaacagatcaccttaatagcaccactgtcactgaataaggaggaggtcagggagcagataaaggttgatccatgctatggaccactggttgtcaagttggaaaaaggagaagggaaccagaatgggtacaagctagagcacgggttgttatacaaagatgggaaggtcgtaatccctacaaactcaccaatgatacctaagctattggagcaattccactctagctccattggaggtcatgaaggggctctgaaaacatataagaggctgctacaagaggtttattggagaggaatgaggaaagatgtgataaggttcattactcactgccaagagtgtcaagagaacaagtatgccactacttcacccgcaggactcctgtctcctctaccaatcccacgacaggtttggtcaaatgtcagcatggattttgtagaaggattgcccccttccagagggttatcctctatcttggtagtggttgataggctaagcaaatacagccatttcattccccttaaacatcctttcactgcgaagatagtggctgaagcttatatcagagaagtagtaaggttgcatgggttcccagagacggtggtatccgatcgagacaaggtgtttctgagtcacttttggacagagctgtttaaactgcagggtgtggccttgcacaggagctcagcataccatccccagactgatgggcagacggaggtagtgaaccgctgccttgagacatatctgaggtgcttcactagcaggaaaccaaccaaatgggctcagtggctgccttgggcagaatactggtataacacctcttaccactcttctactcagcacactcccttctttgtggtttacggtagacagccacccaaactgttgagatatggtgatacacccacggcgaacgccaatgtggaggagttgttgaaggatagagacagtctcttagttgagttgagggagaacttggaggttgctcaggctaagatgcagaaagaagctaacaaacacaggagagaggtggagtttgttgtgggagataaggtgtatttgaagttgcggccgtatcgtcaagtgtcggttgctcgaagaagaaatgagaagctctcacaaaggtattttgggccttaccaagttattgctcgcattggcagggtggcgtataggctggaattgcccgtgggaagccgcatacacccagtcttccatgtgtctcagttaaaggcagctttaccaaccactgaggtagcccaggacattccgccaattctcacacagtccttggagtgggatacagaa

SEQ ID NO: 165740 - DNA, 1428 bp, Arabidopsis thaliana landsberg
tcgctgagaaattaaacatggacttgcaggctcagttttctcatgaagcaagacggtttatactcaatgatttctatgctgctgcttatgcgacacaacctgatgcatattaccgttccttggaaaatataaaaagcatttcccctgatgcttatacttgggttatcgaaagtgagcctctccattgggcaaatgctttgtttgaaggagagagatataaccacatgaactccatttttgggctagatttctacagctgggtttctgaagcacatgagttgcccataactcaaatgatagacgaacttcgagcaaagttgatgcaatcaatatatacccatcaggtacaatcccggggaatggattgtttcaacgctaacaccaaccaacgaagagaagctacagaaagaaatagaacttgcaaggtcacttcaggtctcagcgcctcacaatagcttattcgaggttcatggtgaaaccatcaacttagttgacatcaatcagtgtgattgcgactgtaaggtatggagactaacgggtttaccgtgtagccacgcagttgcagtggttgaatgcatagggaaaagcccttatgaatactgctccagatactttacctcagagagttaccgtttaacgtatgctgagtccattaaccctgtccctaacacaacaatgacgatgatgattttggaggagccgcccgttgaaggggttgtttcggttactccaccgcccacaagactaacaccaccagggaggccaaagagtaagcaggtggaaccgctggacatgttcaagcgtcagctccagtgtagcaactgcaagggtttaggacacaacaagaagacctgcaaagctgtatcttaagtattagggagagagagagaaatagagaggagagacatggttaggacaaatttgtagttatatagctgactttgcccaacattttggttttggttcttctgtttgttgggtttttgagaatgatcttaaagggtaaaaatctccttcaggttgaaacccaaacgtgaagagagcaaagcggctcagaatctctgttcctaaatggcattaaacttgatgaaagattttacataaatttttttgtatgtattttaacaaaaaatttcaatgaatcttttcaattacatatattttgtatttcgagctttacaaaatccaccacacttgttaaaaagcttatgcagttgccgacaacactttgacgtttacattccaaaaatgatcgatgttcatatgagcctataataaatgctagagacagtaggatataagtatcaaaagagtaaaatctctaccaagaaattgactccaaccaatcggaggtaaactcataggccacaaaggttacagcaccagcaggagcagctttcacagtcgatggcacaatgcctttgtaca

SEQ ID NO: 165741 - DNA, 1695 bp, Arabidopsis thaliana landsberg
gatcttggtgggttaaaggagatattgcatgacctaacgaattgagtaaagaatcctctgctttttcctgaaatgcatgaacgtcttcaagagaagccaatttctgggattttacttcatggtccacctggttgtggcaagtctacattggctcgtgcatgccattgctaatgaaactggtgttccttttcatatgatctctgcttctgaggttgtttctggtgtttcgggtgaatctgaagagaatataagaaaactcttctctaaagcgtatagaactgctccttcgattatctttatcgatgagattgaggcgattgcgtcaaagagggataatcatcagcaaaagggtatggagactcgtattgttacacagttgatgaattgtatggaccaagagtatatgcttcaaaagatgagagagtctggttctgaaactagcggccatgttatcgttatttcagctaccaatagacctgaagctcttgatccagctttgtgaaggtcactacgattcgacaaggatttttgtctcggaatgccagatgagaaggcaagagaagagattcttactttgatactacggaaccgtcctcttgacccaagttttgatattgcaaggattgttcgtaagacttcaggatttgttggagcggatctagcacttttggttaaggaagctgcaaatgtggcaatggagagattagtgaaatcaagaggatcagaacttggaactgatattgattctttgttgagtatgcagccatgtccatttccaccacaagtgatagagaaacttttctacactatctcggattttgaggaagcattgaaaaagtttaaaccttcgttaacaagagaaggattctctactactcctagtgtaacatgggaagatattggcggtcttgatcatataagaaaggagttttatagcgatataatcaaaccgttgaaatatccagaagagtgcgagggattcaagttctgttcagggagggattttttgctatatggaccacctggttgtggtaaaacattagttgccaaagccgtggctaacaaagcagaaaccaactttatccgtgtcgagggaccggagctttgagcaaatacgttggagatagcgagaaagcgattagggagctatttaaccttgcaaggatgtgttcaccgtgcataatcttcttcgacgaggttgatgcattgacaacaaaacgtgggtcaggagaaggtgcttgggttgttgaaagaccattgactcagttgctcaatgaaatgagcggtggaaaagaacgagatggagtgtttgtgattggtgcaacgaatagaccggagatgatggatcctgcgattacaagaccagggaggtttgggaaacatatctatatacctcttccaaactctgttcaacgaggtttgattctgaaatctcttgcgaggaagattcctttagacacaagtgttgatttggatgctatagctaggcgttgtgagaattttagtggagctgatcttgaagctttggttatagaagctggtttggcggctcgagacgatgagacaggctcgtaccctcgtaggacaaagatggttcattttgaggaagcgtcgagtcgtatgcaaagcggcaggtgaagagaaaagtcaagagattggccaagtttttccagttttctacattttttcaaaact

SEQ ID NO: 165742 - DNA, 917 bp, Arabidopsis thaliana landsberg
gcttcaaagcaaatgaaaagtattatgtttcctcgatcccgcaacatcgtcagacgtttgagacttggaacaagtctcactcttattctcagcttattgatcgttatcatatggaattctcagaagaaatgaattacttccccccttcggaatctgtcaatggcttgatctgctttcaagaatcagctaggctgattgtttggaaccctagtcgcgacagttgttaattttaccaaaacccaatgggaactcgaatgatctaacaatctttttaggatacgatccagtggaaggtaaacacaaagtaatgtgcatggagttttcagcaacttatgatacgtgtcgagtattaaccttaggatcagctcaaaaattatggagaacggtcaaaactcataataagcatcgttctgactattatgattctgggagatgcatcaacggtgttgtatatcatatagcctatgtcaaggatatgtgtgtgtgggttctaatgagctttgatgtcagatctgaaatattcgatatgatcgagttaccatcatcggatgttcacaaggatgtgctgatagattataatgggaggttagcttgcgttggtagagaaataatagagaagaatggtattagattgtggattttggagaaacacaacaagtggtcgagtaaagactttcttgcacctcttgttcacatatataagagtttgagtactaataagttcctactaaaaggtttcactcatgctggtgagattatttatgtagaatccatgtttcataaatcggctaagattttcttttatgatccggtgagaaacacttctagaaggttcgagcttaaagggttcactgacgacgagtttgtgctcagtaatgaacatggttacacggtccatgttttcccgaatcacgttg

SEQ ID NO: 165743 - DNA, 613 bp, Arabidopsis thaliana landsberg
gtcaaagttgctaatattgaaaatagctaacgtgtgtcttcccaatggctcgtttgtcgaaaacagcgttaaagaaagtcaaatcgtcattctttgtggttacattccgacttgtttgtctttaatagtatatcggttgaataaaacagtttgaaaattttcttctaatacgaataaattaggttttttaaaaactaatgttatatgaactttttaattaaataaacgtcccacatgtgaacaggtgatgaatctacaggcggagttagcttacgtccaaactcaactctcaacattacaaggtcttcctccgccgaattctcaaaacaattcacggacagaagcagcctcttcatctaatgtgccactcatttcttctgtcgatagcaaagacaatatgtcttcctcgtcgtcacacattccttgtatgtcacaacaacaagaacaagaacagccaaaagaagctattgaggtcccaacagagtcagtggatcttagcacattctttggcctggaaaatccagtggatgaggacggtgatcttaacgctcttgcccgtgagttcttcactaagtatttgaccggaggcaaataccgaccatcttctttaata

SEQ ID NO: 165744 - DNA, 700 bp, Arabidopsis thaliana landsberg
atgaggaactataagttaagattgtcagttatgagcccaagtgaatggttccacaagctcaagaacatgaccaaacctagaaaaaagcattctcttcctctttactccataaacactaccaagaagagaaaaccttcctctgagtcaaagtctcttccttactcttcaacttcttacttcttcaataggtcacgctcacgcacatcctttgaatctaggatccttcaaatttcaccaagaaactctcttcacaacatacagagcaaaagaaagactgtttacaagccttctcctccttcctcttctattgtatctgcaggttttaacaaaacatttcatcaaagccatgattctctctctgcctcttccaacttgaaagtcatttcttctgaagatgatattatcatcgacatgaataatagagatttcaagaagaaaactttcaaagagatcacgaagtttgattcaacggagaaagcctgtcgtgcaagtaaccgaaccaaggaaacacatatacctcatcatctctctgtgaaggtcagtaaagagaaagaagatgaagaggaagatgcatgtcgaaccaagaagaaacatcagaaaacattagtttctagtggaagaagatcatcagctaaatcttcaaggataaagctcagagcgagatctcctagaattcaagtctcgcctcgtagaagcaaat

SEQ ID NO: 165745 - DNA, 709 bp, Arabidopsis thaliana landsberg
cattaatggatctcttgggccacaaccttcgctatggctttatggtggggttgaaatggcgttgttgtaacgtgtttgcggagaacagagtttgccgagatcgtgtcaagtttgttaaggacattacggcagaggttactaaggcgaatgtggcttttggagggagactatcgcaggggccagagtggagagaatgataaggtggaaagaaccaagtgtgggttggttcaaactaaatactgatggcgcttcgagggggaacccgggtccggcaacagcgggaggtgtcttgagggatgagaatggtatttggtgtggtggctttgcgttgaacatagggcgttgttcagcaccgttagcggagttgtggggagtttactacgggctgtaaatggcatgggagcggaagcttacatgtatagagcttgaagtagattcagaagttgtggtggggtttctaaagacagggattggggcggcccatccgttgtctttcctggtacgcatgtgccatggctttctcgtaagggactggattgtccgtatttctcatgtgtatagggaagctaatcgtcttgcagatgggttggctaactatgcgttttctttaccgttaggttttcatgtttttgatgttttaccgagctctttagtctcggtgtttagagaggatgagtctggaacagagtgtccaagacaagttcggttg

SEQ ID NO: 165746 - DNA, 755 bp, Arabidopsis thaliana landsberg
atctctcaactagattcatgtccaatgttcagatctcaaaagctggtgccttctacgaattccaattcgcgattaaaaatattcactccgagatgtatagtctccttctcgacacgtatatcaaagacaacaaagagagagatcatctatttcgtgcaatcgaaactattccttgtgtgacgaaaaaagcagagtgggctatgaaatggatcaacggatctcaaagcttcgctgagagaatcgtagcgtttgcttgcgttgaaggtatattcttctccggtagcttttgttcgatattctggttgaagaaacgaggtttaatgcctggcctcactttttcaaacgaattgatttcgagagacgaaggtcttcactgtgatttcgcttgtttgatctatagtcttcttagaactaagcttgatgaagatcgtttgaaagcgattgtttgtgatgctgttgagattgagagagagtttgtttgcgacgcgcttccttgtgccttggttgggatgaatcgtgagttgatgagtcagtacattgagttcgttgctgataggttgttggctgcgcttgggtgtgctaaggtgtatggtgtgagtaatccttttgattggatggaattgatttcgcttcaaggtaagaccaacttttttgagaagagagttggtgagtatcagaaagcttctattatgtctagtgttcatggaaacgctgcgtttaatgatgatcatgtcttcaagcttgacgaggatttt

SEQ ID NO: 165747 - DNA, 1516 bp, Arabidopsis thaliana landsberg
tatgtgtttaagttagaaaatggtctgtggtggtgggggaggggataacatggacgagttttttgctgttttacgttacaaggttccatcttcacacatggcatatgttgcacagaagcttgatcagtttgtaatatatttgatcaatgatattgcctcttctaaggatgtcttcaatgccaccggtcattacaatccttatgatctgttcggttgggctcagagcatgctctcggatcttaattactacccggatcttgacccgaaccggatttgcgatctgagaccaatcacagacgacgatgagtgttgcagtagcaatagtaacagcaacaagaggattcgactcggtccttggtgtgactcagtgaccagcgagtcaactcgttccgtggtgcttatcgaggagacaggagttagactcgttcaggcgctagtggcctgcgccgaggcggttcagctggagaatctgagcctcgcggatgctctcgtcaagcgcgtgggattactcgcggcttctcaagccggagccatggggaaagtcgctacctacttcgccgaagccctagctcgtcgaatttaccggattcatccttccgccgccgccattgatccttccttcgaagagattcttcagatgaacttctacgactcgtgtccctacctgaaattcgctcatttcacggccaatcaggcgattctagaagctgttacgacgtcgcgtgtcgtacacgtaatcgatctagggcttaatcaaggtatgcaatggccggcgttaatgcaagccttagctctccgacccggtggtccaccgtcgtttcgtctcaccggcgttgggaatccgtcgaatcgagaagggattcaagagttaggttggaagctagctcagctggctcaagccatcggcgtcgaattcaaattcaatggtctaacgacggagaggttatccgatttagaaccggatatgttcgagacccgaaccgaatcggagactctagtggttaattcggttttcgagcttcacccggttttatcccaacccggttcgatcgaaaagctgttagcgacggttaaggcggttaaaccgggtctcgtaacagtggtggaacaagaagcgaaccataacggtgacgttttcttagaccggtttaacgaagcgcttcactattactcgagcttgttcgactcgctcgaagatggtgttgtgataccgagtcaagaccgagtcatgtcggaggtttacttagggagacagatattgaacgtggtggcgacggaaggaagcgataggatcgagcgacacgagacgctggctcagtggcgaaaacgtatgggatccgccgggtttgacccggttaacctcggatcagacgcgtttaagcaagcgagtttgctattggcgttatctggcggtggagatggatacagagtggaggagaacgacggaagcctaatgcttgcgtggcaaacgaaacctctaatcgctgcatcggcgtggaaactagcggcggagttg

SEQ ID NO: 165748 - DNA, 357 bp, Arabidopsis thaliana landsberg
taccaatgttaccaagatcgccgggtaaagccaagatggtcccggttagatacagacgtgtttcttggcaaaaccggtggtgtcaagtttgaagttaaaggaaaccctaatatcctaacaatattgccgtacaatgtaggaggagccggagatattatagccgtgtctgctaagggaagcaaaaccgcgtggatagtaatgagcagatattggggacaaaattggactactaatgttaatctaaccggtcaaagtgtatcattgagggttacaacgagtgatgggattacaaaagattttactgatgtgatgccagcaaattggggttttgggcagacttttgatggaaagactaac

SEQ ID NO: 165749 - DNA, 1706 bp, Arabidopsis thaliana landsberg
gtgtatctatctccagggttatggtatttgcgagtcaatgttatagaggctcaagttttggttctgttgcaaggaaacagaacaaatccggaggttttagtaaaagggtttgtaggaaatgttgttgtgaggagtcgggtttcgcagagtccaacaatgagtccagttttggaacgaggatatgatgtttgttgcggttgagccgtttgaagatagtttgttacttagcttggaaaataaggtaggtcaaaaagaagagtgtttaggtatatgtgagataaagttgtctcaggttgagagacgggtattgccgggacctgtaccggctctatggtacaacctggagcgcgttggggactcgggattcgcagggaggattcatttgcgggtttcattggacggaggataccatgtgcttgatgagtcgattcagtatagcagtgagtacagagcttctgctaagcttctatggactccaactattggtgtattggtgctcggagtcatcagtgcatctggttcgattccgatgaagtcccgagatggtcgaggcaccaccgatgcatattgcgtggcgaaatatgggcaaaaatgggtgagaacaaggacgattgtagatagtttaagcccaaaatggagcgagcagtatacttgggaggtttatgatccttataccgtaataaccgttgccgtgttcgacaatctacatctataagtacctggaaactcaaatgatgcaaaagactcgagaattggtaaaatcaggatacgtttgtccacactcgaaacggagaggatctacacgcattcgtatccgctcattgttttaaaaccggacggtgtgaagaaaatgggagagattcagctcgcgattcgattctcatgtatttcgactatagatatgcttcagaaatactcagaaccgttgctacctgaaatgcattacctaactccgttgtctatataccaactagacagtcttaggcatcaagcaacacacatactctgtttgaagctaggtcggagtgagccgcctctaggaagagatgtaattgagtatatgctcgatttcggatctaacatttggtgtttacgaagaggcagagctcatttcgaaagaattgtgagtttcttcacaacgtttattgattcttggatttggtttgattcggtatgcaaatggaagagtccggtaacaacaattctcgttcactttatcttcttgttcgtcatttttctccctaagcactgagtcaccagtctccttttgtatggtttcgatatcatttgagaccgagacatcctcctcacatggatataaagctatctaaagcagattcggctttacccgatgagctagacgaggaattcgatgggtttccaagcgcaagatctgcggatttggttaggaacaggtacgataggttaagaggaattgcagggaggatgatgatggtttatgtgatttggcaacacaaggagagagagtgaagaatttgttgagttggagagatcctagggcaacgtttctgttttcgatgttttgtttagtggcttgtggagtaatcttcttagtctccatgaaactgctaatgactttgcttgcgttctacgtcatgagacaccctaggcttagggtttttgatattccttccgttccacaaaacttctttaggagattgccttcaagagctgatagcatgttg

SEQ ID NO: 165750 - DNA, 413 bp, Arabidopsis thaliana landsberg
  unsure (1)..(413): unsure at all n locations
cgtcgttatgcaaagagagacgaaaagttggagaggtagcgggaggagcggcggcggagtgtgcggctgtgtggtgttgttgtccatgcgcggtggtgaatctaatggttttagccgtgtataaagttccggccgcggtttgtaaaaaagcttggaggcgaagcaaacgacgacgttttacgaggaaacgacatggtttgcttgcgtcagcgacggcggaaggaagcgaaagtaccgtacacgctagattgaatgaagaagatctaacggctgagattgtttttgaggaatgtcatgtgagtggtggtgagttaaacgacgtcgtcaggcttgaaaatgaaatgttggatcgtttctatggggnnnnnnnnnnnnnnnnnnnnnnnnnnnnggacacgtcatcaggaagccta

SEQ ID NO: 165751 - DNA, 293 bp, Arabidopsis thaliana landsberg
cgtttctattccctcgtgggctccggccggtccggagcggtcctccatggctcctctcttctcgggaacccatacttccctcctccgtgtatggtcagctctctctcgagccctggtttaggttcggccccattgggcatctcatattgagctccttcctacgtatcttccccggcctagtgctccgaggtcgcccctttctttccggggtggcgcagggctcgttccgttcgagccttttcttcatgttatttgtctcttgcctcgcaacgggatctgctttcatccccgat

SEQ ID NO: 165752 - DNA, 1731 bp, Arabidopsis thaliana landsberg
aataaaggattcttgactcttcagttaatagcaagagagattcttgtgagtgaaagccatgaagaactagcgatgatcgtcgataatctctttaagcgtaaagactccgaagaatataaaacatcgcgagctctgtacgattactgcgtctcttgtaacctaggttgcttaaccctaaagcttcttaagctctatcaatcttcttctaatggcattctcagattccgatcactctatcaactctcccaaactctcaccggtttgagaaatcgcaaactctctctctcgactctctttatgaaatcaaaacccttttgattccatgcttgacaatgcaagaaaccaaagaatctgacgtgaagatccttagaaagatcgtgtcttgtgtagcttacaatgttgtggagttgcataaagacaaatgggacgagctcggtgattgtatcttatcgctagcgagtagcgaagaacctgtcaaggcgtttcacgtcttcatcgatatgccacctggctacgaggaactcatcaagaagtttctgacgattattttagagaaagctaaggaggttttgcttaatcctgaggaaagtggagttgaagaatggagcttggctttacaaactgttgttaaattagggattcagtttttcaatacaggaatgaaacaagatgtgataaagaagatattgagatttcagcttgtgaatattgtggaatcagctaagaagctagtggacaatggaaacgaaatgtttttggtacgtgtgcttcaagatttcgaaaggttcgtgtcaagagacatgaatctgtataagtacagtgaagtacaatgccgttttgtgtcgacgttcgtgagccagatcggaaaactcagtgaagttggaacacaaaccaatgagcttgtgacgaagatcaacatgttgtttacaaaacaacaacctcacgaaacacaagaccatggagaagaatttgatcgtgcctggtatgaccatttaaagtatttatcatcacttgaacttttgaaaatctttgcgtcaactgatcttgaagataggaccagagagatggctattagacgacttgaagttgtactctctcgtcacaattcaaaaaaggcgaaaatagatatttcagagatgagaaaactccagtcattgctcatgtcttgcttaaaggaacaaggagtttcatactctatgttccaagtcttaggtcaggtggtgaaccatgttgcctatgagatgttggtctaccaaggggagacatgttatgagctacgagattatattgcatcgagtaaaacagagtttcagatagcactttatatcttccagtgcttaacaatgccgcttgttgacgacgattttgtgattcctgttatggagaatcttttcccagtgataatcacaaggttagagccaccaacagtgttgttggtagataacagttgctgggtcttggcgtttacgggtgccttttgtgcggttattcacttgatagatgacccagattatgctgaatcccttaaggagattgcatataagatgatagattcagtgaggaagcttgtggaaagagaaatggaagttgggcttgtgaggagagctttcagagatgtggaaactatagtgaagaaacaactggaatggtaccggaagttagaatacaaattggttaagggactaaatggagactctatgcaatcaaaggcatgaaatgggaaagtaagtt

SEQ ID NO: 165753 - DNA, 739 bp, Arabidopsis thaliana landsberg
gctttttgttttttgagggccagattcatcaatcatgtctcagcattccaactatcaaatgcccactgcttctgattactattcgacaaaaccggtcttgtcagcgattagaagccacaaactcatctctagtgggtttgaaggaaagtgtccatctgactatgaatcagcttggagcccaacttctcctttggatttcagattgttctccactttagggaacccttttgctgcttcttcttcgaggtcaatctggagagggaaacaaaggagctgggattctggtaaagtaggcttgagcattgtgcattctcttgttgatgatcatcacactgattcatcagcaaggattgttttaccatcaccggatagtaaaaacataatctttggatctttgatgagaagtggccagaaacctcatctactctctcaaccctttaccaaagctttgatgcccaaggatgttataccaaatgctgtttttgagattggacatgatgtgattgatgtgcttgagcttcgaaaatctggctccgtcgatgctgcttactgttccggtgctgagaacttcagtgtgaacaacaatgcttgtcaggtgaccaagcaagacccaggatcacttaatgggggtactgaaagtgacatggagatctcagaggaaaacaaaagtgttatttcacatggtcctaaccccaaaaccacccatttttacggggatcaggttatggagtcagtgagc

SEQ ID NO: 165754 - DNA, 2009 bp, Arabidopsis thaliana landsberg
tgtactctctctctggcgaaccctcagaccacccatttttatgatgaattctgaaaatgaaaggcggctctagtaaagacctttgcacccgaccgaatgatatcgccggcccacattatcaatccacatgtactcttcaatccctcaatcgattgggagagctttgtcggattccggccgaaagtatgagggactcccagatgcccaaacccacagagtcgccggaagaccaccgacccgggttcttttgcgtgtatgagatttacttcaaagggtgtggcttgacttttcctctccccgaagccctcgtgcgttacttatcggccctcaaaatcgccttaccccagctaacccccaacctcctccggactattctaggaattatcaccattgcggcggaggccggatacgtcgtcagggttcccgaactgaacgaacttcttagtgtgaggagttcttcgaagaaagtcgggtactttctcgacttatccgaacgcctatagaaatctcatctcgcatcttccgaataaagacgagaactggcatcacccgtggttcctagttaaaaagagccctgcctcgatcgggaacgtcccagacttgctctccacgaagtggatcaccaagcccggtagttattagctcatgcatatgagcttcattttacttcctgccttatctgaccaattctatttttccacttcgcagcttttatagcacctacccttcctactactgagttcggcgaattcttcaagattgttatcgaaggggagaccctttggaacttattcactctcgaccgtttaatagaggctaattataagctcagaatgagtccacctagacagtttcaccaacttccaccgcctcctcctctacctcaacgaacttcagtcagggctgttgcttcccggtgcaagacattgtccaaaccgatggtggaagcctgtgaggcgaacaagtcgtttcttatgtctgctgtcgacaagaaagagtacagcagaactttactagtggatgacgacagcgctgaaggggcgagatctgccggtgctttcaaacctacacctcaccgtgaaagtcgtagcagtcgctcacctcgaagagatcgttctcctcgccgtgactctcctcgaccctcttcccgggataggttgagcagcgaaccgattgcagacttgatgcgaaaaagagagagaggccagcccgcagcaactcttcccctaggaggggcaaattgaaagctcggattgatcgctctccttaatcatctcccccacctcgatcaatgggtccccctcctccagtcatcatatcttcttcttctagatctgggggtgaaaagactggtcggagtgcagatcctcgacaggaagaggctgagccccgagatgccaaccctaagtctaaggccgttctagttcctcaaaccaaatcacttgcaggttagaaattaccatttatcctctttacttgctacatcgtttgattcatcggcctaacttctcatacacgggttcgaatctctttattactttgacagcgatggaaacagagggaaacttcttccaatgcttcaagactcggaaagacacaatcctgccaacctttgacaggtggcgtcctgcaattcgcgagcgattcctacttcacgcccatcactcatctcgggttagctctctttatttgtgacctttaagctccactctttcgcttatacgctaattcacctttgtaacccttggttcaggcaaacatcgaactcaatgacatgattaagtattatgagagattgttgcttgatagggaacaggatgttatggcctggaaagataagttttcttctcttgagtccgatctacgctcttccactgaagtcatgcaaaaattggaagatcaattggacaatctttccttcaaactcatgaaatcgaacggggagttgcaggatcagtatcagaagtatgacaagatccaggaggaactctcgaatgctcggggcagac

SEQ ID NO: 165755 - DNA, 515 bp, Arabidopsis thaliana landsberg; identical to SEQ ID NO: 67370

SEQ ID NO: 165756 - DNA, 4527 bp, Arabidopsis thaliana landsberg
ggtcttccggtgccgcctccgtctttggtgtctttggtaatttggacttctcagatcatgtgtcttgtggggttgtgttggatgctgatggtattagtgttaagcgtcccttcaagttctataattttctgttgaataatgaggagtttttgaatgttgttatggaaaattggtattcaactaacgtggttgggtctcacatgttcagggtttctaaaaagctgaaagccctcaagaagcctattaaagacttcagtaggctcaattattctggtatagagctgcgtacaaaagaggctcatgagtggtttttaaagcgccaagacctgactcttgccaacgcctctgatctcaatgcaaccttggaactggaggctcagcgtaagtggcttttgctttcctctgctgaggagagtttcttccatcaaagatccagggtttcttggtttgctgagggtgatagcaatacttcctatttccatagaatggcggattccagaaagtgttttaaccccataaagtcccttgttgattgcaatggggtggtgattgactcccaacaaggtattattgatcattgtatggcctattatgagaggctgttgggtgaggttgagactcccttctcgttggagcaagatgacatgaacatgctgcttacctataggtgctctcaggcgcagtctactgagatgtaaaggctgtttagtgatgatgagatcaaagcagctttcaaatctctcccgcggaacaaatctagtgggcctgacgggtatccggttgaattttttagagagtcctggagcgttattgggtcggaggttactgctgccattcacgagttctttatctctaggcagctccttaagcagtggaatgctaccacccttgtcttaatccctaaaacctctaacgcctctttcatatcagattttaggcccatctcctaccttaatacgctgtacaaagttatatctaagtttttgactggcaggttgcagggcttactttcagaagtgattggtcaatctcagtcggctttcctgcctggaagatctttagctgagaatgttctctttgccacggagatggttcatggttataacaggttgcatatctcaccttggggaatgctcaaggtggatttgagaaaggcttttgactctgtcaaatgggagtttgtcattgcagctttgagggcgcttgcaatccctgatcggttcatcaactggatttatcagtgcatctcaacgccttccttcacaatctctgttaatggggtctcgggaggttttttcaacagtactaaaggtctaaggcaaggtgatcccttgtctccctacctcttcgtgttagccatggaagtgttctccaagctgctttattctcgctatgactctggttatatccactaccacccaaagacaagagacctctctatctcccatctgatgtttgcggaagatgtgatgatcttttttgatgggggaagctcttctttgcacagtatttgcgtgacgcttgatgactttgcggatagatctggccttagagttaataaggacaaaagtcagctgttccaagcgggtctggatttaactgagaggagcgcctctgttgcctatggtttcccagaaggagccttccctatccggtacttaggtctccctttgatgtgccgcaagctgcgaattgctgaatatggtcctttgctggagaagctctcttctagattccgatcttgggtctccaagtccttgtctttcgcaggtcgggcgcagcttatctcttcggttatatttggcttaatcaatttctggatgtctactttccttctgcccaagggctgctttaaaaagctggaaggtctttgttccaaattcctctggtcgggtaatattgatgtgggtaaaggcgctaaagtctcttgggtgcattcctgcctcccaaagagtgaaggcagtttgggttttaagcggtttagtgagtggaacaaagcgcttcttctaaggcttatttggttcctgtttgaccgttcagattctctgtgggttcagtggtagtgccatcatcgtcttagggagttttctttctggcgggtggaggctaacattagtgacccttggagctggaaaatgttgctgaatctaaggcttaaagtgggaaatgtcttaaaggcttcgttctggtttgataactgaacttataagggccccttgattaagctcttgggtaatgttggattgagaccgctgagaattcctttaaacgcaaaggtagcggatgcttttgatgcttcgggatggaggcatcctctgccatggtcaatcacagctgactctatcttcgctcttctctcttcgctccctgctcctctgcctcatctggacagtgactgttacttttggagtatcaatggagacgctagtcagggcttctcagtcgccgcaacctgggagggtttcaggcctaggagttctttgaagggttggacaaagtctatcaggttcaaaggcgctgttcctaaacacgcttttaccatgtggatactaaccttaaccgtctccctacccttcacaggctgctttcttggggccttatcaactctgctgaatgttgcctttgctctgttgacaccgagacaaggaaccatcttctgctgctttgtgatttctcttctcaggtttggaggctggttttcctcaggctctgccctcgtcagcggctgttctgctcatggtaggagcttctctcttggacaaggctttcttcttcagcagctcctactctccttcggaaagtggtagctaatctcgtggtgtacagcctttggaggcagcgaaacaatgtcctccacaactctcgtatagtctcgtggtctgtggtctttcgacagatcgaccgtgagctgtgcaacatcatcttttgtaggaggcacatcaagcgttggcgggagcttatggtgctttggatccgttagcttctcccaaatcttatctagctctattgtaaccttgtttttattattttttccttggttgctttgctttggtaatatctttgtattaccctaacttcatattttatgatatttacaagtttagggaaaaaaaaagtatcttctaggtccaagtatgatttccgaagtttagataaagacaagaattcaagataaccccaccctttgttcggttccctgaaccagtaatgtttgtaaagtgagcaggacactttaaaatccataagtcaagaaccccaacaacatctacaattttcgatctcatgaataagctctaacaaaagagcatacatttttagtgaagtgatttcatccacgtgggtcaagaactcgcagatgtgctatcacgtaaatcttctcatccaccgttacggtttcactaccagataaccgcaaaaaaaaccattttttttatctcttctagggtctccctttggatacatttgaagatccctataaaacgttattatgcacgttttagcagttaccaaaaatggacatatataatacttttatagactcaccataatcttcctcccattgaaaagctttctgatacatagaactcctctttaagcaccgagaaatccttaacactccaggagaacttgagaatatcgagtttctcatcaaaagagacgacttcccacttggtaatgggtgaagcaaccatcacatcaacaccaaactcacattgttctccctcaaatgtgtatccattttcagggtcattgaatgtcttaagtgaaagaacttgtgataatccccacaccgttcttaatgcattgaaccgctttacttcaacatctagacgtatatttatacaaagatttctaatcaatgcatatgtgtgtatatatatatagatagagagagtaggctatgtatgtacgaaccttgaatggtaaagtatttgttttctttcttgttgtagacgaagaaaatgagatatgcgaacacctccattggtgatgtagacgagacttttgtgttgtcaaattccacactgaattttgctcagattgactcataacttaggattaataacttaaatgactcttgtaattgatggctgactagaatgactcacattttaaatctaaagacattttaaccctaatcagttttataaccagaattatactaaaaatgtgactttgattaaaaataaataaaatcattaataaaagaatggattaaataaagaaataaagaataaaaaaatttactgaaacctaaagcgaaagtgttttccccgactctcgaaatcgaaacccaaaaattgcatgtctcttctttttctttgatttcaaatcgaaaccctagcaaatctccggtggtggcttctcgatccgccaacttctcttctccggtggtggctcctctctccggtggtcgctgctcgactaggcgatatctcttctccggttgtcgctgcttcttctcacacaaaacggcgtttaactcttctttggttcaaacttttgtagccgccatatgttccggct

SEQ ID NO: 165757 - DNA, 713 bp, Arabidopsis thaliana landsberg
gtggatccgatcatacttgcgtccatgaaggtcactaatggaggaaatatataagaaaagagggaattagtgactgcatgatgcaactgataaagcagttgctaaatgttgtgactggattgcgactctttagcagttgaatggtgactaaaataatatactcactaatgtgttctttacacaaactctgctcgggtggatatatagcaacaacaagagtaagcggatgataaatgacatacaatggccaattttgtttgctgcaacactatggtggggatggaaatggcggtgtgcgaatgtctttggtgaaaacaagaaatctcgagatagagtgagctttgttagaagattggcgagagattacaccgcaaggtagcctaagtgggtcaacgaggagagtagagagggtggaaaggttgatcgcttggagaccgccaggtgagggatggctgaaggtgaacacggatggggcgtctcgcggaaatcgggtctagcagctcgggcgggggggggggggtcataagggatcatcagggtaattggtgcggtggcttttcggtgagtattggtatatgttctgcacctcaagctgaattgtggggcgtgtattatgggctctacattgcttgggagaaaccggtccccagagtggagttggaagtggattaaaagataatggttgggtttctcaagaccggtattggagattc

SEQ ID NO: 165758 - DNA, 1687 bp, Arabidopsis thaliana landsberg
atgaagaatctcgcaattcttgttgttgccatgatactcttctcaagctgtgtcacatctcaagtcacagcaaaaaatgtggattcatttccattacgtactgaagagctcgaatggtggcattacaatcctttctaccctcacttttaccctaagccacattggccattccccaccaccggaaaggctctcccaccaatcccagccggcttccacccgattccattccatccaccaccggttgtaaccaaatgcttggccgattgcaaggatgtaaaaacatgtttggcggatatcgctaaagctttcttcacccgcaaaccagctattggattggattgttgcgcctccatccagaagatggatgaagattgtgataagactgtctttggagcctaccacaaccctttctttgactgtatggttaagcttcattgctctaccaaagctaaatccactccgtctgctcccactccagcttagggttttaattaggaatttattagaattagaagtactgatttctcttagctagtttctttctttctttcttttcattttaagttatgttttttttttcactttttattatgctttactatgttactcttctagagttttaagtttttctttcttaataaagatatcagtgctttttatttattaaattttgtgcattgttatttgttatcatgcttacatttacgcaatttggtacagatctcataccacataagaaaaagaaaagaaaacttagaataaaattaaaattagtttgttatattttaaaaaatttacattttagaatacatgtctatctatttacaagatggctatagctttagagcaaatacgttcccaacctaccttgccagagacgagtgatatcgtgatctcgatttatgcgacctttacacgtttgagtttacaatcctaacaacatatttatatgcaaaacaaaccttactagttaatcttgcaaaattattttcattttttaataatgaactaatccaaaatttgggatcattcagtaatcatttcaacaactattacgttaaacaacattgcgctatccaaggaggttctactagatctcttaatcctatgtataatggatgatgcacaaggaacaaaaaaaaaaacagataaacgtatttaaaaatacggcaataataataatatcaaaagatattacaaatcaaagtcaaatgaaacttggttcagtaataaagggaaatgaaacttacttcagcaataaagggaaatgaaacttggttcagcgataaaggggaatgaaacattcaaatatccaaatcaatgcaattatgcattattaataaaagtcttcaaacatttgaagtaaatatatttcgattagcagataccactcgtcttcttcctgtcggcgacaaacttcttccagccagtgatgatatctctctgcttgtcgatatcgctcttcttcaccgtgaccatcaagttatcgctgttagattcactcttctcttgtccaagtgatattttgtgaatcactctcgaaggaagctcatcgagctcacgcatcactttctctatatcgatcacaagtctctcagcgagtgttctcgagaaatcttctctgataaccacacgaagaacagtgatgtgttgtgcatttggaggcattgtgtaggccggcactatc

SEQ ID NO: 165759 - DNA, 190 bp, Arabidopsis thaliana landsberg
  unsure (1)..(190): unsure at all n locations
accggttcccaagacaagggcctgtacggtcgtgcaacaactaccggccatttaagaggacctgatagaccaccattcgcgccgtggcctgctgcgcatggtcagccggcgacgcaaactgctggactacctgaagggccgcaaccccgactcgtaccgctcgctcannnnnnnnnnnnnnnnnnnnnnn

SEQ ID NO: 165760 - DNA, 1466 bp, Arabidopsis thaliana landsberg
atgaagagacacttaaatggttagcatatggtccacgtagttgcacaaggtcatatactagttatatagtgaatggcaacgatttcatacaatatcagtggataaaaaaactcagaatagtggtgttttctgtgaggcaactgcaatttgtaggtctacacatcttcatgggctacatccagagttttaatttggtttttatgttgggcttttcgttattaatttattttcttttctgggttttactttaccgatattgtcttagggttttagcttaatgcacaagtagtataagtaggggacttgcagctttattgttctttggtttttgattaataaaagagaattgctttctcaaactcttgttcgaatacatcattcaaacaagatcttttgacaagtttcttaaggttctgcaattctttaagtatcttgtcttttactcttctaactgctacattacaactgcaacctgtaggtctagtgcaaaagacacttctcaagtggtggattttgtatcatactatggctgcataactgacattatcttgcttgactattatgtattttacgttcctttattccgctgccactacgcagtagaaggtaatggagtaaagcaagaagatggatttacacttgtaaacctgaatcatagtcaagcctccttttaaagggatccgtacatactagcctctcaagcaaaacaagtgttttatttaagggaagatgatacatcacctcggtatgttgcaattagtggtcctttaagaagattcagtcagaaagagtttcaagattctgttgcagacattggcacattggcacattgccaccaaatattgacaacgatgttgacttggatgaagaagagaatgagagaattaattgtaaagggatttatgtttgaaatgtatctttttgatcattttcattccttctgtgtttgatgtttgatttccaaagtgtgtttgatatgtgatttaatttccattgtatatacttaactatttcttcttttatttttctcaggtgatttaaaatgggacaacaaaagaaaaagcgaggcggatgtaataaaacgaaggaagctaagcatgccaatgaagaggtcgagtatattcgtacagttgaaccagaaatcaacgatgaggtcgaaacatgtagcacgagctaaacttcaagtaaaagatccagatcatttggttgatgcaaagaatgaagtccaaatccctgataaagaccctaacgaggaagagcctgaaggagagcttgaattatctgaaggatatgatcgtgttgagcctcagcgtaagagacagcgaggaccaactaggctgaaggatatttccaaggatccaaatactagagtaagagtagagttcactaacattggagagcctattagtaaagggtcagttaaactgtcatcatatgtaggggcattggtacgagaacacgttcct

SEQ ID NO: 165761 - DNA, 358 bp, Arabidopsis thaliana landsberg
  unsure (1)..(358): unsure at all n locations
cagccacgccgaggcactgcagaagaaaaaactttcaaaatctttatccaacaccaccggaaacgaggagcaaacaggaaggacaaccgcaacccgaaacacggaaaaaaancaaaggcacaacaaaccaaccaccgagcccaggaaaagaagcaacaaaagacagaaacaaaggccaccaccccgaaagaacgacaagccaaacgaggagcaacacccgaacagcagcaaaagcaagacgcagaggcgggacaacccaccaagggcccaaagaaaaaggacccacgcaaggaaaaagcaccgacaaacggaggacaaaaggggcaacccgaaaacggacgggccgaaaaacgggcca

SEQ ID NO: 165762 - DNA, 697 bp, Arabidopsis thaliana landsberg
  unsure (1)..(697): unsure at all n locations
atgaaactcttactgttattacctccatagaagtcattagttagatgtgtatatatacctgaatacaagtgtctaaaagtgttaaatgttcgtgatctcctagcgtgtcttaactcatcgaatatttttaatgctgctacccctactttgctatatgatggaactttagagtgtggtgtgtttgatactacaccagtttggtctccttnnnnnnnnnnnnnnnnnnnnnnngtttcagacacttcccctgaccctcagtgttaagaagaacaatgtcccagatcttacgatggtcgatcttcccggtataactcgagttccagtgaatggacaaccggagaatatttacgaacagatttctaggatgatcatgaagtacatcgagcctcaagaatcaataatcctcaatgttctgtcagctacggtcgacttcaccacatgcgaatccattcgcatgtcaagacaagttgacaaaactggtgaacggactctggctgttgtgacaaaggctgacatggctcctgaaggtctcctgcagaaagtaactgcagatgatgtgagtatcggactaggttacatctgtgttagaaaccgtataggagaagagacatatgaagaagctagggtgcaggaagatttactcttcaggactcatccactgctaagtttgattgatggtgacattgtcggcatcttg

SEQ ID NO: 165763 - DNA, 512 bp, Arabidopsis thaliana landsberg
atgaacccgctcgttaagtacaagctggacgctggcgtcgccaccctgcagctcgacgacggcaaacgcaatgcgctgtcgccggcgatgttcgaggcgatcaacgccgcgctcgaccgcgccgaggcggatcgcgcgatcgtcattttcaccggtcgcgaggaagtgttctcggccggcttcgatctcaaggtcatgaagggcggcggcgtcgaagcgctgaagatgctgcgtgccggatacgcgttgaccgcgcgcgtgctggcccatccgtatccggtgatcgtcgcctgcaatggccacgtgctggcgatgggcgtgttcctgatgctgtcggctgactacatcatcggcacgcggggcgacttcaaggtggcggccaacgaggtcgcgctgggtctgacgatgccgcgcgtcgccgcggctatgctgcgacatcgcctgcaaccggccgcttatcagaccgccgtgacgctgtcgcgctacttcccggtcgatgccgcgcgcgaagc

SEQ ID NO: 165764 - DNA, 2177 bp, Arabidopsis thaliana landsberg
cttagaataaagacaaagattcaccgaaacttccttctaagaagagaacttagaccattgaaatgatcggatctgctgggagctcgactaatttaaggttggagctgtctacgctaacactcgcggtaggccaacaataccgtagcaaattcgagttggagtatcgactcaaacttctggcgataagggatggatttgattttgatgtaccaacgtctaatacgactacagtatattacgagtgttgggttgacggatgttgttggagagttcgtgtatctagacaaggggatgatccttatttttatgttcgtatatacgattcggaacacacatgttctctgacggaacgttctaatcgataccaacaagcaacacctgatgttctgggagttctttacagggactatcttggtgacgttggtccggatgttaaaccaaaaacagtcggaataatcatcaataagcattttcgagtaaaggtaattacaatgttttggctgacttattttttatttgttggctgactatagatattttacggttgacttattgatatagtatggctgacatataattacatttcggttgagttatgaccctttaaaggctgacttaagatcactttgtggctgagttgtggtatagtttgactgtgctgtaaatatattatagttgacttatcgattaatatgtctgtgttaacagatgagttattcaaagtcatacaagacgctgaggtttgcaagggagctcactctggggacccatgatagtagttttgaagaactgtcttcttacctatacatgataagacgggcaaatccgggtacactcgcgcgtcttcaaattgatgagagtggaagattcaactatatgttcattgcatttggtgccagtattcgctgggtttcattacatgcgcagagttgttgttgtcgacgatacctttctccatggtagtaacaaagggacgttcttgacagcccttgctcaggatggtaattttcagatttttccgttagctttcggtgtagttgacactgaaaatgatgattcttggcgttggttttttacgcaactcaaagttgttattcctgatgcaacggacctggcgataatctcagacagacataagtcaatagggaaagcaattggtgaagtgtatccgttggctgctcgtgggatttgtacttaccatctctataagaacattttggtaaaattcaaaagaaaagatttgttccctctggtgaaaaaagcggcaaggtgttataggctgaatgattttactaacgcgttcaacgagattgaagagcttgatcctctactacatgcataccttcaaagagcgggtgttgaaatgtgggcgcgtgctcatttccccggtgatagatacaatttaatgactacgaatatagcggaatcaatgaacagagcactgtcacaagccaaaaatcttcccatagttcgactgttagaagcgataagacagatgatgactagatggtttgctgaacagagagatgatgcgagcaaacagcatactcagctcacacgtgatgttgagaaactcttacaggtaactcagctgtaactagtgcataactcagtcgtcgaataacgataacccagtcataacgagaataactcagccataaagggaataactcagccataacgtatttgttttgtttcttgtctcctctctctaatagacccgcgtcacctcgtcaagacttctggatgtacaaacgattgatgcttcccgcgttcaagtagcttatggagcatctttgcatgttgtaaatgtggatgaaaagaaatgcacatgccgtcttttcgacaaagagaaattaccatgcatccatgcaatcgcagctgcagagcatatgggtgtgtctcgtatatccctgtgcagtccttattataagagcagtcatttggtcaatgcgtacgctggtgcaatcatgccttcagatacagaagtccctgttcctcaaattgtaattgaccaaccgtgtttgcctccgattgttgcgaaccagccaggcaggcccaataaactaaggatgaaatcagcactagaagtcgccgttgagactaaacgccctaggaaggaacacgcatgttcttgatgtgaagaaacagcgcacaatgttaaaacttgccgtgca

SEQ ID NO: 165765 - DNA, 1080 bp, Arabidopsis thaliana landsberg
  unsure (1)..(1080): unsure at all n locations
tagtctcttgagttaaacgtccntattgatatgtgttaagccatttctttctttgataagcagttttgtatttacctcaatacttgtttgttttaggactttgcaaacagcggtcggaacttttggtggggaaggttacaaagatggtgttaatacacctctgcttatgaccgcaggtgctgggaacagcgatcgtcctgctatatcaagcttaaattgtccaccgttcattgtggttgaatcctgccgagaacatttggtatgtttacttttctaccttttgcatgaatggcattttcttgagatgaaaacttttgcaatgttcttggttcagggtgttcatccttgtgacagaagaagcaatatcaccaagtaccgtgaattattccctgcgattgatttttcattggcaagtacctaatctatagaaactatgattgttttggtgttttttcttatgttttcacatgttctcatatccatgtatacagatagaaactgatgtagatgtcttgtggaagccccccatcacagaggaggatcaagatattgcgaccagagaagtgaagttctttaactggtgaatatatgcaatgcttaacatctctatgtgcatgatgttctatgataatcttggcatgaactttgattgatatactaattactgaattcaggttgagtacaaggaaagaaaaggagattgcggttgttactcatagtgggttcttgtatcaaacattaaactcatttggaaacgattgtgatccatccgtgaaaaacgaaatttctaaaaagtaagagttcctcctctctcttttgatgattttctattatttatgttgtcattatctcaaattctttttttgtgttgcagatttgtcaactgtgaactccgttcatttgttcttgtagataaatggtaagtcttgttgtttattcagacaacgctcacatttgatacaataaaaaaaaaatgttaaaattcatattttctcaatttcataaatgcagcatgagcagttcgaatcctacaatgaacaactatccctgaaaaatacttgccggagaagatgttcgtag

SEQ ID NO: 165766 - DNA, 944 bp, Arabidopsis thaliana landsberg
tgaatcaaattagaagttctaaagattataagaaaattcagtgaatcatatatatgacaaattgtatgagtagttcttgattagatagaaccaatgactagtgttcaagaaaaaaaaaaagatagatccagtgacttacaaaatggggatttaacattttagcttttttataaccgcaggcaatattcggagtctatgatggtcacggaggaccaacagcggctgagtttgcggctaagaacttgtgtagtaacattcttggcgagatagttggtgggaggaacgagtcaaagattgaagaagctgtaaaacgtggttatctagcgactgattctgagtttctcaaggaaaaaaacgttaagggcggctcgtgctgtgtcacggctctgatcagcgacggaaatcttgtggtggccaatgctggtgactgccgtgctgttttgagcgttggaggattcgcggaggccttgacttctgaccaccgcccttccagagatgatgaacgaaacagaattgagagctcggtaagaattcttgcaaaagaagttactgttaggttttatcatgattacatggttctgattacgataatcctgcagggcggttatgtggatacattcaatagtgtttggagaattcaaggatcattagcggtatctagaggaataggagatgctcatctcaaacaatggataatatctgaaccagagataaatattctccgaatcaatccccaacacgagttcttgatcttagcatcagatggtctatgggacaaggttagtaatcaggaggcagtagacatagctcgaccattttgcaaagggaccgatcagaaacggaagccattgctggcttgcaagaagctcgttgacctctctgtatcacgaggctccttggacgatattagtgtgatgttgattccgttgtgccacctcttctga

SEQ ID NO: 165767 - DNA, 1124 bp, Arabidopsis thaliana landsberg
  unsure (1)..(1124): unsure at all n locations
ccagaaaagtgcttaaactcagtgttttcctagttactacttaaagccttaaccaatttattctcctcaggtgaaaaacttgtatgttggaaaagactttgtaggtgatgttccattgagcaagaaaattcttgctggtttgacaacaggtgagcataacgatagaccagcttagaaaaaacacgtaatatatatttcctctttatcacttagttgggttgttgttgttgtcacactctcaggtgcactgggtatcatggtagcaaatcccactgatcttgtgaaagttaggcttcaggcggaaggaaaattagctgcaggtgcgccaagacggtactctggagcgctgaatgcgtattcaacaattgtgagacaggtagttggcccgacttggaagttgagattgtgcataatttgcttcaactctgcttcctatcttattaatgtggctttgacaggaaggagtccgagctctttggactggtcttggacctaacgtagcaagaaacgctattatcaatgctgctgaattagcgagttacgatcaagtgaaagaggtatgaaactaatttattctctgtctctctttctaactaaaagatcctgatatttgaagcaaccaacattcctttttttttgtgttcagactatcttgaagattccagggttcactgacaacgttgtcacacatattctatctggactgggggcaggattctttgctgtttgcatcggttctcctgttgacgtggtaaagtatttacacatgacattgaaccttgagtttgttcactacgtttcctgattctctaattgaatcttgttgtgtggcaggttaagtcaagaatgatgggagattctggtgcttacaagggcnnnnnnnnnnnnnnnnnnnnnnntctgaagagcgacgtaagcaactctgcttctgatacctccattgttctatatataacccagaaaatgttacaaaatctttacggtttcttctacagggtcctatggcattttacaagggtttcatccccaactttggacgccttggctcatggaacgtaatcatgtttttgaccctcgaacaggtaacaactgatagaacttttattttatcgcaattgcattcg

SEQ ID NO: 165768 - DNA, 1599 bp, Arabidopsis thaliana landsberg; identical to SEQ ID NO: 26075
  unsure (1)..(1599): unsure at all n locations

SEQ ID NO: 165769 - DNA, 3041 bp, Arabidopsis thaliana landsberg
tcattatcatgtacggacaatagtattaataaaattctgtttatccaattgcatgagtataatatttattgatacataatctttgatttacagtttgagtttaaacatgacgaagaatatctggcgtctgttgagggttactacgagggccacgaggaatgtgaggtcattcagggacttcaatttaggactaacatcaagacttcagaacttatgggatccaatacgggtaagaaatttaaacttacagccagtggaatgaagattgctgggtttcatggatatgccgagaagaatctaagctctcttggagcatatctcacaccgcttactccaaaaaagtcggaatgcaaaggcattactgatggaagcaatgtctggaattgggatgacggtgcttttgagggtattagaaaagtgtccgtcttctttacagctcttcgtataaggtgtctcatgatcaactatgaagacgctggcaaagtagtaaagcgtagccatggattgaacaacaatgatcatcaagaagagaaggtcagaatacttataactaactatatattcgtctacatatatgttgttgatggttagcttattctgtttttacagtttgttgttgactatccaaatgagtttatcacgtctgtggtggggaccatgagttctagttcggttatgccattgatttttaaaacatcaaaagggagaacctctaaacaatttggagactattcttttgatgattcagttgaatttgttctcgagagcaaaggttgtgctatagtcggatttcatggatggcataaccctgtgtctgggtatatgacagctcttggtgcatattattatccaatgcctcttcctcctgcggcggaaaagctagaagcacaaggtggtgctggaggagctccttgggacgatggcagtaatttccaaggtgttagaaagatatacattgggactggtgaggttggtatcgtttcaatcaagtttctgtatgaaaatgacgttcatgagatagtagtgggagatcatcatgggaacaagaacctacttcgacatgaagaggtgattactactacttcagcctttatccaattatacaaagcttattgtatattagatctttgatgttattcttttggattatcttgtttttaaattgtagtttgacttggactatccgtctgaatacctcacatcagtggaaggcagttatgatgtagtacctggaagtgaagaatatgaagttataatcatgctcaagttcaccactaacaagcgaacttctccatgttatggactcgatgatgacccaatcttcgtgctccacaaggaaggtcacaagatcgttggtttccatggaaaatcaagtaacatgcttcataaacttgggatccacgtgctccccatctccaactcctgatcatatttatatgatttaaaacgaacattatcctttcttagcaaaaaaaaaacgaacattatcctcctctgttttcaaaaactttgattcgtttctcttcttttttatttcctctgttttgattctctgtatcttgtgaacttttgaatgattcctctgtttaataaagtgtatggagttggactgaagctcgttgtgacttctctgtattctttttttttttgtgcaccaaacttctctgtattcaataggctgtttcaagaagcgagattccacgaaaaagaaagacatgttttatgaattataggtggtcttaacttgtctgcttcgaagcttcaggaacaatattctggtgtgaaactcgttggctttgacatcttcaagcatctctttgatattcttcactctccttctaaatccagtgaattgacaaatcaactgagtaataaactactcattgtaggtcaagagaactactcaagctcaacacaatcacaactcctgctggtggttagtctaatctaatggaacgtaagaaattggtcctatggccactagaatagaacaaaatagatatattagcatcttactattcatctactctcatacaacgtagagtgcattcctcacactcacgtttaagagcacgtttaagagcatcttactattcatctactctcacaaattactattgaactctttgttaatgaatctgaacactgaaactagtaaagtttaacaacggagaccattcatgccctatatatctaacattactcatacttctcatgacattagctcggctacatactctgagctatatagtacaataagctgagagaagagaacattttcatcttttttggttgaggctagaaacatataagacatgagaccattgcaaaggaaaagggaatggtgaaaaaaacattctcatattacataactagggttgatcccgtgctacgcacgggtttgctttacatgtaattccgctaattcaaatttagaaataataattttagtgaatattgatcgcattggctgtaatatgtttgggaggaaaaatatataaacactaaaaaatttcatttaagtgtttatatgttatttaggatttgtactgaaatttattagttatgtttgctttattgataaaaaaatgtatgataagatcatatttattatgttttacaattatgtcattatgtggctttgtaatgtaaccaatttgtaatacatacgtggtgaaatttgtgattgcaatatagattgttaatcttcttagatcccgtaaatcggcaagacatatttaataatcattgccttcgtcttttgtggcttgaatttgcgttttattaaggttttagattaccagtaagacatataatcttgtggaagcatttggatagagatctttgagttcgtaggagacttcgagtgtttgtgttttgtgtcctccatcagagacaatagtatagttgatagtgtaggttatgatgttttcttgacagaatactatgagatggagttagtccttgatttattcgtttagtctattattttctttttctgttttctgcaattcattgattttagagaaattaattgttat

SEQ ID NO: 165770 - DNA, 1251 bp, Arabidopsis thaliana landsberg; identical to SEQ ID NO: 10515

SEQ ID NO: 165771 - DNA, 1220 bp, Arabidopsis thaliana landsberg
atgtcgttctctggaaacgactattcaaggttccgggctcagcagcgtggaaacacgcttgtcaatgaagggacctcttctacggttcagggtaatggtcaaaccgcgagaccttagacgcctatcaatgtcaaccctcaagcaggcggtgcctctccgcatgatgcaaatcagtcccccaacggttctgtcaatcatgctaatcctctagcttctcagctcaacaacatgactcaagatgagttacttgaaagtctcagtcgagctgggttaccgagattagaccctaaccgtcctctgagaactctctcgtaagcaacttgtgttttttttccttagaatatttagtcctagtctcagttcactgttgtctgcctgatggagccttgtgtttgtaggtttgacgatgacacttcagttgcatatactgtccggagcatctttaaaagagatttcaaggagcctcatgctaactggtcaatgccaccccaatcaatggttgatcgctggtttgaaacctttgctgtaagtccactaaattatgttttgttgtgtaaagctttttagttgctgttagtccaactaatttttgatgtcacttgtgtctgttttgtagcaaatgtataattgggataaagcaataaacaagagagttaggactgagtttgaagcaaagctgaaggagaggatgtctgatcaagtttctcggtggaagggaaagtggacagaaaagggagatgcggcgatgcctcgctggtttgatcttgaagtgtgggccggtcttgttagttttttgtgagaccctaagtcagaattgaagagtatcaacagtaggaatgcaagattacatgatccggatggcttcgggattcataaacaccggtctagccaatcctcttacaaagcccgtgcccaaaaacgtgtaagttattttacacgcttacttagtcaactttgttacattaaaaaaactaacctgatttgtttctgttgtagtgtgagatgaccggagaaactactccagattttcttgtactcttagatgagacacatagaaaacctgatggtagtttcattgatggaaaatcagaggagatctacaatgaactgtcatctagaattcaagaggaagcatctcagatgtgttccgacaacacgacggagagcacagcttcagcgggtttatctgttcaggccaagaacacgatttatgttgcggt

SEQ ID NO: 165772 - DNA, 1322 bp, Arabidopsis thaliana landsberg
tttactcgcgacagaggatctaaactcgttagaaagatcacaagcgatttttaatcaaaagttcaatgctctctactataattggtcatgtgtgccattggctaaaagagagagactgtttttagagttcgcggtaagctttctgtatatctgctcctgtttagtcattgtttttagagttttatagtctgctcaagttcagttcactaacttcttccttttttgtagaaaactcaccactgggatccattaatcacaaggacagtccaatattacttcaatgagatcgtcaagaggcgcttgaaggatatggttaacaccgcaaggagaactcgagagcagcctccatggattggagaaactctgtggggaacaatgtgtgcttacaaggacacaaaagaagcatagaaaaagagtcagacctatttcaaagctcgtctctctgaccctaacggtctcggtccacacatccactactctgggccaaagtcttatcaagaaatccaagataaattggtaagtgtttctgcaaaatctcatgtcttttagtgacattcaaatcataagttagagttttattgtgtgtgatgtttagttcaagctgtcagttgacttgtgaggatattgatctatgtttgtaggaagagaaattgggaagaccggtccatcttggtgaggtgttcatccaaacacacactaagtcggatggcacttatgttgatcggaaggcggagaagattgctctaacttatgagcagaatgtgagagataagctgtttgaactggaggctgcagcttctgctgtctctgatggcactccacgacctcgggatctcacagtagatgagtatacaaccatctttctcgaggtaagatgttgtagtctaattcagagtcttagagtccattgatgcattcagtcactaattgtcttcctctctatttcttgcagtccatagatagggattcaagaggcaatccttgtggacttggatgtctgaaagacactctaggcagtaccaaccgtcaaccgccaactcgccggagactcagaatcctttcaagccttagaagaacggctgcaggaagctcaacggaaaattgaagagcatgatgcatataatgagaagcgggatgcggagattgctgcccgagaagctgagtcagcccgagtcatagctgagcaaaaggacaagctcgaacacttgtccttagtcgagaagtatctccgccaaaccgatccgcaattcttggaattcatggccactcactcttccacatccactgagtgtctcccaagtaccccacctaatactccatag

SEQ ID NO: 165773 - DNA, 1188 bp, Arabidopsis thaliana landsberg
gttgcttctttcagcttctaaagacaagacagttcggttatggagaactggttgtgatcaatgtcttcatgtcttccatcataacaactacggtaagtattttttgcatctcaagttgtttgttctgaaatctttgcaaaaacgtttgttaactcactcatgttgcttttgtctttcaaatacagtgacttgcgttgaattcaatcctgtaaataataacaacttcgcaagtgggtctatagatggaaaagctcgaatctggggtttgtcagaagaaagagttgtcgcttggaccgatgctcgtgattccatttctgcaatctcttaccaaccaaacggaaatgtaatttgacattctctgtctattctctactcaaaagatcatcctttctaaaaaaactcaactttgctctgtttttgcttcaggggtttgttgttggttgcatcactgggaactgtaggttctatcaaatcttagataacgatgtgataatggatgaacagattcttatccggggaaggaatagaatcaccgccgtggagttttgtcctggaagctccgagaaaattttagtatcttctgaagattcgaaagttcgaatatttgacaaaacacaaatgattcacaaattcaaaggtataaaaaaaaatctttgaatcttgattttacacttcttgaaatctgtgttttgattattttttttataaaaaaattcagctccatcgaattttgggagacaatcgtcggcgtcgtttgtttcttccaccggaaaacatattttatcagttagacgaggtgtcggagtttatctctggaacaacgatgcgtttccttcgaggaaaggcgcaaaatcgtcgcgttctttcgagtattttcattcgccgggggtttccgcggtggcggctcggactcaaccggaaacaaaagtgtcgaaagtagccggtgatgatgaagaatcacggcgcgttatgagaaaaatacagagctctgggagattgtctcgctcctgtcgtgttaccgccacgtggccggaggagaagctccttatgaatgtaggaagttacgatagtaaccttcccgtcggcgagtttgatcttgccgaggcgtggagactggtgatcgtgactgtgagcttggatgggatgattaggacattccataactatggactgccacgtacattttag

SEQ ID NO: 165774 - DNA, 807 bp, Arabidopsis thaliana landsberg
caatgaagatatgggttaataatcctcacccataatcagctttcagcagcattctcccatgcgttgatcagcaaacagcaaaccagactctttcacatagtaaagttgttatcaccagcatcgtgaccgttgtaaacacctttgtctaggctgttgccaatccaaacccagctccaggtcaagaccgctattacaaccagtctggacctccgatgcctcctttatgcatcccatttgatgcaaacatgaaagatcgccagtgctcgccttgggaactatcaatagaaaatgcatcatcggtattttcctactcacctatctttgtatatcttgaacaaaacaccaccaggtctgagacatgtcttactaaacttctcttttcaggtctgggagaattacaaatgcgaggttacaccatctggaatctgcaccaccgtggggagagtaacgccagatacctttggacagttggtagcagctgtgaatgagagttacgctctagagcattacacgcctccattgcttagcttccgagattgcaactttgttagggaaacatttatgagtattacctcagattactgtccaccgttagtacgtaatctgaggattgtgaacgcaggactcggactgatctccgtaggagtcttactatgtctggtgctatggatattctatgcgaaccgcccccaaagggaggaagtgtttgcggatccacaccctcaaagaaaagatgatagctttggtaacggcttggatactcatcactcagatgacgaacttaagctttctgtagaatgcgtatag

SEQ ID NO: 165775 - DNA, 2649 bp, Arabidopsis thaliana landsberg
  unsure (1)..(2649): unsure at all n locations
ggggatcaatttcgacgagggggcgagaactgccctcgcttttgtccctttgcgttctgacggagaaccagagtttatgttttccgggaatcccagcgccgatatgcttttcgggccagatgaactgaatcttgaacttatcagatccgtacgtaaaatctttctctttgttttcaagattgttactcgttctatctttttatttattacatttttctcttacaaggtttttaaatttctaaaacacgcaattttataaatttccttcggtaataatatgccatgtgtaattttaaccctaattttactcttataatttgaaacgtaaatcaaagaaaggtgataattaaatcaatacaaggcgttaattaataaaattttgtaaattgcaaaccaatctttccttttacggttaacaaatgaatattaaaaaaaaaagatgttgaaggttatgaagctatgactttatttgaataaaaatacgatttgatataaattttatttgtttgtgcaggcgaaagtgttccactatggatcaataagtttgataacagagccatgtagatcagctcacatgaaggcaatggaagtggcgaaagaagctggagctcttctttcctacgatccaaacctcagggaacctctttggccatcacctgaagaagctaggacacagatcatgagtatctgggacaaggctgacatcattaaggtcagtgacgtggagcttgaattcttgaccgaaaacaaaaccatggatgataagacagcaatgtctctatggcatcccaaccttaagctcttgcttgttactctcggcgaaaagggatgtacttatttcacaaaggtaaacatctttttcgattacttgttaataaagaaactacttttgcaagtcttgattgggacaaaaacacttgtgtagaaattccatggatcggtagaaacattccatgtggacgccgtggatactaccggagctggagattcgtttgttggtgcacttctacaacagattgttgatgaccagtccgtactcgaggtgggtactcaactgaatgaatcttccttagttgatcaaaatgcgatttactgatgatatctttttttctttaggatgaagcgaggttgagaaaagtgctgagatttgcaaacgcttgtggagccatcacaacaactaaaaaaggagccattccagctcttcctacagacattgaagctctcagttttcttaaagaccaaaagaaacgtcaaaccaatcttaaattctcaaaatggtgttgtacggcttctccttgttaattttgattttgtgtgagtttagatccaagctgataagtcttatttgaaataaaagatcccacagttttttttttaaatcagatttaagagacctaagtttatgcgaaagtggaattgaaccaatgccgaatgtaaaagtcaaagaactgttatttcatatttgctgctccaccaaattttcctttttgttagtcatagatatatagacgaatccatctaatccattatatcaaaaatttgttggtgtattcatagatatatagacgaatccatataatttgaattaaatttaagagtgttgtgctcatcaactatccaaatgttttaattgccatgatcaaccatataggaatgtttcataaccatatagaaacgttgaattcattgaaccttttaaaatttcttgtttcaaaaggtagtccatacattaattattaagaattttatcaactacaattatggaaaaaatgatattcagatagaatttttttttgctcaaatgttaatatatctgaaatcaggatatagtataactggaatttctaaataaacttatatattccactgttcaaaccttcaaggatttaattatttatgatttgtcatttttctttataaaaagccattaatgtgaagaaatatgacctcaaaacaagatttaaaccctgtcttcactctcctagagccttatataaactactcaaaacttcgttcactcttcattctctctatcgttttcattcttcgatctctggaacacaaaatcgatcttgttcaaatgacgtcatccaacggcgataataaaggtctcgtcgttannnnnnnnnnnnnnnnnnnnnnnntcgtgcccacggaatccggcgtctccctctctgaatcctctggatttctcaaagctcctggtggtgctccagcaaacgtcgctatcgctgtttcccgtctcggaggtcgcgccgccttcgtcggaaaactcggggacgatgagtttggccatatgcttgccggaatcttgagaaagaacgatgtcgacgatcaggggatcaatttcgataaaggagcaagaaccgcactcgcttttgtgactctgcgttctgacggagaacgagagtttatgttttaccggaatcccagcgccgatatgcttctccggccagatgaactcaacctcgaactaatcagatccgtacgtaaaatctttatgatctctgttttcaagatttcaagattttacttgttttggagatttgatgaatatttttctttatttggcaggcgaaagtgtttcactatggatcaataagtttgattacagagccatgtagatcagctcacatgaaggcgatggag

SEQ ID NO: 165776 - DNA, 565 bp, Arabidopsis thaliana landsberg
tataggttctcaagaatctcaaccagtggtagattcattaataaccatataaaaatattttaatcatataatcgagtctgattgagtaatttctgttacaagttaaatattaaagttttatctcacagatagtaatgtaacaaattatatcattcaaaactcaaaacccttaatttgtattattttttcgcagtttttgtgaatggaaagttttgtaaagatccaaaactagtaactgccaatgattttttttattctggcctaaacattcccggaaacaccagcaaccgccttggtgcatcggtcaccgatgttgatgtcagaagaatccctggtctcaacactcttgggattgccattgcccgcttggatttcgcccccggcggtcaacttccaccgcacatacatccacgtgcctcccagatcatcttagtcctcaagggacagctctcggtcggatttgtgtcgtcgaacgactacaactatacactcttttccaagattctttaccccggagatgtgtttgcttttcccatcggtttggtacagttccatgctaacactg

SEQ ID NO: 165777 - DNA, 4855 bp, Arabidopsis thaliana landsberg
atgtctacgacggaaccgtcgcctgagaatgatcgggatccacaaccgaccaccatatctactccgacttccaccaatgcgaagcttctgaagaagatccctgcgattcctttccgccattcggataaggaaggagaagatgaacaagcgaagacggacgaggttactacggaattagctggggaaggtccgatgagtcacgattcgccggaaattcttgctccttcttccttaggtttgaatcatatcagaacgaaatcgtctcctgcgccgtctcctttgagattttcatctgccacgcctttgatatctccgggtcaagatgataaagacgtcgccaaggagaaaccgagggttggtgttgttgatgctcgtgctgatgctcgtgccagatggccgattcctccacatcaacccgatcaaggtagatttctcgttgattcgatttaggatttatgaattcgaaaattcaacttagatgatgatgattcagaggatcttaatgatcaggaggtgtttgttgttttgtcttttagggaaaaaagttcagtggagtcaatcaaaatctcaacgagtgcctgcaaattcaaatccaggggtagaggtgaatgtcttcttctatgtttgtttttcaaattcttggaaaattttatattgctgattcgttttttttgttgttcttgtgaatgcagagtactcatgtaggtcttgccaaggaaacacaatctccacgttttcaggcgatattgcgtgtcacaagtggaaggaagaagaaagctcatgacattaagagcttctctcatgaacttaattctaaaggtgtgcgaccttttcccgtgtggagatctcgcgcagttggtcacatggaggttagtgttggttgatgcttcttctcacctctgataagttctgctcatttggttgatgcaatctgtggaacgttttacaggagattatggcggcgatcagaacgaagtttgataagcaaaaggaagatgttgatgctgatttaggagtttttgctggctatttagtgacaactctagagagcacaccagaatctaacaaagaattaagagtgggtctagaggatttgttagttgaggctcggcaatgtgcaaccatgccagctagtgagttttggttgaaatgtgaaggtattgttcagaagcttgatgataaacgtcaggttctttccatgggaggactgaaacaggctcataatcgtcttcttttcattcttactcgttgcaataggcttgtgcaatttcgtaaagagagtggttatgttgaagaacacattctgggaatgcaccagctaagtgatcttggagtttatcctgaacagatggtggaaatctcgcgacaacaggaccttcttcgagagaaggaaatccaaaagataaatgaaaagcaaaatctagctggtaaacaagatgatcagaactcgaacagcggagctgatggagtggaagtaaatactgctagaagtactgattcaacttcgagcaattttcggatgtcatcttggaagaagcttccatctgctgccgagaaaaaccgtagtcttaataacactcccaaggctaagggggagagcaaaatccaaccaaaagtttatggtgatgaaaacgctgaaaacttgcatagcccgtcaggccagcctgcatctgcagacagaagtgctttgtggggtttctgggcggaccatcaatgtgtgacatacgataattctatgatttgtcgtatctgtgaagttgaaataccagttgtacatgtagaagagcactctcgaatatgcacaatcgctgatagatgtgacttgaagggaataaatgtaaacttaagacttgaaagagtagctgaaagtcttgagaaaattctggagtcatggacgccaaagagcagcgtaactccaagagcagttgctgatagcgcaagattatcaaattccagtagacaagaagatctggatgaaatctctcagagatgttcagatgacatgcttgattgcgttcctcgttcacagaatacattttctttggatgaactgaatatcttgaatgaaatgtctatgaccaatggaacaaaggactcgtcagcaggaagcttgacaccgccatcaccagcaacaccaaggaatagccaagtagatttgctactaagtggtcgaaaaacaatatcagagcttgagaattatcagcaggtaaatgtttacattctaataattcatgctgaaactctcaattacttctttctttatttcagctgagtattccacttctcctttacttttatcttgtgctttgtgttgacagataaataagttgcttgatattgctcgttcggtggcaaatgtgaatgtatgtggatacagttcactggacttcatgattgagcagttggatgagctcaagtacgtcattcaggataggaaggctgatgcccttgtggtagaaacgtttggaagacgaatcgagaagctactgcagtaatcatttttatcattttcacttgtcctgcgtttttctggtcagtactttttaaatgcaaaatttcattcatgctgatttattgttcctcaaatccagggagaagtacattgaactctgtggactgatagatgatgaaaaagtagactcatccaatgccatgccggatgaagaaagctcagcacatgaggagtcagtacgaagcttacgggcaagcccacttaatccacgtgctaaagatcgaacatcaataggagattttgacattataacacaccagttagccgtggtgcatgtctgcaagagtttttcttgcaaaaaagagagcaaccggtgatttgttcgccataaaggttggtattactaacattatatttttcagtttggctctttgaatttgttcttagcataactcgatcttttttaaaccattgtacaggttttaaagaaggctgatatgatccgtaagaatgctgttgaaagtattttagctgagcgtaacatccttatatcagttcgtaacccattcgtggtatgtaatgccggcaatgcataatttccttaatgaatacatttgtgaaaaactgtgatgcttctctaacgcttcctttagctgttcaggttcgttttttctattctttcacatgccgggaaaatctctatctggtcatggagtacttgaatggtggagatctcttttccttgttgagaaatcttggttgcttggacgaagacatggcccgcatttatattgctgaagtggtaaggccgttcacctcaagatttgctcaaatgtctttgtccggatcaaaacttaactgtccacatgatgaaaattgaatttaatcaaatgcattttcaggtgcttgctctggagtatctgcattctgtaaatatcattcacagagacttaaagccagacaatttgttgatcaatcaggatggtcacatcaaggtcaatattgtgttatgcatcttgaattgatagcgagactgctcttctcacaaaatctaacccttctaatacagttgacagatttcgggctttccaaggttggtcttatcaatagcacagatgacttatcaggtgaatcatcattgggaaacagtggatttttagcagaagatggatcaaaagctcaacattcacaaggcaaagatagtcgtaagaaacatgcagttgttggaacccctgattatctagcacctgaaatacttcttggaatgggtcatggttagtatctcatttgcctttcattccatgacatcatgcagttgtacatgggacttattatcactactcattacaggtaaaaccgctgattggtggtcagtaggtgttattctctttgaggttctcgttggtattcctcctttcaatgcagaaaccccacaggtatatattttcaagctgaaatcatcagatatcaaaagtaaacatcattctaatgccttaacattttctctcattcatgggtttgcagcaaatttttgaaaatataatcaacagagatataccatggccaaatgtgccagaggagatatcttatgaagcacatgatctgatcaacaagtaagatcccacactttctgcaaatgaatctcagaaacttcattgctttcccgcgttttctgtactttcgccatattagacgcttttcatcaatcaaagtgaaacaattacctgttgattgtggtaacattatctacttatgtccttgtttcaggctgctaactgaaaatcctgtccaaagactaggggctacgggagctggagaggtaaagctctagttagttcatcatatagctaactttatcaaatcctcggtctctaaaaaattccttccttacaggtgaaacaacatcattttttcaaagatattaactgggacacacttgctcggcaaaaggttcgtcccatattctgaacacaaattaacttccctttgaaaatcgatctcttactactaactttcaattttatctattgttacaggctatgtttgtaccatcagctgaaccacaagacactagttatttcatgagccgatatatatggaacccggaagacgaaaatgttcatggaggcagcgattttgatgaccttacagacacatgcagtagcagctcctttaatacacaggaagaagatgtatgactttactttctttaattccttttctcttgcaccaaatttagtgttatcatctgaacactctcataatcttaacaagtgtttatgttgtaaaacagggtgatcagtgtggtagcttagcacaatttggaaatggaccaaatcttgcagtgaagtattccttcagcaattattcgttcaaggtcagttatagttaatccccaagatt

SEQ ID NO: 165778 - DNA, 3740 bp, Arabidopsis thaliana landsberg
gttatcaaggccagaaaatctgcctacgtcgaaatgtcagataagctctcggaaaccaccaagtctgccttgaaacgaattggtctcaacacattatacagccatcaggctgaagcaatttcagcagccttggctggaaagaatgttgcggttgcaactatgacttccagtggaaaatctctttgctataacgtgccagtctttgaggaattgtgcaaagatacaaattcttgtgccttgtacttatttccgaccaaggttactcagcttgtctctttttcttttgagtttttttactcagagatctcaaaactttttaaaattgctataactaaaagagatttgctgtttgtttgaataggccttagctcaggatcaattaagagcattgtctgatttgataaaaggattcgaagcaagcataaacatgggtgtatacgatggtgatactccttacaaggatagaacaaggctgaggagtaatgctagactggtaatttcttactgtccttttcaccccaatagaatagtaattcattccctcagtctcatctgaattcccgaatacgtatttctcttactaacattattggaatttatgcatgtagctgatcacaaatcctgatatgttacatatatcaattttgcgtcgccataaagaacaattcagccggattttatctaaccttaggtaacacatctttctcctctcattttaagattgactaatatcactagaatcattgcaagacatgaattggtttttaaagaggaacaaggccaccttataattcatgaattaagtggagtctaagttaaaaattgcaggtacattgtgattgatgaagcccatatttacaaaggaccatttggctgccacatggcccttatattgagaagacttcgccgcctgtgctctcatggtgcagtactgatcccatggtcaaaccagtagtattcattatgaatttcgtccatttatactttgaataaccgaacatatcttacttttcagtatatggtgtcaatccttctttcatattttgcactgcaacttctgctaatcctcgagaacattgcatggtaggcttacgttaccgattatcttgataaaatattatcttatccaattctatcatactggatcaaaacatgatttgctgttggtgtaggagcttgcaaacctatctgagctcgagctggtaacaatagatggaagtccttcctctgaaaagctttttgtcttgtggaatccatcagctcctccaacaagtgtatggttcagtttcctagatttatttttgaaccaatttggaatctttatttactccttgtttcaactgttgtattacagaaatctgaaaaaagttcaaaagtcgtgagtagtagtgaagctgctgcagataaaccatctggagctgctgccgatacactatcagggtaatttagttatttgccttacaagaaatcaaaatttattttcatcaatctttagctaacattaaatatcatttcatttctttacagcccagcttctgaagtttcacaccttttcgcagagatggttcagcatggattacgttgtattgctttttgtccatctcgcaaactctgtgaacttgttctgtgtttgacgtaagttctcttgttaatcgttgatagaaacaaaaaaatcacgcaagagtgtatgattaaataatgtttatggagtttaagatccataaaatatgccgcagacgtgaaattctagctgagactgcccctcatctggttgaagccataacctcatatcgtggaggctacattgctgaggtacattttctgtatttatgtgtctgaactttggtgttgtttgtagatgaattgtatttactagattggtatttttaatattttgcaggaccggaggaaaatagagagtgatttatttggtggaaagctttgtggcattgctgcaacaaacgcacttgagttggggattgatgttggtcacatcgatgtaactcttcatttaggttttcccgggagtattgccaggtaaatgagtgtgatttactcttttcttttccctcttagaactgaaattctataagctgccgctgacaatgactgatcaattttgagtttcagtctttggcagcaagccggtcggtctggaaggcgacaaaagccctctcttgctgtatatgttgcctttctcggcccgcttgaccaatactacatgagcttccggacaaactcttggtagcccaattgagtgttgccatattgattctcaaaataagcatgttagtagtatatactgtttgggttcttgtgccaactgttaatacttaatactctagctgagattataccaacttgctttgatactttttcttcttgtaggtccttatgcaacatttggcttgtgctgctcttgagcatccgttgagcttacaatatgatcaacagcactttggttctggcttaagcgaccctcttgctgagctcaggaacaaaggattcttgagttttgatccatcccgtgattcttcttctagaatatggaactatattggtcgagaggtatatatccgagcagttactttgaaaaatacaacccgaaaccgagtttccttgctctaaatacctttgctggtcaacattttctcagaaaaatcctgcgaggatagtctctatacgggccatagagacagtaagatacagagtcatggaaaaaaaaagtaaagatgttctcgatgaaatcgaggaaagcaaagcgtttttccacgtatatgaaggagctatttatatgaaccaaggaaggaactacctggtcacgagtctggatataaaagaaaaggtagctctgtgtgaactagtaaacgtggattactacaccaggactcgggattacactgatatcaaagtaactggtggtgacactgtaagtataactgtggctctcttgtttgatagttgtgcatctttgtgtaaaattcattaccaagttcatgtttcaggcttacccggtcaaggctccaaagaagccaacaccacaaactcatgcatgtagagtgacaacaaagtggtttggatttcttcgtatccgaagaagaaacaatgaagtaattgatgatgttgagctttcactcccaagttacacttaccaatcacaggttatattcttaaacatgcagcctcacacaacacacatacagtcttttctgtttccgctgtaattttaagtctggttttattgtggataataggctgtttggattcaagtgccgatgtcggtaaaactagcagtggagacggcaaacttgccattccgtgctggtttacacgcagcttgtcacgcccttgtcaacgttgttccaacaagagtgacatgcaactattcagacatagctccagaatgtccaaatccgcaagagcaacggtatttcccagcaagaatcttagtatatgatcgtcatcctggaggaactggcatatccgccaaggtaagtggaagtaaaactgtgaaagtaaattctcaagtttcaattgttgaatatggatgactaattcttgaacattttgttctgcagatctgtccgctcttctttgagcttctaaaagatgctcgtgatctcttaaggtcttgcgaaaaatgcccacctgaaactggttgccccaagtgcgctcagacttttggttgccgagggtacaatgaactcctacataagaaagcagccatcatgatcatgcag

SEQ ID NO: 165779 - DNA, 981 bp, Arabidopsis thaliana landsberg
ttccacaagcatctgttggaggccaacgccagatgtgttcttacttcaacaagcgttaggagtcataattgcatggccagttaatatagttatattggacactggattggagagtcagaatgagtcagaaacggcaaatgaaggcaaggtaatgtattttaactataactatatatattcacttgttccatcggacgattactaataaatactactctaatataggatactggtgtagatgatgatcaacttggtagatgcagagttttagattggaaattggatgaagttatagctgagggtgttatctgttcaaccaacaacaatgaattgatcgataacatacatttgggtgtgaatgcagttatcctgaaagttgaaatagtccttaaacctgatgcttgtttgtggagaccaagtcccaaatattttgtgatgtctgatgcatttaaaacaaagatagcatggcctgaccatagaatagacatagactttgttgatgaacctgtacagggagtaggcagaagatcatgtactatggtaagtccgctttagataatatctatgtcactctgatgcatatattaatatttgtgttgttgtctggtgctagagtgcaagtaacacaacaagcacaattaaaggaggacatgaatttggcagaaagtcatctactctcgtaaattgagcactagctttttttggtactttggaaaattttgatgtgtatggtatccatgttgctgtcatgagagtaattaatttgtgttcattttgggtacaagtaacaccaccagcacaagtaacaccaccagcacaagtaaagtagcaaagaaaaagtgcattctgttggccgcaactttgcagaaagaagagtatgctccactgacccagctgctattatccatcacctctcattaggtccgattgctagcaaagtgtgggtagaagtttataagattggtgatgcatgtgtgtgaa

SEQ ID NO: 165780 - DNA, 910 bp, Arabidopsis thaliana landsberg
  unsure (1)..(910): unsure at all n locations
tgacctatactgacgctgatttgattgcccttaacgatgttaattttgcttttaaacttgcaagagaagccatagtttcaagggacgatgtgaaggcagagatatgtagcatttgttttgaagaaaccgagggcgagcgcannnnnnnnnnnnnnnnnnnntgcgttcaccgtcattgctttccttgtgtgaaacagtatgtggaagtgaagctcctaagcggaactgtgcccacatgccttgatgatggatgcaagtttaagctcacccttgaaagctgtagcaaggttttgacattagagctgattgagatgtggaaacaaaagatgaaagaggactcgattcccgctgcagagagaatctattgcccatatccaaactgctcaatgctaatgtccaaaaccgagctttctagtgaatccaacctatccaatgaccgttcttgtgtcaaatgttgtggactcttctgcattgattgcaaagtaccatcacattctgatttgtcgtgttctgagtacaaaaaacttcaccatgaccctctagttgatgagttgaagctaaagtctctagcaaaggacaaaaaatggcgtcagtgtaaaatgtgtaggcacatgatcgaactttctcatgcctgcaaccacatgacttgcaggtatatatttatttaactcgattattctacatcattcgagtactttcatttcgtaatgttaaactttgtgcattcattgtgtagatgtggatatcagttttgttaccaatgtgaggttgaatggaagaatgaccaaaagacttgctcttctggttgcctactaacgggacatggttattatgatccctatgcttataatgaaccggaatatgatttaaaagtaaatacatgtaattactattctgatgaagaaggtcg

SEQ ID NO: 165781 - DNA, 998 bp, Arabidopsis thaliana landsberg
tgagcgtaaaggtgtagctaaagttatcaaggccaatcagaagtgtaagttaatggatattagtggaaggaggcaggtggttgcttaaggacgtgtgcattcagtcgacccagaccaaaaggtacaccatgttcgcttgcaagataatgcagctagagtttgggtggatatagtgaaaatagatgatgcagcagtttggagggcatcagatgaaatcgagtatatgagagattcacttcgttcatctattgtatggccaatggataagctggtcatctattgagtttaagaataaattggggtaagtttctagattacagtgatccttgtacttttgttttatatatgaaactgaaatgagacattgttgattattgcacggaatgaagaaactttggtccaggttattgtgataccggttttgatggaggtgattatagaggtgctgcggagaccggttttgatggaggtggtgagacaggtttttttatcagtaatattggggagactagtggtgaaaaagctgttggtgagagtggtcacgaggcattaaaaaaagatggtatgttgaagctagtagcggctgtcgaggagatagatgttggtgagaaggttgttgatgatgaaatggttggagatgatgttgttgagacaaagccgggttttgggaacactgttaatgagattttgaggacggatgatgtgctaggtgttgttgagaagggtgttgatgatgagttaaggagtggtgttaagaaaagtgttgatggtgagttaaggagtggggatgagccatcatgtcttgagaagagtgttattaataatgagccgactagtgagaatgagacatgtggagagaaacgttttcatgtcagttcgccttttacgaaagaaaaggcaaaaatagaaagaaaaaaaaaagaaggagaaggagaaggcgaaggagaatgagaaggagaaggaaaaggagaagaaagaagaggatgagaaggacccaa

SEQ ID NO: 165782 - DNA, 1353 bp, Arabidopsis thaliana landsberg
tccacgttggagattctttgatcttcgaacacaatcacaacctcaacgacgttactcaagtctccttcgctttggaatacgagttctgcgactcttcttctcctaaagccgtctacaaccctggacacgatatcgtaaccctcacggaaccaggttttcactacttcatcagctcaaaccatgctcaatgcgcatcgggacagaagctcgacattcttgtcgttcatgactcgtcacgtcccattcctccaacaccaccgagcaagatccttcctccttgaaatatctacagagttggtgtggctccaagggatggagtgttccgcaagaaagtgacttttattacagatggagtgagaagacgcagtttccgatcggagacagtcttcttttcgaatacgtcaacgaagtcaacgacgtcttagagatcagcggggaccttgaattcatatcctgctacccggtttctcccgtagccgtgcacatgacaggccacgatctcgtcacgctcacagaaccaggagtccattatttcattagctctaagactccaggtcactgttacgctgggcttaagctacgagtcgtggtcggaccactcaccaaagccgtacctgtccccaatgttccgacgaagaagatagagttgtcacttatggaccgcttcaacagatggttacgcaccttcggacctcaaccccatcattaagataattagtggatgtaattagagttaagacttctctgtattttctttcgactaaaacgtaaggaaatttaaatacactctattgcaaaacacagctcaaaggttgttcttttctttttttccaatcttttaggatgttattcaaattacagacattatcaaacttatcagagatttgataacaaaagcagagcaaaacaaaacatagcattttgatgagtttccttttaaggatatatctctctctctctttctctcacactgagtcttgaggattgaacttgactgttttatggtatataagctccttaatgttctcttcgggcaaggtaggttgctcgaaatcaaaattgaacggcctcacacataccggttcttcgttgatatcatgcagcggcgccaaatatgggtggcacaacgcctcatcaactacacacacgaaaaacatgttcagaaactaaccgatgaaacagagaagaagcagttatataaaatataactcacctgtgatgcgtctgcttgggtcaaaaacaagcattttctccagcaaatcgactgcaccagccgacatgtttgggaatctaacagcaaagttctgtctcgggtactgtggaagctgtctaacgtatcttcttgcattgtca

SEQ ID NO: 165783 - DNA, 1109 bp, Arabidopsis thaliana landsberg; identical to SEQ ID NO: 40711

SEQ ID NO: 165784 - DNA, 2820 bp, Arabidopsis thaliana landsberg
gaggaatacgaatccaaaattcctcaaaccggctcacaacatttatgttcatcgattgtgacaacaccaagcaaacagaaacttgtataaaagacagacaaaagagttattctttctttctcagttcacgctattgttctcttacactctttagcaaaaagttaaacactgaagtagacaaaaagtaatttgaaaatattcttctttttactaatataaagatgaaaaaaatagggatgatacaaatgtaaagccaaagagtaatatttacaccattatggaaatttagacagtaatggttctaaagtgatttcatttcagaataaacacatagcttgcaacttgctctactgtcaaaatttagttagtgttcacaaaatgctaaacttatctcttaataatgtctagataagaataaaattaagcaaaaaaaaaaggaaatttaacaattaaaacgaaatagagcaagaaatagaataactttcatcttgcaaaactcttaaaatccagctcatagtttatcaccaaaataaaaacaattaatttgattaattaaggagtaataattaaaaataaaataaagctgttagaacaacgaagtgctggaggcggtgcctcatttctttcagagcccagaaatctataagaactgtctcaaaaccaaaaaacaatattcactttcctttttcaatattaaaaaattcaatctttctctgtttctgtatctcaggtatataaaaattcaatctttgattgaagcaaaagatagagaatcaacaatgattattgtggtgatggaaatgtcgtgaaaaccagaggagaatcacaaaataaaaacagaacagacaatactttcattttgaatctcttgaaaccagtgtgtactcttaaagagaaagacttttggttttgtctccattggaacacgaatctctctctctgtctggcgtagagactaaggtaaaagcgccgcgtgtatagccttcaatggcttttcaacggcggcgcaacaattactacaaccgtctccgtcgtcttcttcctttcatttgcgctgtctctggagctcttctcatcctcttcgctcttctctccattctttcccctcctcctgatgattccgatcgccgcatctccgtacactctctttctctctctcaatagccttgttgatgagattctgatctctgtctcttaacgccattggatctgtttaattgcagaagcatattaactatggagccaatgatgagaagaagaacacaccagtggttttcacagttccggttagggttcttatatttgatatttttgttgcaaagactgtatttgtttgctaatttgggcttgcgcatgctttaaaccgaagcatagaggtggaggaagatcggatcgtgatatctggcgtgcatggaatgctgaattcttttatggatgttgtaatgcaagcagcatgttcccaagtgtgtaactttataaagttcttttggtggttagagcgtattaggttagaatgctcgaatgtatctgacattgaggttgatcaaccacactacaacattttgattattcttactgcagatgctaaagcaattactagaaatgatcgatacttggccattgctactagtggcggtttaaaccaccaacggactggagtaagttcctttagctttctctggttttatggtgatctttttgttgttacttagatcttggtctgagtttcacaatgcaattacttctttcagattgtagatgctgttgttgctgcaaggattctaaacgctacgcttgttattccgaagttggaccagaaatcctactggaaagatgccaggttcttgctagctctcgtaaaaatcaaaacattatgcatcttattaagtattaacatctcacttttgtgctttttatatatgcagtgacttctcgaacattttcgacgttgattggtttatgtcatttctctcaaaagatgtcaaaatcattgagaaacttccacagaaaggagggcaaacatggagccctcgcagaatgcgtgtaccgagaaaatgcaatgagaaatgctatatcaatcgggtgttacctgttcttcagaaaaggcatgtaagttttcctgttttttctctcaatctttacgcttcttagcatctaaaggtttcatgatttcctctttctctatgatgtttatatatgatttggtcttgtaactgtttgtttcaggcagttcagttgaataaatttgattacagactctcaaacaagttgagagatgatttgcagaagctgaggtgtagagtaaactatcatgcgcttaagtttactgatccaattcttgaaatgggtaacgaattagtcagaagaatgcggaaaaggagcaaacacttcattgctttacatcttaggtttgaacctgatatgctcgccttctctggatgttactatggtggtggtgagaaggagaagaaagagttaggaacaatcagaaggagatggaaaactttgcatgtatgtatacaaatcttacttgtgcaaagttcttcttattttcttgttggatttaacgaattttgcattgcaggtaaataaccctgaaaagcaaaggagacaaggaagatgtccacttacaccagaagaagttggattaatgcttagagctttgggatatggaagtgatgttcatatatatgttgcatcaggtgaagtttatggaggagaaaaatcattggctcctttgaaagcactttttccacatttctattcaaaagacaccatagctacaaaaatggacctaaaaccattttcttcttattcttc

SEQ ID NO: 165785 - DNA, 3198 bp, Arabidopsis thaliana landsberg
tttcattttctggacttgtctagaactaatagaaccgttgtgatttctgtctgtctagaactgctagaactgctagacctggaatgtgattgtgatttctgtattgtaggtgaattcagatgggtaaagctaagaagaagggtgaaagaaaaaagaaagccacaaaagcaaatgatgatgaacctgaatatcttggtactgtggagccccagacagcagcagaaaaacctgtcatgaaagaacagcttgaagcagacctgcagacaagcacacaagtggagaagtcggtacacgaaccccaaaatgaaggcactactcaaacagaagaggcagctggtattgatggagtagaagaggagcctgaaggtgagattgaaatgtctgatcaagatgagcgtcctacaaagcgtaagaggcataggggaccaacaaagatgaaagacctcgccaaagatccgactcttcgagaaagagttgactacaatcttctgggagatccatatggtccagggtcagttaagctgtcatcatatgctggaacattggtcagagaacatgttccagtcataattgaaaactggaagaaagttggcgaagacatcaaaacagttctctggaaatctgttcaggtaaaactggaagaaagttagcaatttatcaaacttagaacagataaaggtctatgattatatgtttttggattggtgattgaatgcaagcaaggtttgaggttgatgaagaatttcaaaggattgctgtgttaaagcaaatgggtgggttgtggaggtcatacaagtctcgcattgtccgggagatcaacttggctggaaataatcaacagaagatgaatatgaggccaatgaatgtatcaccaactgattggcgtaaatttgtcaagctgaacacaagcacagcctttaaggtatattgaagtagaggtatcactaacttcacttcatatccaacgagttattattaattattgtttttgctaggctgtgagtgatacatacaaagagaggaggagtaaacagatacctcatactactagccgtaaaggaatcgtcaggctagcagaagacatggtaagctttctatcattttttctgtctctcctgctttattctataaagtgatgtttggattatttccaacagaaagttgaaagtggagacccttcccaagtgacaaggctggaggtgtgggtcaagtcgcgtacaaaaaaggatggtacaccagtgaatacaaacgcagctgagaagattgtaagacagaaacttgtaacttttgtgattttcttctccattaattggttttcagaaagctgagaagatgtcttgttttccagaaaaaagcaggtgagctggttggaagtgattctccaacaatcactgcaaatccagaagaagatcacctctcccaacttttaggccctgacaatcctggtaggctaagggcaatgggtagaggcatgagcaagaccaaattggcttgtttccaagtcaagactagatgtatgccagatatgcaggagaagcaggttcatttacttaaacaggtcaatgagttgcaagaagaacttaccaaacttaagaaccaggttagagatattcgttagcagctcaattcttttgctgatttattggatatggatgttgactacattttttcgtttcagagacaataaccagagattggtgaaaactcagcagcaagagtgcgtaatttcttttatatcattgcattcatccttctatttacttcagttctgacagggtttctaatttacttttgtagagtgtgaacaaaaaatcacatcctaagtgtgtcttggttgattggtgtggtaatgatgaaaacgttggtgaggggcgtattgtgtcatctgatcctgatgacttagtaaatgactgccgtctaggtcctaatgaccttaaagtcttggtcgaaactgccacaaagccagatgcattcctctggagacctgcattgcaaatgtctacaatttaggaagctgttggacagatgatcgcatggccagcctctaagtgtgtactctcgaacaaggagctacagatagaagacattgctcctacggtaacctttattttcactatagtagtcagcatgttgatgatttgatggaacacgcagatattgatacatatatttcatattggatgtgttttcaaactgctttgtacaggtcctaaaggcaacttctgcgaacaagtgcaaactgctcgatttgtcaaatgatgaagtgatagttgctgagggtcgttggctgacacaagatgcaaatgagttagttaatggacttcctctatgcccaaaggcagtaaaagtctttgtcgatgcagttcttcaaccagagacgtttatatagaggccaacgatggatgtgacttatcttgaggactgtttaatgtcttctgttgcatggcctgtcaacaaagttatatttgaaaaccctgcagatgcaacatgctagaaatctccacttcagacttctactgcaagaggaaaatcaccattggaagcagcagcatcagtaggcaagttaggagcattagtagtcaagtcagcaggatcagtaggcaagtcagcaggatccgagaaagcagtagcgtctgggaaagcagcaacatcaggttcacaaactgcagcagcaggttataagccatcccctgagatatctacagcaaaaggtacaaaatccgttgcaacagtttcaaaggccatagctgagaagtccatagctaaaggttcaaagtctcctgtcaagaaaagtcagctgctggattcacaactccctctgagaagatctccggtattttgtatgttgttattacctagctattgaatatggttatttttctgcatacattaaaactggtttatattgtaacatggcagcataaagatgtagctgaagttatcaaggccaatcagaagtgtaagttaatggatatcagtggaaggaagcaggtggttgctgaaggacgtgtgcattcagtcgacccagaccaaaaggtacaccatgttcgcttgggaaataatgcagctagagttttggtggatatagtgaaaatagatgatgcagcagtttggagggcatcagatgaaatcgagtatatgagagattcacttggttcatctattgcatggccaatggataagatggtcatctattga

SEQ ID NO: 165786 - DNA, 2320 bp, Arabidopsis thaliana landsberg
gcatgcctgaaggtcgactctagaggatcccctgatattgttctgcgtctgttgctgtcgtaagaaaaaaaagaagcatcaaatgccctattatgaaggaaacggctacgccaccggcaaaggtaaatacaaaacccatcaaacctagccgttgcctaacctagtttctactttagaacattttcttgtgcaccaagctaatcaataaactagcattttcttaagaaccttacttctaatcacattccacaatccatttgagatatgattgaaaaaccatgacagtttttgagtttcataatattccaaaatattgttacccaagaaacattatcatgattttctttcattttcttgttatccaagatacaaggtgaaaacaattctctgttttatcttaggtgatcaataccaacagcagcaatacaataaccagagcgatcacgtaatgaatctgtctcagcagtatcctggatccaacgggaataataactggatgaattcaccgcctccaccaccaccaggaagctggcaaccatcgccgcctccaccaccaccgccagtctcaggcggtatgaatggaaacagtagcgactttagctcaaactactcaggacctcatggtccgtcgctaccaccacctcacccttcagtggctctaggtttcaacaagagcacattcacctacgacgagctagccgctgcaactcaaggcttctcccaatcaagattgttaggtcaaggcgggttcggatatgttcacaagggaatacttcccaatgggaaagagattgcggtgaagagtctgaaagcgggaagcgggcaaggagagcgcgagtttcaggctgaggttgacatcattagccgagttcatcatcggtttcttgtgtctcttgttggatattgtattgcaggaggacagaggatgttggtttatgagttcttacctaatgacacacttgagttccatctccatggtaaaagtggcaaggttcttgactggcctacaagactcaagattgctttgggatcagctaaaggacttgcttacttacatgaagactgtgagtcaaaacaaaaatctaaattattaattcaatctttttgagtggtttgattaggttgtgatcaaaatttgttttcttgactttgttgacttaggtcatccgagaatcattcatagagacattaaagcttcaaacattcttcttgatgaatcctttgaggctaaggtacgttcttataatttttaaactcataatgttttcagattcgttggtattattttttctctaactggactggctcaaatctacaggttgcagacttcgggttagcgaagctatctcaagacaatgttacgcatgtctccactcgtatcatgggaactttcgggtactaaagactgcgaaaccagctgatgaaaaatgttcctgcaaatttcattagctcttacttctatatcaaaaacattcttgttttataatctcatccgaaaatctgtttctctaaagaatctcaaattgtgaatcaaacgacaggtacttggctccagagtatgcgtcaagcgggaaactgacagaccgatcagatgttttctcctttggagtgatgcttcttgagctagttaccggacgcagacctgttgatctcactggtgaaatggaagacagtttggtcgattgggtccgtaatcatatggttaaatatattcatcacattaatggttcctctgttagaatcttgtgatctaatgcaaacttggttactttttttacacaggcaagacccatatgcttaaacgcagctcaggatggagattacagtgaactagttgatccacgtctcgaaaaccaatacgagcctcatgagatggcacaaatggttgcttgtgccgctgcagccgtcaggcactcagctagacgcaggcctaagatgagccaggcaagttttacttttgaacatgaccatcttttaaacatatactttacaccaagagaatgatcactatggtccaatgttaaaacagattgttcgggctctggagggagatgcaacgctagacgatctaagcgaaggagggaaagcgggacaaagctcattcctcgggaggggttcaagctcggactatgactcaagcacttacagtgcggatatgaagaagttcaggaaagtggcattggatagtcatgagtacggtgcaagcagcgagtacgggaacacgagcgaatacgggcttgacccgtcttcctcgagcagcgaggagattcgtagaggaggagctaacaacaacaaaaccactcctagccgagaccattga

SEQ ID NO: 165787 - DNA, 2758 bp, Arabidopsis thaliana landsberg
  unsure (1)..(2758): unsure at all n locations
gtgaagtagcgaattgggttattctgattggatttgttgatcaaccagttcaattcgaagcttcttctgatggcaaattctgggctggtactgttatttcccagaggtctgcttcagattcctctggtttctggtactctctctaatctatgctcaaagatgagatttttatttgtaactttgtttgtgattcatatttgaaaaggttttggattttgttttgtcaggattccgataatatttgaaggcgatttagctaaaaccgcagctcgatatgtaagcaaagacgatcaaattcatgtgtctgggaagctgtttatagattctcctcctccaaatatgacttatgcacaagccaatgttcaggtgtgaactttaaatagtatttgatcagttttatgatacttgtgagaagagtactatgttgatttgattatccctcgagtatgtatgaaaagttccagagaacctttgtaactttaggtggttgctacttgctttacaacaggtattggtccagaatcttaactttatacagcctatgtccccgtctccgtcgccatttatggttatgtcatcatctgaaaaggaagaaagtggtatcaagaagcagcctggtatgtctcatgtaacatttccaatgaataattttcaattggcgcttgtgttaggtctgagaaaggctcttagggagctactttttaatctcttgtgatgtatttaatgaaaaatgtgttttcttgtgaaatctttctggcatacatttgttttcaatgctctgattaatggtttgttaaatgagtctctagctagagctaagcaggatatagtcattgatgaagcttcagattcttggaatcacctcattgaaaatcctaaagaatggtgggatcaccgggaaaataaagtcaatggattggtaaatgccccatgtgcttaactattcatccttatctcactcgcaatcttttgatatggtgtctgctaaatctctctactagtattctgacttcttggtttttctcctacataggtaaaacctaggcatcctgatttcaaaagcaaggacagtagtttttcgctgtggctcaataaggctcctaattgggttttgccaaaactcgaaggactcgagttcgatgttctagtccctaaagccagagttgtaaaacaacttaaaggtaaagttcccagtcatttccatgttcccatgcaactatacaaagaaagttgtttacagttatgtggcacttgttcaagtatgtttgtataaactgaaatctgggctgatatgtgtaggagaagaatcatggaaggacttggttcagaacccagataaatggtgggacaatagaatcgacaaggtgaanattccgttacatttaaccaatcgttttcacatataggtaacatactaatcatttatagttctaatccatgtagagaaccccaaaatcgccggattttaagcacaaagaaaccggtgtaggtctctggctaagtgactctccgagctgggtgttagaaaaactgcctcccccaaagagcaaaacaagtgacatctacggtgtacaagagatgttctaaccaatgttcatgttgcgttactcttaatttttttcttacttctacggattaggagaaatatcgtagtgggagtttgatcttatgtgcatatattggatcgtagagtttgtcttgatgcagaatgaaacagagatggtaacactttttttcatgaaaatatggatttatttatttatttaccatcttgaaccaatatttttgttcacaagattatttagtactagaagattgtcctaaagtccaaatcctgtctctttgggccttcttagtccaaaacgtccatgtctcctatacattaataagagaggagaccgtgggaagaagttagggtttatgctttgagaaacaagaaaagtcatgagaataacgagacgtcgcactaaaaagacagagaccaggaccgattcggattcggttcctatagacatagtgatcgagatcgtgaagagattgcctttgaaagatgtatcgaggtttctccttgtgtccaagttatggtcagaaatcatccgaagtccatatttcatccgatcgttcccgttcttattctcatcaattcagccatatcttctctttgctctcaatagcttagataaagataaaggacaccacaaatggttcttctacttgtcttcatcaactttctcagcggggaaatcagttctttcttctctctctcgcaccaactgccaaatcccgaatcggcgtagctgcgatattcattacgtgagtggcttgatatgttttggatatggtcagcaacaacttataactaaccctagaacaggtaagtccatttacttacccaaagtgaaatcaagaagcaagatcatccaaagctttttcggatacgatccagtctatggccaatataaagtactgtgcatgtcggaaagaatgaatgattacttgaatgttccgtcttctgaacatcaagtgttcacattaggaggagtacaaaaagttgaacaattgtggaggatgattgaatgtaacattcatcaccgtcccaaaactaacagtgtgtgcatggatggggttttgtattatggcgcttttacgggtgtggatatgttggtatggcaccaaatgattatttaaaacgccccgaaaagttggatctcgtttcaagattaaacaaaagtagcatacaaagttgccgcccagggca

SEQ ID NO: 165788 - DNA, 1124 bp, Arabidopsis thaliana landsberg
atgatgaatccggtgggtttcagattccgtccaaacgacgaggagatcgtcgaccattacctccggccaaaaaatctcgatagtgacactagccatgtcgatgaagtcattagcacagtcgatatctgtagcttcgagccttgggatttaccttgtaagtcgagttattttttcccaaactgttgtatcgaattcgaaatcatttgctctgatttcctctccctcttttttcacagccaagtcgatgatcaaatcgagagatggggtttggtatttctttagtgttaaggagatgaagtataacagaggtgatcaacagagaagaagaacaaactctgggttttggaagaaaactggaaaaacaatgactgtcatgcgcaaaagaggaaatcgtgagaagatcggtgagaaaagggttttggtttttaagaatcgagatggttcaaagaccgactgggttatgcacgagtatcacgctacgtccttgtttcctaatcaggtaatttttcaattccaaacttttagggttttttgttgttgattgacctaattccagattcctagggttttttctatctctcttgttaattgacctaattctggtgttttgtggtggtgatcgtgttttgatttgattatttgtacagatgatcacgtatacagtctgcaaagttgagtttaagggtgaagagacagagatctcttcttcttctactggtagtgaaattgaacagattcactctttaatccctcttgtgaacagttctggaggatctgaggtgggagaatctcaaactttctctgttttgtctttagaaactttgaattatctgacatttagtgttcctcccctttttcaggggttcgtcggtttcgcaagccaattaatttacagaattcaagtcagtctggtgtctttgctaatgtgcagggagaatcccaaatcgatgatgcacctccaccgattgaggagcaatgtaaaacatggttgaataatgatggtgatgagcagaggaatatcatgtttatgcaagatcatcgcagcgatatcccacctcccacggcgttaactggtgtctgcagaaaaaaaagcagtgaaagtaatgattctcatttgatatctc

SEQ ID NO: 165789 - DNA, 2336 bp, Arabidopsis thaliana landsberg
atatgaacaatgatttaacaagaccagtcaccattgatgaaataaaaaaaagctgttttttctattggacctcacagagcccccggcctagatggcttcacatgcaatttttaccatcagttttgggaagacataaatcttgcaattatcatggaggtaaaaaagttctttgaatacaactacttggaacagacacataatcacacgaacttatgtttgatcctgaagatctttgtcccgtcaacaatggcggattttagacagataactctttgtaatgttagcttacaaaatcatctcaaagattttagttaacagactgaagcctcatctctctgggatcatctcggaaaaccaagcagcattcattcccggaagaatgataaccgataatgttattatggctcatgaagtgttccattctctaaaagttagaaaacggcaagcgaactcttatatggctttgaagacagatataacaaaagcatacgacaggcttgaatggaatttcttggaggaatctatgcgataaatggggtttgtagagacatggatttgatggattatgatttttgtcactatagtgagtttctcagtcttaattaatggaacaacccatggctacattcaaccacaacgaggaattcgccagggagatcccttatccctgtatttgtttattatatgtgctgaagttttaacacatctcatgactcaagctatagagcaacgacagatccaaggtgtcaaaataagcaacaggagcccagcaattagtcatctgctatttgctgacgactcacttttcttcatgcttgcaaataagcatcttgaacagatatgcagatgtctctagtcaagcagtaaatcttcggaaatcagcaatcacctttggaagcaaagtacgacacaacgtaaagaggaaaatgcggcatatccttgggattcataatgatggtggtggaggtaaatatttgggcctgccggaacagtttgataaaaagaagacagagatgtttaagtacattgttgagaaggtcaaagaaaaaacacaaagttggaataagaagtttttatcacaagggggtaaagaaattctcctcaaatcagtagcgctagcaatacctatatactcgatgaatatctgcaagatcccgaaggaaatctttaaagaaataaacactagtctcaattttggaggagcaagaatgaagacaataaagggatgcattggtttgcgtggaatagattaagctactcgaagaatgaaggtggtttggtttcagagacctagaacacttcaactctgctctccttgggaaacaaagttggaggatcatccaaaagccaaattgtctaatggctagagttttaaaaggccggtattttcctgacgctaatattctaaatgctacatagagcacacaagctttgtttgtctggaagtccattttacacggaaggaatctaataaaacaaggggttcgctttgtcattggcgatggaaccatggcgagtgcttggttagatccatggctccctcaacaccctccatcagcccctaggaaaaggaatgcacgcatccaagattttttggtcagcgagctaatcaatgatgcgagaacagactggaatgaagcaaaactccgagaaaatgttcatcctgaagacatcactaaaattctgaaacttaagctaacagccaatgcaaatggtgatacattgggatagcactacacaaaagagggatgttacacaatcaaatgagggtattggctaagtactcatttaaattatcatgctgatgtgatacctactccaggggatatcaacttaaagaaggaaatatggcgcctgcacacagctccgaagattaaacattttatttagagattatgctctggggtcttagcaacaggagcggcgttgacatatcggcacattcgcccccgtacaacttgtcaccgttgctgtcaagaggaagaaactatgaagcatttcttttttttattgtgactatgctaagtcaatttagcgcgcttccggtgtccacaactacatcatcactgacactacttcctctctagatgataaactacgagcgatttttcaagtggcaaccacaactcaaacacaacagttccatcatttaccattatggatactttggaaaaggaggaatgttttgtactttcagaacagacatgttccctgggagatcaacttaggactggctagatcggatgtgccagagtggactgacgcggtcacttcactaacatacaacaatcatgactgctaaaggcgagctttggataatagcaacggttggagac

SEQ ID NO: 165790 - DNA, 563 bp, Arabidopsis thaliana landsberg
  unsure (1)..(563): unsure at all n locations
gattccggcgtccacgccatgggcaaggtcgcccatgccgacctgtcggggcaatggaaggaacacacgctccgcacggccctcaacgcgcatctcggcatggcgggagagcgggtcgccattctcgacgcggccgaggtgccggaggatttcgacgcgcgcttctccgcgaagaagcggcactatctctaccgcatcatctcgcgcaaggcgccgctggcgctggaggcgaaccgcgcatggttcgtcgcccgggacctcgaccacgaggcgatgcatgcggcaggnnnnnnnnnnnnnnnnnnnnnnnnnnnnnnnnnnnnnnnnnnnnnccagtgccaggcgaacagccccgtgcgcaccatcgaccggctggacgtgacgcgcagcggcgacctcatcgagatccgcgtctcggcgcagagcttcctgcacaaccagatccgctccttcgccggcacgctgaagctggcgggcgagggcaagtggtcggtagaggatgtccgcaccgcgctggaagcatgcgaccgcaaggcatgcgggcccgtcgccccgccggaagg

SEQ ID NO: 165791 - DNA, 3119 bp, Arabidopsis thaliana landsberg
gaacttccgcaacaagtgtggccaaagatctttacgaatttacagacgtgctggagaagacatcgtgatcggtttcgtggacaccggaattaaccctactcatcctagcttcgccgcacttgatctcacaaacccttactcatcaaatatctcacgtttgcatttctccggtgactgtgagatcggtcccctttttccacccggatcttgtaacggaaaaattatctccgcaaggttcttttccgccggagctcgagcttcaggcgctctcagctcctccttggatatactctctccgttcgatgcgtccggccacggaaggtataaatggctctctctttttgaagggattttgtgaaataccatttttgaatttgatgaatcacttagccaatgtattataaatacatgtctttattttgtagtcaactatatatcttagaagaaaaaactaagtctttttttggtaaactgtaatgatatattgatatgttcatattatgttttgagaatatggaaatgaggttgtggacttgactctatatatttagagtcacagtaatggttttaaattataggcggtaatgacaataagtttttctaaagtctcttacggccatattatgggggtagattatatgtctttatattgttggtgtttgtaaaatggtctatacattgctttgtaagtttgttgtgcattgtatgtgttgcataagtgtttactatttggtcgggttgattcagccacgtggcatccatcgcagccgggaacgctggagttccggtgatcatcgacggattcttctacggccgtgccagcggtatggccccacgtgcacggtttgtcacctcactcatattgattagctcatatactgaaagttcaaagactaaatgttactctctagttttgaaataaaataaaatatttacgagttattttattggtttgtgtggcagaatagccgtctacaaggcgatttatccatcaattggaactcttgttgacgtaattgcagccatcgaccaagtaaacaatactatagaacaagactaattaaggcctatgtttctcttactgtctttaaccaattttctttacttatctacctatttaattttgtcataggcaattatggacggcgtagatgtgttgacactatcggttggaccggacgaaccaccggtggataagcccacggtactcgggatattcgatctcgcaatgctattggctagaaaagccggcgtgtttgtggtgcaagccgtagggaataatggcccgtcaccgtcttctgtgttgtcttatagtccgtgggtcgtcggcgtcgctgccggaaatactgaccggtcttatcctgcctccctcatcctcgacggtggccaaaccgttcagggcgttggactatcaggtaaaacaagaattactataaacatataaagtttcaagacttttataatagaagaataataacaatgtagtgtttgtgatgatcttagatcttcaaataccaaaatttgcaagatttagtataaaattatggcactcatcgctataaaagtttgtcttctttcatagatgctttatttggttattattgtgtacctaattatagcatagcagtagctagtaaattatttaggacctaaacgatttgaaatatttggatcatgttctttcaaactcgcaacaatttatacttgtagtaaatattcatgaaaggaatgtcgtttctcctttttttcaacttgaaattaaaggtccaacccttggagctccattagttcaacacagacttgtcttagccaaagacgctgttagaacaaacggctcggttctacaacccttaaccagagacattgaagaatgccagcggccggagaattttgaccctgccgcagtttttggaagtatcgtgatatgtacattttctgatggcttctacaatcagatgtcgaccgttcttgccatcacccaaaccgccaggactcttggtttcatgggttttatactcattgcaaatcctagattcggcgattatgttgcagaaccagtgatattttcagctcctggtattctaatccctacagtatcagctgcccaggtaatttctttacgtaaaagccatataataagaaaataattgccataacaaatttttggacgaaaaatactcttgtacttgtttatgtgcaactatttgacacaataaaaatagtctagcaaatatataagttcgaatatgtgatttgatgtggatgaagaagactattacatagtatgtcacttagcaataatgaaatccacatttatttgtagcaatgaacttgagtgaagtaagtaactatattcatggttcacaaacaaactaaccatttgatttgcatcgaaattatatttcaaacttttcctctacacatattgagactttcctatgttagattattttgagatactacgaagagaaaacctttagagacacgagaggagtggcgacacaatttggggcacgtgctagaatagacgaaggccgaaactcgatattcgccggacaagcaccggttgtgagcagattttcttcgagagggccagcttttattgatgcaaatcggagtcctttagatgtacttaagccagacattcttgcacctggtcaccaaatttggggtgcttggagcctccctagtgcctttgatcctattttgacaggttctacctttacatccctcattttttgttatcttatgaaatttactcccataagtttaaaattgatcattttgtgagaaggacggagctttgcgatattgtcgggaacaagcatggcgactcctcatatagcagggattggtgcgctcataaaacaacttaatccttcttggactccggccatgattgcatctgccatctccaccacggctaacgaatacgacagtactggtgaaattatatcagcggagtattatgagctaagtagattatttccatctaatcattttgatcatggtgcgggccatgttaatcctgctagacccttagatcctggactagttttacccgctgagaaagttttataacatatcatgggaaagaattgataatttacaatgctatt

SEQ ID NO: 165792 - DNA, 960 bp, Arabidopsis thaliana landsberg; identical to SEQ ID NO: 17894

SEQ ID NO: 165793 - DNA, 788 bp, Arabidopsis thaliana landsberg
atgttaccaactgagtcaaagaaagccttttcattcaaaaggtgtattgaagatggggacttagttattgtttacgaaagacatgatgtgatgaaaccagttaaagtaagtaaagacggtgtgcttcagaaccgttttggtgtgtataagcactcggattggattgggaaaccattagggacgaaagtattcagcaacaagggtaaatttgtgtacctgttggctcctactcctgaactatggacattggttttaagccacaggactcaaattctttacattgcggatattagctttgtggttatgtatctagaagtcgtgcctggctgtgttgttcttgagtcaggcacaggtagtggttcgctttcgacctcacttgctcgagctgtggctccaactggacatgtttattcatttgatttccatgagcagcgagctgtctctgcaaggtagaaactttcgttttctttagctatctcgttgtgcttttcttttgaagctatagtatttattcatcctttactttactttgcaacagggaagattttgagaagacgggcataagtagtttagtaaccgtagaggttagagacattcaaggagagggttttcctgagaaactgtcaggtttggctgattctgtgtttctagaccttccacagccttggcttgcggttccttctgcagcaaagatgttaaagcaggatggagttctatgctctttctcaccttgcatcgagcaagtacaacggacttgtaagtcctcagatcagatttcattggtaagt

SEQ ID NO: 165794 - DNA, 4541 bp, Arabidopsis thaliana landsberg
cattagggtcaaaaatgatgatggtctgtctgtggttctcacaaatgtgagatatattcctgatatggatagaaatctgctatctttggggacttttgaaaaggcaggttacaagtttgagtcagaaaatggaatcttaagcattaaagctggaagtcaagtgcgacttactggaagaaggtatgacactctttatttgcttaactggaaacctgtagctagtgaatcacttatgtagttaggagaatggatgatactgtgttatggcatagaaggttatgtcatatgagtcaaaagaacatggagattttggtcaagagaggacttctagatggtaagaaagtctcagttctcgacacctgcgaggactgcatttatggtaaagccaagataattggtttcaattcggctcatcatggtaccactaagaagttagaatatgttcattcagacctttggggagctccatcagttccattctcattggggaagtgccaatactccatgtcagttattgatgattatactagaaaggtgtgggtttattttctgaaaaccaaagatgaagccttcgagaagtttgttgattgggtcagtttggttgagaatcaaagtgacaatagagtgaagactcttagaacagacaatggtctgtaacaagttgtttgatggtttttgtgaatcaaaagggattcaaacgcacagaacgtgtgcttacacacctcaacagaatggggttgctgaacgcatgaatagaaccatcatggagaaagtgagaagcatgttgagtgattcaggtctacctatgaagttttgggcagaggcaactcacagtgcagtacttctcatcaataaaacaccatcatctgctcttaattttgagattcctgacaagaagtggtcaggaaaaccaccggtttacagttatctgagaaggtatggatgtatacctttcattcactctgatgatggaaagcttgaaccaagagctaagaagggagtgtttattggttaccctgttggagtaaaagggtataaagtgtgactgctggatgaaagaaagtgtgtggttagtagaaatgtcatctttcaagaaaatgttgtgtacaaggatctgatgctgacacgtgagaatgtgtctagtgaagaagatgatcaaactggatcatatctagatcttgaccttgaagcagaagatgatgttatctcaggtggagatcaagggatgtctcagacaactcctgtaccagaaagtccagtacacgctactccactcagtcaaactgcaaatgataatggtgtttctgaagtaaatcagtctcctccgagttatcatttagtaagagacagagacagaagagagattagagcaccaagacgttttgatgatgaagattactatgctgaggcattgtatacaactgaagatggtgatgtagttgagccggagagttacaacgaggcaaaattggactctaattggaacaaatggaagcttgctatgaatgacgagatcgattctcaagagaaaaacaacacgtggacagtagtcacgagacctgagaatcaaagaatcattggctgcaggtagatctacaagtataagcttgggattctgggtgttgaacaacctagatttattgcatgacttgttgccaaggggtattctcaacgagaaggaattgactatcatgagatctttgctcatgtggtaagacatgtatctataagggtactgctgactatagtatcacaagaggacttggaactagagcagttagatgtgaaaacagcttttctacatggagagcgagaagatctacatgtcacctccagaaggttatgagtcaatgttcaaagagaatcaggtatgtcttttgaataaagccctgtatggactgaagtaggcaccaaaacaatggaatgagaagtttgacaacttcatgaaagagattggttttgtgaaaagtcagtatgataactgtgcttacactaaggtgctgcagaacggttcaatgatgtatcttctcatctatgtggatgatatgcttgtagcagcaaaggataaagaagcaatagcctcttaaaagtatgagttgagcaagcgttttgagatgaaagatttgggggctgttaagaagatacttggtatggagatcaacagaaacagatcagagggtgctctatggctgtctcaggaaggttacttgaataagattcttgaaacttacaatatgtcagaaccaaagcctgcaatgactccacttggagctcattttaagtttcaagctgcaacagaacagaaactggtcagagatgaagactttatgaagtttgttccctactcaagcgttgtgggaagcatcatgtatgccatgattgggacacgtcctgaccttgcttatccagtgggtatcgtcagccgcttcatgagtaaaccgagtaaagatcattgggttggagtgaaatgggtgttgagatacattaaaggtactttgaaaacaagactgtgttacaagaaaagcacaagtttcaagattgtgggctattgtgatgcaaattatgctgctgaccttgataggagaagatcaatcactgttcttgtttttacacttggtggaaacaccataagttggaagtcaagtctacaaagagttgttgctcagtcaacaacagaatcagagtacatgtcacttaatgaagcagtgaaagaggcagtttggttaaaaggtttgttgaaagacttcaggtatgatcagaagagtgtggaggtcttctgtgattctcagagggctattgcactctcgaagaacaatgtgcatcatgaaagaaccaagcacattgatgttaagttccattacatccgagagatcatagcagatggaactgttgaggtgttgaagatatctacagagaagtacccagaggatatattcaccaaagtcttggcagtgagtaagtttaaatagctttgaacttgctccgtgttaagtctgagtagtaaactcggagaatccgagactagaatccagaggctagaatgaggtactttttctctctcttgtaactctaaacagtttgaatgtttgtggcttatgctatctagtggagatttgtgaagactgatagcttgaagcacaaggttatattcaaatgtttggccttaaccttaagacttaacccaaggtaaagtaactcaaccttggttagtctacttttgggaccacaacaaagcaaacggctatgaaggagcttgcctcgcaatggcatcggtttgctttaaggacaatttatccatttgtgtgtgcaaagagaggaggttaaagaaggagacaacaatcgctttcaagctggcagttttggcgttttaaggagcgtaggctgcggcttgttatttgctggggtgaagccctaatctactttgaagtataaataggtgcttaagtcattgagagagtgtgcgagacattttacagagtttgtgaggtgttaagagagaaagctattcatagtataaacttgtattagctgttctttgtgggataacagagtagtgcagagcaatcctaagtactagtgaagggtattaggtgtattgcttgtagactcttgttgtaaacactatcagattctagtggattccgaggagagtctcggcccagacgtagctaccctttgggagtgaactgggttaccaaagtctcgtgtgtgttctctgttttgtttctctatttcttccaaagtcttgttcttcttacaaacactcttgaaccagtttctgaagtacatcactcatctctgaagtcgttttgttctaggatctgttttgagtcactaagtaaaggaaagtcgacgtctttagctctgtggtttcttaacagttacactcttcggctaaccaaaatttgacatgtatggggttctaaaaattacatataaagcagcggttctaaagaatgtgggtcgtgcctgacctgaacaagttcgataaaatctgcttaaccaaacccatttacagcggctttctcggataagttccagtttagattttcagatctaggttaatgaatatttttaatatttttggataggggttgagaaattgataatccccaatttacactcttgcctgagattctcgccctccaaagatgaatgtcactacaaatctcgttattgcacttctcgttctattttttctgtttgttgttgttttctacatcctcttccactatcccaaaatttcaaatcatctttcagatacaatcagttcaaaagaagacttccttgttcgttctttaccctcctctctagtttctacagcctcttcgacgacgggggactccgtcctggagatggtggacagctcttgtgcatccaccaatgactcttttccactaacccatctctcctctccttttgatgagctcgataaacgttttcatactagcacaggtctaaacctagttcattattactttctgatcatcacttctaaaattgatattcaaattagcaaaagtacagaatcaattatataa

SEQ ID NO: 165795 - DNA, 373 bp, Arabidopsis thaliana landsberg
atggctcaaaattttccaaatggattgggttcattctacatcggaatgtataaactagtggaagatccttcatcggatccagtaatcccgtggagcaaaagcaacaatggtttcgtcatgtgtaatgaggaagcgcgaatccgcagtaagatacttttgagattcaattgcggcaaactctcagagtttctctccgagctcaagtattacgtgagttttctatatatcctccgaatcgagttttggaatcatgtcactctgtcgtcgtgcgtgttatgattctgtgttatattttgggggtagggctttacaagagttaagaagacggactctgggaaaatggaatttagaaatgaagatttcgttagaggcc

SEQ ID NO: 165796 - DNA, 827 bp, Arabidopsis thaliana landsberg
cccaagtgctctgtgtcgtggaccttccctgaagaacctgtcattgtttcattgcaacatctctgatgaatccattgctaatattctatctggttgtcccattctcgaaagcttatcgttgatttcctgccataaactgagggtccttgatctcagcaaatcaccgcgtctgataacattagaaatcactcgtaatagtcattatatagagccaacacagctcgttgcaccacatatccgttgtctcagattgataaactctgagaatccatgtgctttagttgatgtctcctctttatcccatggtggactagaaatataattgtcttttacaaagaactggaggctcaacagaccgcggtggtaaagatgttagaaaaatgtcagaatgtggagaagcttactttgggggcagactttctcaaggtatatgttttcactccaatcaactttttttttcctgctctgattttcaagaaaactaatgagttttttttggtatacactcatttgtcttgtggtttttgttacaggttttatctcttgccgagctccgtggtgtttcttttccaaagttgaaggctaaagctttgacacttgagacagtgatctctcgatatgttattcccggtatactaagggtgccacaaaactcgcctgacttgaagaagctaaccatacacccaatggcttctccccgcaaatatcccataccggtattattcttcgtaatcatgaatttttcttgtttgccgaattttgaatcatcgaaaaatcgtcatattgaaatatacttgcatcacaggaaaagcatattgacatatact

SEQ ID NO: 165797 - DNA, 758 bp, Arabidopsis thaliana landsberg
ggccgtgtcgcgcgcgcgcagcgcggaatctaccgcctcgtccacttccccgcgagcgagcacgaggagctggtcacggcgtggctctggtccgagcaggcgggcgtgatctcgcaccagagcgcgctgtcgctgcacggtctctccgacgtgctggcggcccacgtgcatctcacgctgcccgaggcctggcggcggcggcggttccgcgtccccgccggcgtcgtgcttcaccacgccgacgtgccctccgaggagcgctcgtggttcggcccggtgcccgcgacgagcgcccgtcgtacgctgagcgactgcgcgaacgccgcgctgtccccggagctgctgcgccaagccgcgcagcaggcccttcgtcgcgggctcgtcacccgaagcgagctcggcgacgtcgagagcgcgctcgcgccgttcggggggctcgcggcatgaatacgcgcaggtacgcctcacccgaggcgttcaagcaggcgctcgagcagcgtctgcgctcgttcgctcggaccggcgccgagctcgcgcgcaagcgccagctcctcgtcttcgatcgcttcctcgcccgcgtcgtcgcggtgctcggagatgcggcgacgctgaagggggggctcgtgctcgagctgcggctcgaacgggcacgcacgacgaaagacgtcgatctccgcatcgtgggctcgccggacgatgtgctcgtgaagcttcaagaggccggtcgcatccgcctcggcgatttcatgacgttcgag

SEQ ID NO: 165798 - DNA, 733 bp, Arabidopsis thaliana landsberg
atgggtggtggtggcaatctcgtcgacggtgttcgtcgttggcttttctttcaacgtcgtccttcttcttctgcttccaataatcacgatccgattcaaaatcctcccaccgtttctaatcccgacgacgacgaagatttacagaagtttaccgatccgtcaaagctaagacagattaaggttcagcaacgaaatcacttacctatggagaagaaggtagattttgtttccaattttgaaatctagattagatttgattaattccgacgaatgaaatctggtaatttctcagggaatacctaatgctgaattcttcacggagtatggagaagcaaataggtatcagattcaagaagtagttggtaaaggaagctatggagttgttggttctgctatagatactcacactggatgaaagagttgctatcaaaaagattaacgatgtgtttgatcatatctctgatgcaactaggattcttagggagattaagttgttacgcttgcttcttcatccagatgttgttgagattaaacatatcatgcttcctccttctcgaagagagtttcgtgatgtatatgttgtctttgagttgatggaatctgatcttcatcaggttattaaagctaatgatgatttaactcctgagcttcatcagtttttcttgtatcagcttcttcgtggtttgaagtatgttcatgctggttagtttctaaacagtctctttcacttgtg

SEQ ID NO: 165799 - DNA, 3228 bp, Arabidopsis thaliana landsberg
atgagtgagccaaaggtcaggcgttgggttggcaaatatgaggttggaagattgattggtgaatgtaattttgggaaactgcggagtgctgttgacacagagacaggagaccctgtggctttgatgatccttgataaagacaaggttctgaagcataagatggctgaacaagtaattcgctttcctaatcggcatttagttttttcatgcctcctttcttgtccattgatatgcccatgttacatttcttgaagtaaaacgtggtttctaaaagcgagattcacagatagatccgtcttctgtccagaagtatgatgtgggtctttcccgtttgcttttacagataaagagagaaatttctattatgaagctgatcaaccatccaaatgtagtgcagctttatgaggtctaattccatgccccaattttttttctacgtgtctctattttcctttgattaactagaaattaacagctccctggagtctaagcaaatatgttgaaaactaacatttaatgaaatgattgatatcattccaggttttggcgagcaaggcgaagatatatattgtcctagagttcatcagtggtggaaagctttttgacaagattgtgagttttccctttacctcccaagggctttaacttgtatctaatgcatcctttggtatttgaatcatgaaccaaatgccccatgctcagctaagaagttcctgtatcttacagattagataatatattattttgacttttatccaatccattaaatttaaacttgtgaagaaaaatgatgggcgcatgaatgaagacgaagcacagagatatttccagcagcttatcaatgcagttgattactgccacagcaggggagtgtaccacagagacttaaaggtacaaggaacatttttggtaactcttaggccaagtttgcagtgtaggttcttttaagtgcagctagttagtgcctaaatttttttcttctttattttctcaatgcagccagaaaatttgcttcttgatgcgcaagagaatttgaaagtcgctgactttggattgattgccttgtcccaacaagccggggtaactactgaattttattttcttagcatcatttgtttgcctgagttcctactgagttgtccttgtcttattctaatgaatgtgcctgaagttcagtaatgatgatatcagtgattatattcacaaaaatttaacaaggtccgtaacactgatctttctagattctcaccttatcagaattacttgattttggcagggagatggccttcgtcacactgcatgtggaaatccaaattatgctgctcctgaggtattcttagtcatgtggcttgttatgcggttgtcgaaccatgtctttaatagcttccttgttgcctttgtcccaaggttcttaatgatcaaggctatgatggggcaaaggcagacttgtggtcctgtggagtgatactctttgtactacttgctgggtatttgcctttcgaggattctagtctcacgacgctgtacaaaaaggtaagaagtttgtaatatatatctccaggcttcttctcactatcatctgtgattcctgtttctaagttgcatttttattttcagatctcatctgctgattttagttgtcctccttggctctcttctggtgttaagaatttgatcgtccgaatcttggatccaaaccctatgactgtaagacatttcgttttactactcaagatttaaatttatctttcttttgttttcttctgtggagccccacaatctcaatttgctttttttttttctttctaagatcattaggcgggttaggggttactaggaatctggtggaaattttatgcctgagcgctaatggaaaatttgaagagatcattcaacatagacatagtggcattcatatagtgttggtctaatctctaagtgtaaatttaatcgttccaagtaatggacagatcagaaatcataattgggaatcataaactctgcaattcttgctgactctttcctttcctttccattcctgaaatgagctactcgtaatagattatcacttttcaaaaatgttaaaaagttgtatacccctcctgtaattgttagtcccgtggataagcgcatgttagagtcatacaaagtggatgctttatctgtgtcttgcatgtagaatttgaatatcactcagaacatctgcggataaataaacgccaacgctactcgtccttgatttcaaaagtggaactaattcactgtgttaacatgccagcgtataacaattccagagattttggaagatgtgtggttcaagaaagattacaagccagctgtatttgaagagaagaaagaagcaaatttggctgatgtggaagctgttttcaaagattctgaagtgagtcattttatctattctgagatctgtttgatgattgagttgaaggatttagtagctggaaataatcacctagattaaccgaaccttttaggcatagagcattggattcaataatatcaaagtctttgatcctaatatgaaaacatgtttgagataacgtacgcctttgcttcacaggaagggagagtgcaactgaggtcatttccttgtgtgatatgttcaggtggtactacttgtggtgatgttcgttcaaggaccaaactgatgaacggcttgatagaaagagggaggcctcaagaagctcattccattttcaacacacttattgaggaaggccacaagccaagcctcatcacatacaccacgcttgtaactgcattgacccgtcaaaagcacttccactctctcctctccctcatctccaaagtcgagaaaaacggccttaaacctgacaccattctcttcaacgccatcatcaacgcctcttccgagtctggaaatctcgatcaagcaatgaagattttcgaaaaaatgaaggaaagtggatgtaaacccacagcaagtacatttaatactctcatcaaagggtatggcaaaattggtaagctggaggaatcatcaagactcctggatatgatgttacgggatgagatgctccaaccaaatgacagaacatgtaacatacttgtccaggcttggtgtaaccagaggaagattgaagaagcatggaacattgtttataagatgcaatcttatggggtaaaacctgatgtagtaacgttaaacacattggcaaaagcgtatgcgcggatcgggtcgacatg

SEQ ID NO: 165800 - DNA, 1322 bp, Arabidopsis thaliana landsberg
atcaatctcactccttacgcaattctcattctcattgctatcttctcgatactatggtacctcttcaaacgctcgccgcaaccgcatctaccccctggaccgcgagggctacctattgtcggaaaccttccctttcttgacccggaccttcacacctacttcacaaaacttgctcaaagttatggtccaatcttcaaactcaatcttggctcaaaactaactgtcgtggtcaacactccatcgctggctcgagagatcttgaaagatcaagatatcaatttctcaaaccatgacgtccctctcacagcccgagccgttacctatggcggtctcgaccttgtctggttaccatacggtgctgaatggaggatgcttaggaaagtttgcgttcttaagcttcttagccacagaacgttgaattctttctacgagcttcgacgtaaagatatccgggaaagtacgagatatttgtaccagaaaggtcaagatagaatcaccggtgaatgttggagaacaggtctttttgacgatgatgaatctaactatgaatatgttatggggaggtactgtgaaagcagaggaaatggagagtgttggaacagagtttaaagaagtgatttctgaaattactaggcttttgggagagcctaatgtttctgactttttcccacggttagcgagattcgatcttcaaggacttgtgaagatgatgcatgtgtgtgctcgggagctcgatgccatacttgatcgagccatcgagcagatgcaactactaagaactagggatggtgatgatggtgaatgtaaagactttttgcaacatttgatgaagttaaaggaccaagaagctgactcggaggttcccattacggtaaccatgtcaaagccgtactcgtggtaatgaaatgatttcagttttcataatttaagaataaaaacttcggaggatatatagattaatcttaagatcttggggtaagaatatatttatttacttatttgttcatgagaagtgagtcgtgacaatgtgtttgttatatatatgtgaaggatttggtggttggtggtacggatacatcgaccaacacaatagagtttgcaatggccgaactaataagaaagccggagttgatgaagagagcccaacaagagctagacgaagttgtaggcaaagataacattattgaagaatcacacatcactagattgcctttcatatcagccataatgaaagaaacacttagactttatccaaccattcccctgctagtccctcaccgtccgtctgaaaccgcgctgctcggcggctacaccatcccaaa

SEQ ID NO: 165801 - DNA, 2057 bp, Arabidopsis thaliana landsberg; identical to SEQ ID NO: 36827

SEQ ID NO: 165802 - DNA, 3804 bp, Arabidopsis thaliana landsberg
gctaccggagccgccatgaatacaacattttggaactgccaaggcttaaaagggtctctgatagttcgacgcctcaaagggattaaggcaacgtattcccctgacttactctttttgctcgagacaaagaacccggatgatgtagttcgggatgtagcagttcagttggaataggattatgtgaagtgtgtgtcgcctttaggcattgggggtggtttgacattgatgtggaagaaatctgtttctgtaaatttcttttcgtttgatgcaagactcattgattgtaagataagtaataaagatgcgtctttttatttctcttgtgtctatggccatcctatgagaaagttaagaaatatcttatgggaaagacttgaaagaattgtgatcactagacaaggtccttggctaatgtgtggtgactccaacgaaatactcaatgccaatgaaaaacgtggaggtcgtataagacaaaattggagttttgttgattttcagaacatggtagcaccttcaaagtctctgatcttccattcacaggaaataatatgacttgggttggaaaaaggaaaactcacactattgaatgctggcttgatagagcaatggctaatgatcaatggaaagctaacttccctgcttctaaagttgaatacttggaagtgattgaaccagatcatcggcctacaatcatcaaaatccggaaaacatcagaaaaaggtacacgcatgttccactttgactcaagattgtgtaacatccctgaggtcgaaacgattattgaagctgcttggaataatacaccggcttatcgatgctctgtaataaaaaggattagaaactgcagatcgtacatttcaagttggaagagaacaaacaacacaaactctgttaaacggattaaggaactggttatgatcattgatgaagcaagcacagatttccttgtatcaactgaacaactccgtcaacttagaagagaactgcttttggcctatctcaaggaagagatgtactggaaattgaaatgtcgaatacaatggatgaatgaaggagacctcaatacacgtttctttcatgcttctacgaagaatcgaattgctagaaatcggctaacttcaattcaaggaatggatggtagtgatatctacggcaatcaaaaaatcgtagaggaagctgagagatattttggggaactttttatgaatatgaatcaacgtgatttaacaaatgtgctgcaacatatacaaccggtggtctctacaacgacaaatgaacttctattgaaggacatcaccacaaatgagatacgaacaacgttgtttgcaattggtgctactaaagctcttggaccagatgggtttacagcttctttttaccgacgctattgggatattataggccctgttataacggtggaagtgaagaaattctttgagacaaggactatggacacagcatggaatcacacaaatctttgcttaataccaaagattgaacaaccaaaaacaatgaaggatttccgaccgattagtctatgcaatgtcctatacaagataatctccaaaatcttggtgaaaaagctaaagtcatttctatctcatgttgtctctgaaaatcaagctgcatttatacatgaacgtcatatcattgataatgtgttcatagcacacgaagtcttccattttctacgggtcaaaaaaagatgtgctaacgaatatatggcggtaaaatagatatcagcaaggctaacgaccgcatataatggagttttttgcaggatgtcttcaaacagaaaggatttgcagatcgttggatacaatggataatggaatgtgtccgctctgtttccttctctgttttggtaaacggtagcccatatgggagatttgagtcatctagagatctgagacaaagcgatccactgtcaccatacctttttatcctatgcgcggatgttctaagctctttgatgactaatgcacaacagacagggcatataaaaggagtccgagttagcaatggcggtccatccatctctcacttactattcgctgatgattcactatttttcttaaaagcaggccaaaaaaacatcaccaacctcctcaaaatattcaatgagtatggagaggcttcgggtcaagtcattaactttgataaatcatccataacatttgggagtcgggtctatcaacaaacaagggatcaagcaatgcggaccctacaaataccaaacattggaggtggagggaaatatttgggaataccagagcaatttggccgaaggaaaaaagaaatgcttcaatacatatcggaatctgttcagaaaaagattaatggatggcagaacaagttcctcactactgcaggaaaggagaatctcattaaatcggtggctttcgcaatgccgatttattctatgaatgtcttcgagctcccgataaaactttgctctgaactaaatagcatgatatcaagattttggtggggaacaaccccaacaaaaaagaaactatcatgggttccctggaaagaaatgtcaaccccaaagagagagggggggggggcttagggtttcgtgacctgcaccaatttaatcaagctttattagcaaatcaagtatggaagctgttacataggccaaaaagcctactgtacataatgcttaagtaagatattttcgacaaggggtcttcctaaatgcgtcacgaggaacacgaccctcatatggctggagctcactcagatttggatgcgagttgttaaaacttggggctcaaaagaatatcggagatggagatggcacaagaataggactagacccatggctactgacaaacccaccacgccctccaatgttagtgccaatgacagatccagaaacgttggttagtgatcttctcgacccgacgacatctcaatggaatgaacaaaacctgcggagttaattgaaccgataaaccatcctattatcagaaaaatatatgttcctccgatccgatcacctgactcatatgtatggagttacatgaaggatggaagattcaccgtgaagtgaggctattgggtaccagcaacaaagaatagtgactcgcctaatgctcccccgctagctgcacacccggatattgtagaaggattatggaaactgaatatagttcctaaactgaaacatttcttatggagaacagcttcgagagccattggagttgcatataacctaagaagacggaacatcatcatcaatccatattgtgcacattgttgcacaaaatttgaaattgggaaccacattctttttttcctgtccacaagcgaaagtagtgtggagggcaacttgtcttgatactagtgtgcacaatcctccatagaagataaaatgaggtacttatttaaagttcacaatgatgataaagttgatgaactcagtaggtatctactgttctggataatgtggagattattgaaaggtcgcaatgtgctagtcttcaacaaaaacgtcattagtgcacgagagacaattcagttggcaacaacagatactcaagaatggattgacaatgtcattcatcaggccaaactaagtacatagaacaagaagagataaatggcaaccaccgccgaggggctgggttaaatgtaattatgatgcgtcacatcatgagggctctgggcttcaggacttagttggataattcgagattccgatgggagtgttttggattgtggtataggacaatttgaaggacgtagcacagtggaggaagctgaatgcacgacccttatttagctatcaagctt

SEQ ID NO: 165803 - DNA, 792 bp, Arabidopsis thaliana landsberg
tggaaactttctgcatgaaatcatccagaaacaccaagagcaacacaacttacaacaaaaatctcaagacccttctctccactcttagcaaccaatcatcattcgctaactactacaatctcacgaccggtctagcttcagagaccgtccatggaatgttcttatgcacaggagacgtcaacagaacaacctgcaacgcctgcgtcaaggacgcaacaatcgagattgccaaaaactgtactaaccatcgagaagcaatcatttacaacgtagattgtatagttcgatactcagataagttcttcctcacgaccctagagaccaatcctagctattggtggtcatctcacgatttaatacccaaatcatttggtaaatttggacagagactgtctgacaaaatgggagaagttatcgttagatcatctttgtgtctacatcgtttacgccatattatcttatggatacaactagattcgataacttgtatgatcttgagtctattgttcagtgtactcctgatttggatccaagaaactgcaccacatgtctgaaacttgcattgcaagaactcactgaatgttgtggtaatcaggtttgggctttcatctacactcccaactgtatggtgagttttgatacatacaattcatccttgccgccgcttccaccgccaagtcgcagcggtttcttctcccatagaggtaagcatattatatatgaaataatgacgggttatatacttctctatatatcgcagatgatatatacgcaccttttatgctttgacat

SEQ ID NO: 165804 - DNA, 951 bp, Arabidopsis thaliana landsberg
caggaagagaaggcaattggttgaggaatactacccatgcataacgaactacactggtgcagacgtggggacataggaatcatgtttgcttgaaagaaggttcaatcactgttcctccatatgctccaccacagaagatgcagtcacacttaattcccgaaaaaactcctcgatccatcttcgtttatttcagaggattgttttatgatgtgggaaatgaccctgagggtggttattatgcgaggtaatttttttcttatgaaagttcttacctattgttcataataaatttcataaatctcctaaaacagttcataattgctttatcggtttggaattttggacataaaactcaaaaaaggaaaatttatcagactgtttttagagccatggattgttcttataatcagtgatgatgtttgtttgtcaaactggcacaggggtgcaagagcagctgtatgggaaaacttcaaagacaatccgctgtttgacatctcaacagagcacccaacaacatattatgaggacatgcagagagcaatcttctgcctatgcccacttggatgggccccatggagtccaagactggtggaagcagtgatattcggttgcatccctgtgatcatagcagacgacatcgtgttaccttttgcagatgcaatcccttgggaagatattggtgtgtttgtggatgagaaagatgtcccttacctggacacaatactcacatcgatcccaccagaggttatactgagaaaacagaggttgttggcaaacccgtcgatgaaacaagccatgctgttcccgcaaccggctcaaccaggggatgcgtttcatcaagtattgaatgggttggctcgtaagctgcctcatgagaggagtgtgtatctgagaccaggtgagaagctgttgaactggacggcaggaccggtcgctgatctgaaaccttgg

SEQ ID NO: 165805 - DNA, 1528 bp, Arabidopsis thaliana landsberg
  unsure (1)..(1528): unsure at all n locations
atgctttttataagcaagatgacatagtcaaaagagaatacagaatcagattgaacgcttcaatttattgttgtagatatttagtacgacaaggattatcttttcgaggccatgatgagtcagtggattcagaaaacagggggaatttcttagagcttgtgaaatatactgcagggcaaaatgaggctgtaagtaaagttgtgttggagaatgctccaaaaaataatcagatggtatgtcccaaaattcaaaaagatatagtgcattgctttgcggaagaagtgattagatctataattcaagaagttgatcatgatgtattttgcttgatagtggatgaatctgcagatatttctgataaagaacaaatggcagcggttttttgttttgttgataaacatgggacagtgaaagaaagatttattggtcttatccatgttaaggaaacattgtctgcatatctgaaatgtgctatcgattcattgattgctaaacttggattgagtataaaacagttaagaggacaaggctatgatggtgcatgtaatatgaaaggtgaattcaatgggttgagatctctaattttgagagaaaatagttctgcatattatatccactgctttgcgcatcagcttcagttggtcgtcgnnnnnnnnnnnnnnnnnnatttcaaaattggagatttctttgatatgatttctgtcttgataaatgtggttggagcttcttgtaagagaaaggatagggttcgagatgaatttcggaaaaagctggaggaaggaatcaatcaaggtgaaattaagacgggaaaaagattgaatcaggaactttcactacagagacccgataatactcgttggggtactcactacacaacattactccggttagttgatttattcactcttatcattaaagtgcttgagtggatcgaagatgatggacctgatagtcccaaaagacgacaagctaatggacttctaaagtactttaatacctttgactttgtgttctacttacagttgatgttgcttattcttggactcacaaatagtttatcagtggctctacaaaggaaagaccaagacattctgaatgctatgtcactagtgaaatccaccaagcaacagttattcaagctcagagatgatggatgggattcttttcttaatgaagttttttctttttgtaaggatcatgacattgagtttgtcattatggatggagaatttgttgatccaagaaagccaagaaaaaaaagtaacatgaccaacttgcatcattatcaagtggagtgtttttacactgtattggatatgcaaattcaggagtttaatgatcgtttcgatgaggtaaacactgaattacttggttgtgttgcttctttaagccctactgatttgtttcgtgagtttgatcagttaaaagttatgagatttggctgagttttatccccaagattttactcctattgatcggagatcacacgagaaacagcttggtctttacattgacaatatttgggaag

SEQ ID NO: 165806 - DNA, 2623 bp, Arabidopsis thaliana landsberg
ctcatggatgagtagaagcttctattaagaaccatgttccattttaagcttcgtattttgttatgttcacaaatgtcatcgactcgtatttatactcaatacatcgaatcaaacgtattaaaatacttgctgacgagctggatgaaccgtggtagagagacgagttggacaaaccgagttgtttgctgaaggtctagacgagctgggcgacgagataggtggaccatgcagtcaatggacgaactgccgctaggcgaggaggtagatgagttttgcagtcgagggatgagctgatagctagacgtggagttggacgagctgactagctgacagctaggcgaggagatggtcactgagtgatgggaagagcttgaagacgagctgaggagcttgaggatgagccgaggagcttgaagagcttaaaggcgagctgaagagcttgacgaagaggagcgagctaacgagcttcttgggaaggacgagctgacaagctacttgagacggacgagctgacgagctacttgagacgggcggaacccgcgataatcgcggatttgcatctcacttctctaacttttgtcggcaagaccttggttgggaagctcttacctcggaccgaatccgagcatctggtaaaccacttcggactcgtcctgacctcgctatctcttcacctcccttttctcctcgtatattttgcaaagctgagatgtctggaccatcgtaccgagctgaaaagaagcgtgagagggaaagagctgatcaagaaaaggtcaggatcttgtctgacagggtcgtgatgtcggggacccttgaagacagcaaactccgagctgcagagaaggccaagcatccggtgaccgacagtaaggccaaatttcgtcaagagcctggaattttgacagtaagaccgaaggactctcgtggtccccggttctttgattttgcagctaatcttggaattcaactccgtcttctgcagccacgaagatcagctttttgacaaggatagcgaacttgacagctttaggcgaaatgaagacgagaacgctcatacggtggagagggccagcagggtgctgaagcggatgaaagacgccgagctacgggtccaggaactcgaggtgaacaatattgacctcatggcgaaactggaagtaggtaaaaatgcctatcttgctgcggtcgacaacgagagccaggcccgagctgaactcaaggttcgcgaggagaagctaaggaaacttgaagaggagcaagccgcaaaaattgacgtcgccaggaaggaagagaggaagaaggtcaaagctcggtttcacgagttctcgtcgaagtatgggaacttcttccgggagtccgaagaagttgaaacgctgaaggtcccccacttgttttccttaaaacttgaatttgtttaaattggccacggaggcccttttgtttgtaaatacttaattttatgttggccacagaggccttttattttgaagtaccagatttttgaggtcatagagaccatttattttgcttgattttagcttattttccgaattacgagctaagctcggtttatccttcgtatagaaaattaagcaaaacaaagatgacttccctaacgaggtagactcggtgttagtagggacgtcatttatgaccgcgaatcacaagtcttagacttagttcgggtatattcgaagcaaatgatgacttccctaacgaggtagactcggtgttagtagggacgtcatttatgaccgcgaatcacaagtcttggacttagttcgggtatattcgaagcgagggtttggacgtgaagatatccacccgaagcttatttcgaagatagaatttgataaaaaatctttgattcaagagagaaactttgtttttatttgaataatgaagagactggacccgaagtgcaggctacctacgtacccaaaggttgggaggcttttgttatagcgttaaaccttttagccaaaaaagcccgttcttcttcggcattgatccagtttgttgctcgatgaagggcgtcctgaatcgattcggggcggtttacggttagagattcacggaaacgcgactcatgccacaaaccatttttgagggcggattgagctgccgaatcagacaggttgggcacttggaccatgatctctttgaaggcagtgatgtaagtccgaagtggatcgtcagctccttgagagaggttccaaagctgagcctcagtgacgtcacttttgataaagtacccgtactgcttaatgaaagcagtggagagttgcttaaagttatcgatcgaaccctcttctaactgggtgagccaggtaagtgcgggacctgacaaactttctgagaatagcttgcagagccccgcgtcttcttcgtgtggctcgagcgggactcgacctgcgatgacctggaaagaagtcagatactcttttgggtctcccttaccgttataaccggggagtttgaagtctcggaaatcgcgaatacggagctttgagattctcgaagtgaaaggtgttctccttgttgcttcaacaactttttcgacttcgggggccgacgtggtagcctgatgaacctttgtgttcattgcccagatttgatcttg

SEQ ID NO: 165807 - DNA, 530 bp, Arabidopsis thaliana landsberg; identical to SEQ ID NO: 73108

SEQ ID NO: 165808 - DNA, 466 bp, Arabidopsis thaliana landsberg
  unsure (1)..(466): unsure at all n locations
acgctcgttacgggtgccggaagcgggctgtttcaacacagatcccgttccttgtcctgtcgaaggggcccgatacgctgatcctggaatcgcatctcgccaaggccaatcnnnnnnnnnnnnnnnnnnnnnnnnnnnnnnnnnnnnnnncgatcttcaacggtccccacgcctatatctcgccgacatggtacggcgtgcgcccctttgtcccgacctggaactacgtggcggtacaggcgtccggcaagatcgaatggatccacgacgtcggtgagatcatcggcgtcattatgcgcacggttcactacttcgaggaccagtatcagacggcgtgggatccgggcccgtccgctgaatatatggaggggatcgcctctggggtcgatgccccccgtcccnaagtcaccgccctcgaaggcgccaaaaagatcgggcaggacaaggcccccgagccacaggacac

SEQ ID NO: 165809 - DNA, 2903 bp, Arabidopsis thaliana landsberg
  unsure (1)..(2903): unsure at all n locations
cacaaggactgaacaaattatgtttgatatcgttgacatggaatacccttacaatgcaatcattggtcgtggtactcttaatgccttcgaagcaattctgcatccagcttatctttgcatgaagataccttcggaccaagggcccattgatattcatggaagtcaagaagctgccagaagggccgaaggaaattggacagactcaaaagcaatccataatatagatggaactgaagcttgtgagcagtacaagttcagaagggaaaaagctgcttcggctgaccagccgaaacccgtgctcttgtgtgaggatatagcagagcagaaggtgctattgggatctcaattgtccgaagagcaggagaaaaccttgataagatttttgttcaacaacaaagatgtttttgcttggtcagctaatgatctgtgcggagttaacagggatgtcatcgagcattcacttaatgtggatccatccttcaggccaaggaagcaaagacttcgaaagatgtctgatgataaagttgaaggtgctcggaacaaagtaaaaagacttctcagtgctggcgttatcagagaagtaacatatccagaatggctagccaacactgttatggtgaagaaggctaatggtaaatggagaatgtgcattgatttcacagatctcaacaaggtttgtccaaaggatgagtttccattgccaaggatagattcccttgtagatgcagcagcttcatcagagctcatgagtctgttagattgttattcaggctatcatcaaatttggatgaagaaggaagatgagccaaagaccagcttcattacccccagtggtacatattgttatcttcggatgcctgagggnnnnnnnnnnnnnnnnnnnnnnntcagcagaatgacagccaaggtccttcattctcagataggcagaaatgtgctaacatatgttgatgacatcatagtaaaaagcacgaagcaagaaaatcatatcactgatctgcaagaaacatttgccaatttcaggcaagctggcctgaaattaaatccagagaaatgtgtttttggagtaaagaagggtaagttccttggctgtctggtatcaacaaaaggaattgaagctaacccaagcaagattgaagccatacttcgaatggaaccgccaagtacgaagaagggggcccaacggttggcaggaagattggcttcattgaatagatttatatctagatcagcagaaagaaacttgccattcttttaaatactaaagtcagtcgaagttttttagtggggcccagctcaatagaaagccttcaaagagctgaagcaatacctgattgatctaacaacattaactccacctacgccaggggctcctttgttattatatgtggcagttcgcactcagcggtaagtgcagcacttgttcaggagaagcttgaaggctaggttaagagcaggccccaatatattttgtatccgaggttcttagtttatcaaagaaaaattatacagagttggagaaggtactgtatgctgtcttgatggcctccagaaagcttcggcactattttcaagcttacaacataattgttccttcttcacaacctctgaaggatattatgaggaaccgagaagctactggaaggattggaaaatgggctgcagagctcaatgaattttgtattgattatgttcatagatcttcaatttagtcccaggcattagcagacttcattgctgattggacgccaggggctcaggaggaagaaacaaataaagacgccgaaacatggacagcgttttgtgatgggtcttggggaacttcggagcaggagcggctgctgtgttggtttcaccttccaaagttaaaacttgttatacggcaaagcttgactttagttgcacaaataacattgccgagtacgaagccttgcttttaggtcttcggaagttaaaagcaatgggaataagaagggccatacttaaaactgattcccagattgtttcgggtcatgttgacaagagttgcaaggctaaggatccgaagcttgaaaaatatctggatatggttcgaagagttgaagcttccttcgaagggttttctgtcaaaaatatccctagaggacaaaatgaacatgctgatttgctagctaagtcagcagcacaggggctgcctttaccttcggatgtatttttcgaaacaataaaatngccttcggtggaacttcttgaaagagcagttcttaatatatctcctgtttttagcgaagattggagaaccgagatcatctcttaccttcagggtaagtttctttcagatgacgaagcttataacaagaggatagaagcaagagctcgcccatatgtcatgatagaaggggagttgtataaacatggagtttgtgtccgctgcttaaatgcttatctagaaccgatggtatagagttaatgaaagaaatacatgcaggcctgtgtggatctcacattggatctaggccgttactcggaaaaattttccgtcaagggttttattggccgaaggcagcttcggatgcagcagaattggttcaaaagtgcgaaggttgtcagaaatgtgcaagagatcaaaaacaaccttcgtccctaacacagctcatacaacccacttggccattgcaaaggtggggccttgacttgttaggtccgttaccaccggcccaagggaacctgagatatgttgtagtagctgtggaatatttttctaaatggattgatgcgaagcctttagccacaataacttcggccaccgtccaaaagtttttctggcagaatattgtttgtcgtttcggggtccaaaggccatcactgtggacaatgggacacagtttgactccgaagctttcagggatttctcgaccaaattg

SEQ ID NO: 165810 - DNA, 890 bp, Arabidopsis thaliana landsberg
gctagctccagcataatatcaatggcggcgttggttgaatttatctctgatcgtgtcctgagttcttgcaaatccgcttgcaaagaagatccaaagctcagatccatttaacattagaccaaaaaaaaaaaaaagctcagatcctatatttctgcgcttcgcgaacgaatggacaaattgatggaaattaaacggtcaccggtcgaggaagcaagactggaaaaccatccaaggaggactcaatcattaagatcatcgactttttagctgtctcaagccaagatgtggtcaagatcattaaagaaagcaattatgatttctcgaagaacaaagaagtaaagtctgtgattgatctctattttgagagtaccaacaatactttgaatttagtcaataccgtcgagaaatacgtagcgaaagcaaaaaccaccacgttcaacatttgacttgcgatccgacagtttgaaagagagtcgagggacacggattttggaggaaacaataagtacgcgggaacgttagagaagctgaataaggttaaagctctgggagatctttttggtgacgagttcacgactcagtacaaggctatcttcgacgagcatcagatgcttttaaacaagtcccatcacatgcaactagagcatgagaagaagcataagaatgacaagaaatccaagagattggggtatatttttttcgcggctgcacttttatctgttctcgccttatggatttatcttggagcagtctcacttgtggtagcagctaaggttgtgattgaagtggcaacaccgagtattgcacctttatggaaatgggtcactgagatcctcgaggactctgagtctgagattgcttacaagaaacttactgatttgtttcgatcg

SEQ ID NO: 165811 - DNA, 3231 bp, Arabidopsis thaliana landsberg
  unsure (1)..(3231): unsure at all n locations
tcaacttcggaagagtcttaagttacctttttctgcttcttcgtttgtatcctctttacctttgcaaagaatacattgggatctttggggtccttcaccaataatgtcagtacaaggttttcgatactatgctgttttcattgacaattactcacgcttcagctggttttatcccctcaagttgaaatcagactttgctttgatattttctctgtttcaagcaatggttgagaatcagtttcaacagaaaattggaacctttcaatgtgatggtgggggtgagtttataagcaaagacttcatagctcatctacaaaaacatggcattcaacaactgatgtcatgtccacacacacctcaacaaaacggtttagcagaaaaaaaacacagacacattgttgaattaggactctcaatgatgttccaaagtagtatgccacagaagtattgggttgaggcgttctacactgcaaattttcttatcaatctactaccaagttcagtattggagaagaaatgcagtccctatgaagttctaatgggaaagctccaaattacacatcactacgtgtctttgggtgtgtctgctatcctaccctaagagattatgcaaccacaaagttcgaccctagatcactcaagtgtgtgttcctaggatacaatgacaagtataagggctacagatgcttacttccaaccacagggcgtgtgtatatcagccgtcatgtcatctttgatgagtcactctttcctttttcatctatggcttacattcacttgcaacctgcaaatgttacaccattgatgtctgcttggttaaagggttgctcagtacaagaacagaatcagactggtacttcaacagaaaatcaagatcacaatgatcagaattcagtaccttctggtagggttttgttgagagaagaggagagtactgggtgtacggcaggctttgatcctgtttctataggcaacagctcttcttcttctactcagtaaatcactacctcagaagactctcctatcattcaaccgctgccatcaactacagaacagtctactcagaatcaatcttctcaaagtgaatcttctcagagtgcatcttccaacagtgagtcatctcaggtccaaacaactcagccatctcagtctacccaccctatgacaacaagattaaaagatggaatcagaaaaccaaatccgaggtatgttttacacagtcaaagagtatcttacccggaacctaaaacagtgacagctgctttaaaagatgaaggctggactggtgcaatgcacgaagaaatggacaattgctctgaagctaaaacctggtccttggtgccctatacaccgaatatgcatgtattaggcagcaagtgggttttcagaactaaactcaatgctgatgggtcccttgacaagctgaaagccagactggttgcaaagggatttaatcaagaagaaggcattgattacctggaaacttatagcccagtggtgagaactccgacagttagatcagttcttcacctagcaaccatcatgcagtgggacataaagcagatggatgtgaagaatgccttcctccatggtgatctcacagagacagtgtacatgatgcagcctgcaggttttgtagacaaatcaaagccagatcatgtctatcttttgcataagtctatctacggattaaaacaatccccacatgcttggtttgataaatttagcacttatctgattgagtttggctttgaatgtagcaagccggatccatccttgtttgtatacatcaagaacaagagtatcatcctgctgctgctttacgttgatgacatgataataacaagaaacagttcaaatgcgatgtcaaagctattagacagcttgaatactgaattcagaatgaaagatatgggaagactacattactttttggggattcaagtgcagtttcattcagaaggaatgtttctctcccaacagaagtatgcagaagatcttcttgttgtggctgcgatgagtgattgtgctccaatgcctactcctctgccacttcagttgactgctatacctgcacaagatgaaatctttgacaatccaacatatttcagaagtcttgcaggtaaacttcaatatcttaccttaacaagacctgatatacagtttgctgttaactttgtttgccagaagatgcattctcctactacagcagattttggtttgctcaaacggattctgagatatgtgaaaggaactattcacttgggcttacacatcaagaaaaaccagaacttgtccctcgtagcttacagtgatagcgactgggctgggtgtaaggaaacaagacgctcgacaaccgggttctgtacactacttggatgcaacctcatttcgtggtcagccaagagacaagaaacggtgtcaaaatctagcacagaagcagagtatcgagctcttacggcagtagctcaagagcttacttggctgtcttttctgcttagggatattggagttacacaaacccatccaaccttggtgaaatgtgannnnnnnnnnnnnnnnnnnnnnnnnnncaatcctgctcttcataacaggtctaagcactttgacacagattatcattacatcagagaacaagttgctttgggtcttgtggagacaaaacacatatctgcaacgctgcaacttgcagacattttcacaaaaccgctaccaagacgagccttcattgatctcagaatcaaacttggtgtagctgaaccacccaccacaagtttgagggggaatgtgagtgagatgtgtgaagctaaggagatgggccaaacccataacaaatcaagtccaactataaagcctggtcaacaaatacagaagatgacaaagatcaaaagctgtctctcatccgtacatgtacctgcaggaaacattaaaagagaaaggaagacgctcctctcaaactaattcaatcctctttcatccttatctaatgactaaaattacatacatctgtatagtgtcgagagtgttctagatccttctccctcaatctctataaaaagaagaatgtaatctcattgtaaagattattgaaaaacagagtaatattattaaaaggttcaaattttttcttctttctcaaaacttacatgtgtgagcaagtcttgtgcgccgtctgactcgtcgaagctactattcttcctaccacttataatctcaagaactaacactccg

SEQ ID NO: 165812 - DNA, 2004 bp, Arabidopsis thaliana landsberg
aacaaggtgaatgatccccttcacacgacaagtcgcgtcgagcggtgacaagaagaagaagatgaggaagtgggctactacgagaccgactcttcgtcgccatccacctccagctccgacacgccgtccgtaacttctaacggccatgagcgcaagaagtttagtaagattcccctacgctaccctcgcatttccaaacgtactccattactttccgtcccattaggcaaaccacctatgtttgatggtgaagattataatatgtggagtgataaaatgaggcatcatctaacctcactccacactagcatttgggatgttgttgatattggagtacatgtaccatcaccaggggatgaagactatgattcagacgaggtcgccaaaatccgacacttcaactcccaagccaccactatactccttgcctctttaagtcgagaggagtataacaaggtgcaagggttaaaaagcgccaaggagatttgggacgtgctcaagaccgcgtatgaaggagacgaggtgaccaagatcaccaagcgggagacgatcgagggggagcttggtcgcttcgcgtcttcgccaaggggaggagccacaagaaatgtacaaccggctcaagaccttggtgaaccaagtgcgcaacctcgggagcacaaaatgggatgaccacgaagtggttaaggttattctaagagctcttattttccttaaccccactcaagtacaattaattcgtgggaatcctagatatccactaatgacccccgaggaagttatcgggaattttgtgagttttgaatgcatgattaagggctccaagaagatcaacgagcttgacgagccttccacctccgaggcgcaaccggtggccttcaaggcaacggaggagaagaaggaggagtctacaccaagtagacaaccaattgacgcctccaagctcgacaacgaggagatggccctaatcatcaaaagctttcggcaaattctcaagcaacggaaggggaaggactacaaaccccgttccaagaaggtttgctacaagtgtggtaagcccggtcacttcattgcaaaatgtcctatgtctagtgacagtgacaggggcgacgacaagaagggaagaagaaaggagaagaagaaatactacaagaagaagggcggcgatgcccatgtttgtcgggaattggactccgacgaaagctcaagcgactcctccgacgacgaggacgccgccaacatcgccgtcaccaagggccttctcttccccaacgtcggccacaagtgtctcatggccaaggacggcaaaaagaaggtaaaaacgaggtcctccactaaatatgaaacatctagtgatgaggatgatgacaaaaatgaggaggataacttgcgcattctttttgctaaccttaacatggaacaaaaggaaaaattaaatgaactaattagtgccatccatgaaaaggatgatctcttggactcccaagaggacttcctaatcaaggagaataagaaacatgttaaggttaaaaatcgttacgctctacaagttgaaaaatgtgaaaaattgtctagtgagctaagcacttgccgtgagattattgacaaccttagaaatgaaaatgctagtttaaatgctaaggttgattcacatgtttgtgatgtttcaattcccaatcttagagatgataatgttgatttgcttgctaagattgatgaattgaatgtatctcttgctagccttagattagagaatgaaaatttaattgctaaggctaaagattttgatgtttgcaaagttacaatttccgatcttagagataagaatgatatacttcgtgctaagattgttgaacttaattcttgcaaaccatctacatctaccattgagcatgccactatttgcactagatgtagagatgttgatgttaatgctattcacgatcatatggctttaattaaacaacaaaatgatcatatagcaaaactagatgctaaaattgccga

SEQ ID NO: 165813 - DNA, 3094 bp, Arabidopsis thaliana landsberg; identical to SEQ ID NO: 10973
  unsure (1)..(3094): unsure at all n locations

SEQ ID NO: 165814 - DNA, 741 bp, Arabidopsis thaliana landsberg
caatcacaaaagcaatttttctgtatggctctatggtggggctggaagtggagatgtgggaatgtttttggcggcaatggtagatgtcgggatagagttaagtttctgaaggatcttgccaaggaagtgctggattcctatgcggggctcagagatgcacaatcgggtaccacaagggtggagagcttgattaagtgggtgtttccggggagtgggtagctgaaaattaactctgacagggcgtcacaggagaacccgggtaaagctgcagccgggggcgtgatacgagacgagtcaggaagctggatagtgggttttgcatttcatataggcatttgctccgctccgatggcggagctgtggggagcttactatgcactctatttagcttgggagagacgagcaccacatgtagagttggagatagatttagagatggtggtgggtattctaaagacagggattagtgattcgcatccgctgtcctacatggtacgtttgtgccatgacttcatttcaagggactggaatgtcttcatttctcatgtgtataaggaaggtaaccgtcttggtgatgagttagttaactatgcttttactttacagttgggttttcatttactagaggtcactcctagttgtgttgcttcgattttgttggacgactcgaggaacttcgattttgttggacgactcgaggaactgcgtttcctcgacagatttgtatttaattttttgtaa

SEQ ID NO: 165815 - DNA, 542 bp, Arabidopsis thaliana landsberg
  unsure (1)..(542): unsure at all n locations
tggactggatacagtaaaggccagttaaaccccaatcctgcggcaattccagccgaaggatacagcagacaacgtcatgatgaaaaattaaggcgcttagcacagaaaaagttcgatctgatcatgctcggcaattccatcaccaataactttgaaaagcccgaataccaatctgtatggaaacaattttttgaaccccgcaatgccatcaaccttggcttcagtggttatcgaacagaaaacctgctgtggaatattgaaaacggtgaactggacggccagtcgccaaaagtactggtactggagatcggcacaaataacattgatgaaaagaactatccgacccgccataccgcggcgcagcttgnnnnnnnnnnnnnnnnnnnnnnnnnattggtacgaaaaaagctgcctgcaacaaagatcatcattatgaggtgtttccccggagcatatggcggtccgaaccccaaatcgcaccggactatactggaacgtgcctcggatattgcagccaggcgtgcttcaatgagaatatttta

SEQ ID NO: 165816 - DNA, 695 bp, Arabidopsis thaliana landsberg
acaatgtctctcatgaatccctctaatgtaaatctagctacctatgttgcatttaacgatttgcaacttggaacgcacgcccaacatgttattggccatattgttagcatgtgagaagctcatgaaatacgtaccgccaacgattgtattctttggaaacttactcctcttgcttgatgagaaggtatcattgtctaatgataacatatcaatatattttcctaacataaatctcatattcatacatgcatctcttgctgaaaaaaacaatagtattttccaaaaatgaatgatcttacaaattcaagggttcgaagttaggctatgcaccaaacacaccaaaatcacggaccatccttttgtcatcaaattcaacattgatactaaaatctaggggtatatgaatcatggctaaaaatagaaaatgataaatttagagtttacaattacgctcacctagttggttttgccaacacaaatcttgcattacctggtaaatatttactaaacagatgattttctatttaataatatcgaaatactaacattagtctcagcttgaaattataaatataatagtaatagtatcgtattatatgaatcttacatatttacttttcgtggttaataataaatttcaaactcaatacagatgtagttgagaaaattctttcaatcgaggctcaaaccttaat

SEQ ID NO: 165817 - DNA, 631 bp, Arabidopsis thaliana landsberg
aaaaccatcggtcggcaatgccgagaagtatgcgcctccgcctcctcagcggtggcatgtaccctccaccgccacagccgatcctcgctaatctttcctaaaccctaaaaaccacaaaacccctaattcttttaaagcaaacaaaagtgacatcgttttgccaactacgacaatagagaatggagagggagacaaagaagacgcattaatggtgttgtcaagtagtagcttaagtggagcagaggaacccggtttaggaccatgtggttatggagacgatggcgattgtaacccaagcattaatggcgacgatggagctttgtgtctcaatgacgacattttcgattcttgttttctattggacgactctcatgctgtccacgcgtcctcatgtgagtcgaacaacgtaaaaaactctgagccatatggagggatgtcagttgggcacaaaaatatcgaaacgatggctgatgatctcgttgactgggactttgtatggagagaaggtcaaccctttgggacgaaaaagatgatcttgattccgttttgtcgaggctgttatatggagatgaaatggaatctgagatcagacaagggactccaacgactttggagacccgttggatattga

SEQ ID NO: 165818 - DNA, 1055 bp, Arabidopsis thaliana landsberg; identical to SEQ ID NO: 33905
  unsure (1)..(1055): unsure at all n locations

SEQ ID NO: 165819 - DNA, 324 bp, Arabidopsis thaliana landsberg
cccatgaagcatttgtcgcgcgccgaggccgaaggcttttatgctttacatcgcgagcgcccgttcttcgaggccctggtggagttcatgatctccggcccggtgatgatcagcgtgctggagggcgaaaacgccgtgctggcccatcgtgacctgatgggcgccaccaacccgaaggaagctgcgccgggcacgatccgcgccgacttcgccgagtcgatcgacgccaacgccgtgcatggctccgacgccgtggaaaccgccaaggtggagatcgcctatttctttgcggcgacggatgtggtttcgcgttaatttcgtgcg

SEQ ID NO: 165820 - DNA, 1104 bp, Arabidopsis thaliana landsberg
gtgttcctctacgctctcttgacagagagaatcattcttgtggaccaacgcaaggatattagtgatctcttctgtgagccttatcctggtacttcatggttacttcctcttgattttccattgatgggtcagatagatagtttcaaccgggaatactcgcattgttacggaacaatgttgaagaatcataccattaactcgacaacaatcccatcacatctctatcttcatcttctccatgattacagggatcaagacaagatgttcttttgccaaaaggatcagtctttagtcgacaaagtcccttggctggttgtcaaatccaacctttactttattccatctctatggctgaatcctagtttccaaaccgaactaatcaagctattcccgcagaaagacaccgtcttctaccacctggctcggtatctttttcacccgacaaaccaagtctggggtatggtcacaagatcctacaatgcttacttatcaagagcagacgagatactagggattcaagtacgggttttcagcagacaaactaaatatttccagcacgtgatggaccaaatcgtagcatgtacacaaagagagaaactgttacctgaatttgctgcacaagaagaagcacaagtaactaatacatcaaatccctccaaacttaaagctgttctggttacatctctgaatccagaatactcaaataacctaaagaagatgtattgggaacacccaactacaacaggagacatagtagaagtttatcagccaagtagagaaaggtttcagcaaacagacaaaaagcttcacgaccaaaaggccctggcagagatgtacctccttagcctaaccgatgaacttgtgacaagcacaaggtctacatttggatatgtagctcaaggtcttggagggttaaagccatggatactctacgagccaagggacaagaaaactccaaacccaccatgtgttagggccatgtcgatggagccttgttttcttagagctccgctccatggttgtcaagctaagacaatcaaaatccctccttttgttaggatttgtgaagattggaaaacagggctgaagctagttgatgtttca

SEQ ID NO: 165821 - DNA, 4897 bp, Arabidopsis thaliana landsberg
  unsure (1)..(4897): unsure at all n locations
agctatatctgaaatgagctccaaatccaccgcgcaacaagcacaacgcccgagctcgaccgcgttctggaggagactcagcaaaccccctttactcgacgaataactagcgtctcgatcagaggcgcccaaaaaatcaagctggaaagttataacggtagaagcgatccgaaagagttcctaacatcgttcaacgtcgccataaaccgggccgagctcacgatcgacaacttcgatgccgggaggtgtcaaatattcatcgaacatctgaccggaccagctctcaactggttttcacgtctaaaacccaattccatcgacagcttccatcagctcacctcgtccttcctcaaacattacgcgcctctaatcaaaaatcaaacatcgaacgccgacctatggtccatctctcagggagctaaagaatcacttcgatcttttgttgatcgtttcaaactggtagtcacaaatatcactgtgcccgacgaagctgcaatagttgcgctacgaaatgcagtatggtacgactccagattccgggacgacataacgttgcacgccccgagcaccctagaggacgccctgcatcgggcatccagattcatcgaacttgaagaggagaagctcattctggcaagaaaacacagctcgaccaaaacccccgcatgtaaagacgcagtggttattaaggtcggagctgacgaatcaaacgagccgcgacagcacctcgatcgcaatcccagtgcgggccggaagccaacttctttcttagtaagcaccaaaactcccgacgttaaaccttggaacaaatatattcgcgacaccgattccccagcagcagggccgatgtactgggaataccacaaaagcagagcgcattcgaccgagaattgccgtttcctgcagggcctcctgatggccaagtataagagcggtggaatagcaatcgagtgcgaccgacccgtgataaataacaaaaatcaacgacgtaacgaaactacggcccgacaatatttgaacgatcaagccaagccactgacccgagcagaacaagggataactacctcggctgacgacccggtagccaaaagacagcgaagcggaaaagctatcgccgcggaaccagtcgtggttagacaagttcacgtgataatgggaggactccagaattgcagcgattcagtgcgctcaattaagcaataccgaaagaaagccgagatggtggtagcttgccctcatccacaagcacgacaagaaatccgaactaaagcgctccgatctcattcaccgacgccgacctagaaggtttggataccctgcacaacgacccgctcgttgtcgagttgatcataagcgatagcagagtcacaagggttctgattgacaccggaagctcggtagacgtgattttcaaagatgttttaaccgcgatgaacattacggatcgtcagattaagccagtctccaaacctctcgccggttttgacggagatttcgtcatgacaataggcacgattaaattgccaatctttgtcggaggattattcgcctgggtgaagttcgtcgtgattgacaaaccagcggtctacaacgttatcctcggcaccccctggattcaccaaatgcaagccatcctgtccacttatcatcagtgcgttaagttcccaacgcacaacggcatcttcactctccgaggtaaccaacaggtcgccagaacgtgcttcctcattgagcacaaaaatcgaaccgctaagaaattatagaagttaaccgctccagcgccgaaggaagccaagaccccgagcaggtcttacgaggagtccgagttgtgccgcaccgagatggtaaacatagatgaatccgacccgacaaggtggttggtgtcggggcaaagatttcacagttaattcggctcgaactgattgcactacttaaacgaaattctaaaaccttcgcatggagcatcgaagatatgaagggaatcgacccggcaatcaccgcacacgaacttaacgtagatccaactttcaagccggtaaaacagaaacgaaggaagctcggcccggagcgtgcacgagcagtgaatgaagaggtggaaaaactccttaaggcggggcaaatcatcgaggtgaaataccctgaatggctagcaaatcccgtcgtcgtcaaaaagaagaacgggaagtggcgcgtctgtgtcgattatactgacctcaacagagcctgcccaaaggatagttatccactgccgcacatcgaccggctcgtcgaagcaacttcagggaatggtctcctctccttcatggacgctttctcaggctacaacgagatcttgatgcacaaggacgatcaagaaaagatatcattcgttaccgaccgcggcacgtattgttacaaggtgatgcccttcaggcttaaaaacgccggggcaacataccagcggttcgtcgataaaatgttagccgaccagaccgggagaaccgtcgaggtgtacatcgacgacatgctcgtaaagtcattgaagcccgaagaccatgtcgagcatctgagcaaatgcttcgacgtcctcaatacttacggaatgaagctaaatccaaccaagtgtaccttcggagtaacatcgggagagtttcttgggtatgtcgtcactaaaagaggaatagaagcaaacccaaaacaaatccgcgctatcctcgaactaccatcaccacggaacgcccgacaagtgcaaaggctcacagggcgaattgccgccctcaatcgattcatctcacgatcaacggacaagtgcctaccgttctacaacctgctcaagcgtcgggcccaattcgattgggataaggatagcgaggaagctttcgaaaagctaaaggactacctttccataccaccgatcctagtaaagcccgaggtcggtgaaactttgtatctctatatcgcagtatcgggtcacgcagtaagtagcgtactagtacgagaagaccgaggcgagcaacggccgatcttctatacgagcaaatcactagtcgaagccgaaacacgatacccggtaatagaaaaagccgcgctggcagttgtcacgtcggcacgaaaactgccaccatacttccaatcacataccatagccgtcctgaccgatcaacctctaagagtcgccctacacagcccaagtcagtcgggacggatgacaaagtgggctgtggagttaagcgaatacgacatcgattttcgaccgcgcccagcaatgaaatcactggtcctggctgacttcctcatcgaactaccgttacaatcagcagaacgtgcggtcagtggaaaccgcggtgaagaatggagtctgtacgtggacggttcatcttcagctcgcggatcggggataggaattcgcctcgtctccccaaccggcgaggtgctagaacagtcctttcgtctccgattcgtcgcaacaaacaacatggccgagtacgaggccctaattgccgggctccgcctcgccgcggggatgcagataaccacgatccacgcattcaccgactcgcaacttatcgttgggcagctcagtggggagtacgaagcaaagaacgagaaaatagacgcctatctcaagatcgtccaactgatgacgaaagatttcgaaaacttcaaactctcaaaaattccccgaggtgacaacgcgccggcagatgcgctcgccgccttagcgtcaacttccgaacccgatttgcgacgaatcatcccggtggaaagtattgataacccaagtatcgattcgaccgacgccgtggaaatcgtaaataccatccgaagctcgaatgcccccgacccagcggatccgaccgattgacgagtagaaattcgcgattacctctccgatggaacattgccaagcgataagtggacagcgcggcgtctacgaatcaaagcggccaagtataccctcatgaaggagcatctccttaaggtcagcgcgtctggagcaatgctgaattgcatccacggaaccgagatcaatgaaataatgaaggaaactcacgagggagcagccggaaaccactccggaggacgagctctcgcacttaagctcaaaaagttaggattttactggccaacaatgatttctgactgcaagaccttcacggccaagtgtgaacagtgtcaaagacacgcgcctaccattcatcaacccacggaactgctacaagccggagtcgcaccgtacccctttatgcgatgggcaatggactctcttcctcctaagaaacgagaaaaatcagtaaatatcatcaacaatattcagttgattgaatagacacacaatatcaatgggagttaacctcnnnnnnnnnnnnnnnnnnnnnnnnnnnnnnnnnnnnnnnnnnnacaaaagaatcaccagctccagtagtatccacagcgtcaacatggaaagtttcaacagatccatggaaatcctacacaagagtcaagagaacatcaatcaaaatcacacaccaagatcatcatgatgatgatgaatccacatgaatgtttgttgtacattaccttagtgtagtaacgacatccattttcgccaagtgtaacaagcaagagcttcaaattaggatgccacagagacatagctgtctcatcatcaatcgttttgtttcctgtcaagaactcaagctagacgtcactgaccttaataatgtcagccttgtcccagatactcatgatctgtttcctagcttcttcaggggatggccacagaggttccctgaggtttggatcgtaggaaagaagagctccagcttctttcgccacctccatcgccttcatgtgagctgatctacatggctctgtaatcaaacttattgatccatagtgaaacactttcgcctgccaaataaagaaaaatatt

SEQ ID NO: 165822 - DNA, 545 bp, Arabidopsis thaliana landsberg
ttcactgcaaacacggaagggcttatcttttcgacaatgtgtaagtactacttacacggatttgatcatggaaggactcgtgacaaggttcccttatttattagcacacctttttgaattcttagtgtcaatgtgacggttggagagaaggagcatcgcgtcatgataactggttggcacactgtagctgacatcttctgtgttagctgtggctctcttgtcggctggaaatacgtacaagactcaaaactcatacattgtaaacaactttctttgtgatgatttgatgctaattctctttttctccctcaggaaatcgcttacgataagtctcagaaatacaaggaaggaaaattcatcttagaaaggttttcatctttcaatgtttaataaaaactccgcaaaatgattcaaacgatgatcaggtttaaagtggatgttgtgtaaccaatgtgaccaggtttaaggtgcttgggccctatggaggaggatacgacatgaaccagaacgagcctatgactggaagcgatgatgaagaataaaaa

SEQ ID NO: 165823 - DNA, 423 bp, Arabidopsis thaliana landsberg
atggtgcctcatatcgacggacagtttctaagagatgttgaagcgatactcactgctcctgatcaggtgaatcttccagttctaaaccctggtttaaatacatgagttgacaaaaccactgttacgtggttcagattcaatcaccaactctcgatcgcgattgcagagatacttcaatgcaactttcaccatgcgtggccgacgtaccgcttgactcccgttgaggtcaaggcacgatggttttttcccctcatgttaagcatcaatctttgatttaaagcacagtcaataaaccataaaccaaattcttactattttctatctttgtagcgaaaatacacgtgggattcaaggcacactctaacggtgtagacgcagtttaatttggtggcaagaacgttgtaccgagacaatatgttatta

SEQ ID NO: 165824 - DNA, 304 bp, Arabidopsis thaliana landsberg
acgttcatatgaagaggctctgatgacgctataactgacgcctgacagagtatgcttctccaatctttgactggttccttccgctgcagcgagcgctagtcaccataagggtttcagagcaagcaagttcgtcactagtgaagctgagctgggcccagggaacgctgtgatattgttccttcctcgtgtgtaaggttgaagtagcacgttatcccgagcctcttgtcatatacctatcgcatcggcatgtacatcctccaatcacctatatgaggagcatgtcatgtatttctctgtacgtgga

SEQ ID NO: 165825 - DNA, 1715 bp, Arabidopsis thaliana landsberg
tatatccaatcgaatagtctggatttcgttacctgttctttcaatcgagtcctttgttggaagaggactcgccattggtgaagcacgattctatttggttacttcaaatccaagtctcgttgttatagtgaggtattgtttcttgtcgttcgcatgagaaggcattgtgatggcgttgatagtttcaatttggtatttgcgatcaaagcttgtgttggtttagggcttttagaaaatgggattctgattcatggcttggctatgaagaatgggttggataaggatgattacgttgctccgtcgttggttgagatgtatgcacaattaggtactatggaaagtgcgcggaaagtgttcgacgaaattcctgtcagaaactcagttctttggggagttctgatgaaaggatatttgaaatactcgaaagacccagaagtgtttcgtttgttttgtctcatgagagatactggtttagccctcgatgcgcttaccttgatatgtttggtaaaggcttgtggaaatgtttttgctggtaaagtagggaagtgtgtgcatggagtatccattagaaggagctttatagatcagagtgattacttacaagcctccattatagatatgtatgtgaaatgtagattgttggacaatgctcgaaaactatttgaaacaagtgttgataggaatgtggtaatgtggactacgctgatttctgggtttgcaaagtgtgagagagctgttccagcccctgatctgttcaggcagatgctacgagaaacgatacttccaaatcaatgtacttggcggccattcttgtttcttgctcgagcttgggatctctaaggcacagtaaaagtgttcatggctacatgataaggtatgggattgaaatggatcctgtaaattttacatcgttcatcgatatgtatgctagatgcggaaatatacagatggctcggacggtttttgatatgatgccagagagaaatgtgatatcttggagctcgatgatcaatgcttttgggataaatggtctgttcgaggaagctctggattgttttcataaaatgaagtcacaaaacgtagttcccaattctgtgacatttgtttcgcttttgtcggcctgtagccattccggaaacgtcaaagaaggatggaagcaatttgaatcgatgacaagagactatggggtagtgccagaggaagaacattacgcgtgtatggtggatttgctaggtcgagctggtgagattggagaagctaagtctttcattgacaacatgcctgtgaaaccaatggccagtgcttggggagctcttctgagtgcttgtagaatccataaagaagtcgacttagcaggagaaattgcagagaagctcttatccatggaacccgagaaatcaagtgtctacgttttgctttctaacatatacgctgatgctgggatgtgggagatggtgaattgtgtgagacggaaaatggggatcaaaggatatagaaaacatgtgggacaatctgttactgaaaccggctagaacattttgctatggatttctgcatcatggctttgacagatgatggaaatatgcatcaccatgactgaaagatgatggaaattactgtgttatagctatttggaaaactttctaatgtaaggattcaactctctgcaatctaccggaatagagaaccaagaatgatgaacatgatagattgga

SEQ ID NO: 165826 - DNA, 488 bp, Arabidopsis thaliana landsberg
atatatatatataaagatatataaagagtgatgaaaggggagaataaaaaattgttggtgagtgtgaatgttcttggaagtgttggccctataaggtttttggccaatgaagacgatgaagtttcaagtgttattaacacaaccttgaaagcctatgctcgtcaagggaggatcccggttctagggttcgaagtggataacctcaatttctattccattaacgccggattcagtagtattttccatccaccactatttagtttgttctcttagaatcacctaaattctagattaatcttgacccgcttataaaaaatcgcattagttgtttaacgttgtgtgtacaaattttggtataaaattctaaatcgaaagtaatttgatatttgtttatcatttttttggtgttagaattgaatacacacaaaaaaagataggatcaatggatgtaacgaattccttgttgtgcatgaaagagccgagcccaa

SEQ ID NO: 165827 - DNA, 403 bp, Arabidopsis thaliana landsberg; identical to SEQ ID NO: 34655

SEQ ID NO: 165828 - DNA, 3487 bp, Arabidopsis thaliana landsberg
atgctgcagccgtcggcttctccggagaagcgggaggaggctccggcgttggatgctggaggtttgcatactacagaggttcaggactgccagaaggatgttagaagtgcttcacaacagttaagtgagaagatctcagagaatttggccaacgatctcaatgaacaaacctcagatcagagggatggattcagtcagcgagaatcttcggagtctcaaagggaggcgggtccaccagtcaaaaaatcatacgttcaagcagctcagaaacatgtgtttactaagcaaaagttcgtggttgaagaagttgatggtcaagggagagttgttgtcccaaaggaggtttttgtaggagctaaaccactgtgggaagattttgtgattggcaagtttctcaatacaaaggctccacatgtgggtaagattcacatgattgtgaataagatatggagattgggagataaaacaagtttaatagatgtgatggcagttaatgagacgacggttaagttccggattcataatgaaactatgcggcgaagaattctgaatagaggcatgtggaacatcatggatatccccatgattgtatccaaatggactccttatgcagaagaagcacaaccagcaatgaagtcaatacaactatgggtcactttatctgatgttccactatctatgttcacagacaaagggcttgaattcttatctagtgcattaggtaagccgattcgcgtgcaccctaaaactgaggcatgtgtaagctttgaggaagcacaaattctggttgaagcggatttaacaaaggagctaccatccgagtatatcctctctggcgaggaggaaggagaactcgatgcaatcgttaaatattcttacccttggctacctccacgttgcagctgctgtgggaaatggggtcatgcgagggagacctgtgttgcggtagaagcacagacctctcaaacttttcaaagtccatctaaagttccagaaaaaacagagcacgtgactgtttctccaagtgatgttgtaatcgcagagggggaaactgtttctgaggtactagctgcagtggagatagataatcagacgcttcccgtctcggatgtagctgagagcaatgataaagataatgagggctggattacaccatcaggtttaaaccgtagtccaggaaataaaaaacaagaattaacgtatggcgaagtatcacttctctctaatgcttactctgttttaagtaacaagggttaagttcggtgaaaagggtcaaaatagcagagcaattgtggtgaatgataagaagagggtttcgacctcatcttatgcttctcttgaggcaacaacgcagactaacaaagatatcgtgtccatcggggggaataagacaggggcgattcttcgtcagtctttacctcgtgggtccaagacagctcacaaggtgatctcagtcccttctacacaatcaactaggctcttgcctaacgataagagtagaagaaaccaaccaaaccatcattaatgtcaagctttttttggaatgtccgcggtctaaataaatcaactaagcattccgtaatcaagaaatgggtggaggagcagagttttcaatttggttgtttcattgagactcgagtaggagagaataaagcacagagtgtatgtgccaagctgtttaaagattggtcggttttgacgaattatgaacataatagacgtgggcgcatttgggttgtttggagagacacggtcaggttaacacctttttataaaagcggtcaactaattacctgttcagtcaagttagaagatcaagaagaggaatttttctgttcatttgtttatgcttcaaacatggtggaggagcgtaaggtcctatggaatgagttaagggatcattctgattcaccaattattaataataggccgtggataatctttggtgattttaacgagattctagacatggaggaacactcaagagtggatgatcatcccgtgatatctgcaggcatgcgagactttcaggcggtggtaaatcattgcgctctctcggacatggcttctcatggtccgctttacacctggtgtaataaaagagaaaatgatctcattttgaaaaaactggatagagtcttgataaacgatctttggtctcagaaatttccacaatcttacaatgtttttgaggcgggaggatgttcagatcatttgaggtgccggataaatatgaatactgcagcaggccctagggttaagggacacaaaccttttaagtttgtgaatgttatcactgagttagaagaattcaagccaatggtcgctgatttttggtctggaacagagccgattttcatgtctacatcctcacttcaccggtcacaaaaaaacttaagattttaaaaccacagatacgcaaccttgcgagagaaaagataaataatctggttaagcaaaccaaagaggcctatgctactctttgtgagaagcaagaagcgaacctgacaaatccatctcctgtggccatggaggaggaatcaactgcatataatcgctgggagagagtggctgctctagaggagagatatttgaagcaaaaatccaagcttcactggttaaaggtaggtgacaaaaataataaaacgttccacagagcagtggcgactaggaaagcaaggaacgccattcgagagattcaaaaagcagatggtagtattacagtgcaagaggaggagattaaggatgaggcagagagattttttcgtgatttcttgcagctaatcccgaatgactatgagggaacaacggttgaggaactccaaaacttactaccatttcggtgttcaactgaagataaagagagacttataaaaccggtcttggcagaggagataaagaagattttatttgctatgccaaatgacaaatcaccgggtcctgatggcttcaccgcagaattttataagtccacttgggacattataggttcggagtttgttttggcggttcaatctttctttgttaaagggtttttaccaaagggtgtcaactctactatattagctctcattcccaagaagttagagactaaagagatgaaggactacatgccaatctcctgttgcaatgtgatttataaggttatctcgaagattattgccaatcgtttgaaactggttttcccccagtttatcgcggggaatcagtcggcgtttgttcatgatcgcctgttgatagaaaatctagctgcttgcaaccgaattagttaaggattatcacaaggactcgatctcgggacgttgcgccataaagatagatatatcgaaggctttcgattcggttcaatggtctttcataaggactgttttgttatcgttggattttccattagattttatccactggatcatgctatgtatctccacatactctttctcagttcaagttaacggtgaacttgctggatatttccagagttctcgcg

SEQ ID NO: 165829 - DNA, 1249 bp, Arabidopsis thaliana landsberg
atttctgtagagttttctgacttggagagcttggagcatttgcattctccaaaggagtttcagatcctaaagctgaagacttagaacttgtggatttagaagctgaagattttgcctaattgcggaaaattaactcactcttatgggaaggttaacaaacccctcagcttagagactatggtctctcatactgtggctctcgaaccgctggaaccttaaaggcaaagcaatacgttcagacttgggtaatggctgctttaagttcatatttaattttgaagacgatcttactaaggttctaggtaacagaccttaccactttgaccagtggataatcatctttcaaagatgggaaccaattatctctccaactttcccatctctcatacccttctggattgaacttcgaggactccctaagcacttatggaagcaagaactgctctacaaatagggaggaactgggagaagttctggaccatgagatctccacaatagttgcaaaaataagagtgcaaatcaatggactagaccctctaaccaaagaaacagtggtggagttctcagatggcaggaggctaaagttacactggactataaaaacctgaaaaagcactgcaaacattgccaaagactctctcacgaagtggatagctgccctggtttaggtcgagagaaagctccctcaagtggaccaaaaccaagccctcctccgaaggcacctatatctactaatcctgctgtcagctcccaagcaagatccaaatctcactcaagagacacttactcagcacaagcaagatatcccaactccaggagagaacaagaccataacaaaagaagatcggaggacagagtgcatagcgacagtcgatactcaaaccctaatcaatctgttcataggactccaagttacagactgtctacttctcgatccctagactactctaggagagaacgttctaattatcatcttaccaaagaaatctgaatgaaacagaacactccacatcctctagagcaaaacgccctcctctagagagaacctctttcgcaggagaatcaactcatccacctgacactatcccaaccattgtagaggtgatggacgagttaagagaaatcacagtgcagtacacaagttgcgctgacccaaccgagagctttgctagcaaacagagggtgatacaggaaaaagctcggggcttaatggcagaaactgctgagtagatcatcggcacatcaggca

SEQ ID NO: 165830 - DNA, 318 bp, Arabidopsis thaliana landsberg
atgattttattatattggcgagaacataattttacagttttaacgggaaaacacaattctccgattttacggtcttggcgggaaaacgcaattttccagccaaaatcgtgattttattatattagcgaaaaacacaattttacagttttgctgagaaaacacaattctccgattttacggttttggcgggaaaacgcaattttccccttaaatcgttattttttgtatcagtgaaaaaataattttatgattttactgttttggcgggaaaaaacaattccataaattttccgccaaaatcgtgattttattatattg

SEQ ID NO: 165831 - DNA, 2905 bp, Arabidopsis thaliana landsberg
atggaaacaaaaaactcggatgatttcatcgccaacaagtttctgtggatgggctactcaaataagttcactgtccctcccactgggatgggaggagaattagccttgctttggaaagaggatctgaatatcacaatcctaagctcctctaaaaatttcattgatgtggaactctcttatagaggggtccggtctttcatcacctttgtttatggttctcctcagagagaaaacagagctgctttctggacccatctctcgactttaggtgcggatagagaactcccgtgtcttttaacgggtgatttcaacgaaatcctagagaacgcgaaaaaggttggtggacccccacgctgggaaggatctttccttaatttccgtagcttcgtctctcaacatggattgtgggatcaaaagcactctgggtgccctctgtcttggcgaggaatgcaccacacacacttcgttcaatcacggttggatcgagccctttctaactacgcctggtctgaagcttaccctgcaggaaggtgtcgttaccttcgtttcgagggctcggatcacaggcatgtcgccatttatttcaatgtgttgaaacacaagtctagaagtcctttcaggtttgacagacgcctcattgagaaacctgaaatcgcagagctcatcaaagacgcttggaacctatgtgaagatgcctctatcattgctaagctcaacttgtgcaggcgacgaatcattgattgcgctaaggaacaacagaggaacagctgtgaaaaaattaaagcgacgcatgaagagttggaacgggaactgtctgaccctaacccaaaccaacctgtgatcactcttctttatgctaccctggatttagcttacaaggaggaagagagtgtctggcgacaacgaagtcgcatccaatggcttcaaggaggagatcgcaattcctcttatttccatgccgtcacaagaggaagaagaaagatgaacgccttcactgtcatcgaagatgagtcggggacagctttcttcgaagaggagcacatggcgaaggtcatctctgaatattttcagaacatttttacctctaaccttagtgaggatttctctttagtggaggatgttctgcaactaaaactcacatctgagatgaatgagttcctaatagcgattccagacgataaggagatcaaggcagctgctttctcaatcagtgctcacaaggcccctgggcccgacggtttctccgctagcttctaccacgcttactggcgcatcattggagctgatctctcaagagatatccggtgattttttgaatctaattctcttcatattcgacagaacgagacgcatatccgcctgatccccaaaggtgttagcccaaggagagttggtgactatagaccgatagctctttgtactacccactacaagattatcgccaagattctcaccaagagactccagcccctgcttcctctacttatatctaagcatcagtccgccttcgttcctcaccgagctatctcggataatgttctcatcacccacgaaacacttcattttcttcgtacttcggaagctaagaagttttgttccatggcggttaaaacggatatgagcaaggcctatgataggatagagtggggttttttaaaagccttcctaacgcggtttggctttcatgaaaattggatagcttggattatgacttgtgtgaaaacggtgtcttactctttccttctcaacggttcacctcaaggaaaagttattccttcaagaggacttcgtcaaggtgaccccctttctccttatctcttcatattatgcactgaagtcctctccgatctttgtactaaggcgcaagtcaacggaagtctaccgggcattcgggtagctagagcgagcccccttgttaatcatctcctcttcgccgatgatactatgttcttttgcaaatcatctcctacttgttgctctgctctcttatcaatctttgctagctatgagaaggtttcgggccaaatgatcaacctctctaagtcgtccatcaccttctcttcaaagacgccacccgagtgtaaattaagagtgaaagagacgttgcatatttccaatgagggcggcattggtaaataccttggtctccccgagcactttggtcggaaaaaagagatatctttgcgtctattgtcgacaaaattcgtcaacgggctcatagttggtccacacgttttctctccaacgccgggaaacaagttcttctaaaagctgtcctctcttcgatgccctcctacgcaatgtcttgtttcaaactcccaagctctctttgtaagcaaatccaatcaatcttcactcgtttttggtgggatgataatccctctaagaagaaaatgtgttgggtggcttgggataagttaactctaccaaagcatgcgggcggcttgggatttagagatgtggaacttttgaatgatgctcttctcgccaaggtgggctggcgcctcattcaagatccaactactctcctagctagagtcttattgggcaagtattgccattcttcctcttttatggaggcctcctgtgctccggctgtggcttctcatgggtggaggagcatccttttgggaagagatatcttaaagaaaggcttagggtggtctgttggtaatggcgcagacatccgtctttggcaggatccttggctctctctctcacatccaaagtgtccctttggaccccccaccctcgctgcttcatctctcttggtcagggatctcctcgaccctgttacaaatgagtggaatgttgatgcagtccgacaacacctacctcagtatgaggatgacatacggctattaattaccagctcacccacttagggattctctggtttggttac

SEQ ID NO: 165832 - DNA, 516 bp, Arabidopsis thaliana landsberg
atgcgagaacatcgtccaatcattgctcttgattttcctagttttgaggcggtcaaggaatttttagctcttttcccagcagaagaaagcctttatctcaaggtagggatggagctttattacgcagcggggcctgagattgtgtcctacttaaaaggtttgggtcatagtgtctttttggatctcaaacttcatgacattcctaatacagtcaagtcagccatgaagatcctatctcagcttggtgtggatatgaccaatgttcatgcggctggtggtgtagagatgatgaagctgcgcgtgaaggtcttggaagtcaagctaaattgatcgctgtaactcagctcacatcaacgtcagaagctcagatgcaggagtttcaaaatatccaaaccagtctgcaagagtctgtgattcactatgccaagaagacagctgaagctggcttggatggtgttgtttgctcggctcaggaagtacaagtcatcctttagagcacactggcggtcgttacta

SEQ ID NO: 165833 - DNA, 1177 bp, Arabidopsis thaliana landsberg
acgctaacttcatggaacagctcctcctccactgcgccaccgccatagactctaacgacgctgcattaactcaccaaatcctctgggtcctcaacaacatcgctccaccagacggtgactccacccaacgtctcacatccgcattcctccgcgcgttgctctcacgcgccgtctccaaaacccctacactatcatccaccattagcttcctacctcaggccgatgaactccatcgtttctcagtcgtggagttagccgctttcgtagacctcactccgtggcaccggttcggatacatagcagccaacgccgcgatcttaaccgccgttgaaggttactcaacggttcacatcgttgacttaagtttgactcattgtatgcaaatccctactcttatagacgccatggcaagccgactcaacaaacctcctccgcttcttaaactcaccgtcgtctcttcctccgaccacttcccaccattcatcaacatctcctacgaagaactcggatctaaactagtcaacttcgccaccacacgaaacattacaatggagttcacaatcgtaccttctacttactccgatggcttctcctccctcttacaacagttacggatttatccttcttcattcaacgaagctctcgtcgttaactgtcacatgatgctccgttacatccctgaagaaaccctaacttcatcatcatcatcgctccgaacagttttcttgaaacaactccgatctttgaatccaagaatcgtaaccctaatcgaagaagacgtagatctcacatcggagaacttggttaaccggttaaaatcggcgtttaactacttctggattccgttcgatacgacggacacgtttatgagtgagcagagacggtggtacgaggcggagataagttggaagatagaaaacgtggtggcgaaggaaggtgcggagagagtggagaggacggagacgaagagacggtggatagagagaatgagagaggctgagttcggtggagttagggttaaagaagatgcggtggcggatgtgaaggcgatgctggaggagcacgctgtcgggtggggaatgaagaaggaagacgacgacgagagtctcgtgctgacgtggaaaggtcatagtgttgtgtttgctaccgtttgggttcccatttaaatcaggttgat

SEQ ID NO: 165834 - DNA, 1209 bp, Arabidopsis thaliana landsberg
agtgtgtttttgaatattttcagatacgttgttttaggacaagcttgttgccacctaggattaatggaggacgcattggttcttcttcaaaccggaaaacgtctcgcaacagtcgagttccgccgtctaagtgtaagcttgtcagatgatagcgtctctctcctcctctctgaatcgtcatcatcatcatcctcatcctcttatgcttttcctccacgcaaagtctccgaatgcgaaaccgtcactaaccttctcgcccacacgaaaaatctcctccggcgtcgctccgccggattcgccgcctttgacgctggacttttcgccgactcgatacgtcacttctccaaaattctcgacggtcgtcgtcgtcccgcgccacaaggattcctcgctgattgctatatgcaccgcgccgccgcttacaaatccgccgggaaaatcgcggaagcgatcgccgattgtaataaaaccttagctcttgagccgtcgtgtatccatgcgttggagactagagccactcttttggaaacggttcggtgtctaccggattcgcttcacgatttagagcatttgaagatactctacaacactatcttacgtgatcggaaacttcccggaccaccgtggaaacgacacaatgtgaaatacagagagataccgggaaagttatgcgaactgacgacgaaatcgaagaaactgaaagcaaaaatggcgaatggagaaatcggaaacgttgattattacggattggtcggagttagacgcggttgcacgagatcggagcttgatcgagcaaatctcttgctctgtctcaggcataaaccggacaaggctttagcattcatggaacgttgcgatttcttcgatcagagtgagattagttccgttaaagatcgagcgaagatgtcttctttgttgctttaccgattgattcagagaggttatacagctttggcggcagcgatagctgaggaggaacagaggaagaagatgatggtgttgactcaaatgtcaacgaaaacggttgaagaacatgaaccggttgaaaaatccggttcaattactttaaccgattttgcagaaattaaaccggggaattcgaacgcgtaccaaggagttttctgccgagatcttgctgctgttgggagtttgttatctaggaccggatttaaccaaccgataccaatgaaatacgatgcgatcagttgt

SEQ ID NO: 165835 - DNA, 1483 bp, Arabidopsis thaliana landsberg
ggcccagtgatatggatgttcttaatgtgttgcatctttggtaacataattataaatcataacaatgactttgttgaagctaagagcctttctaaagttgaagatttagaaatcgagaagagactaaggactatcaacaaacctgctgtcaagatcatcaaggttttaatatatcttcataaccatgttactgttctctatatattatacaattaagtaataaatgttaacttctttatatattggtgtaatgatagagtatagatggagaaagatacggatgtgtggatttcttcaagcaaccagcatttgatcacccttcaatgaagaatcacacataccattacaaggtataattttgatatatcagttctatatacttatattcttttagaaacataaaaataaaaaatatttatggtgttcgacatgttttagatgcgtccaatatggaaaggaatgagagaaagaaagacaaacaataccaattttggttacctatgggagaatggtgtgggttgtcccattggtaccgtccccatgcaaagagtcactaaagaagatctattgagattagactcatttggcgataatcataaacctcgtggctcttggaattataccactgatgattctaatagtaacaaccagaaacatgtacgttgcttcttttaattaaaaatattttgatatatttatactgattactgataataagaattggttattgaatgaaattgaacgctattagtttgcggtggctaggacggttggctcagacaagaggttcaatggagcaacgatggaactttgtttaaccgctcctaaggttaggccaaaccaattcagtgcttctcgacttcacattcagattggaagtgatttcctccaaaccggttttactgtaagttatttgatttaatttgtttgccatctacaacttgcactagataaaagcacctgtcaacgagctctagttacttaatttattttagtaactaacaaaatatgtattatattgtttcatgaacacatattatatgtactaattcaggtaaatccaacattgtacaaggacgaccaacctcggactttcgtctatacaaatgtgagtcacgcatatcatgctagtaaattttttctttaatttttatattttgtatacatgttagtaagaaaatgtatatattgatggaacagtcaggtggaaaatcatgttacaataatgactgcgacgtaggaatgatactcgttcgtcaagattttcatcttggtatggcattattgccagtgtctgttcgtggtgctaagtcaactcattatgcaatcttcggtctaatcaaggtttaaataattaggagtatggcacagcattctcaattctatgcatgctaaatgctgtgtttcttaatagtatgtcaatattcgcaataacggtcgggtaacagaaccagaccacatgggaattggtggttgccttttg

SEQ ID NO: 165836 - DNA, 908 bp, Arabidopsis thaliana landsberg
cagcctcactacttcttggcattctgcttcaatgaacagtgagtatgagttagtgaagattgaggagagtgacaattttgcagttgcagaggcagttctaacgacaccaacccttggtgtcgatcgacaccatcgcatatatacgagacatcaggctgtgacgaagcagaatcgaccaagctcgatattgatctccaaaatcactcgaaacacattgatagtgtcgaccgacacctcttgggtgtcgatcgacaccagtaccaacctgaggaagtgtcgacgtttgatggagcagaatcgaccgagattgacagagcaggatcgataccatatagtagtgtcgaccgatactcacctagtgtcgatcgacactggatgtagattgcagcgctgaattgtcaatatcctaagaaaagtcgagttgtagcacaagtgtcgatcgacaccaccactcgcgtcgatcgacacacatttttggttgaggaagagtcatctccgatagctacttttcaagttggatcactgctattcgtccaagcactactgtcacgtcacacaatgcacctctcatacttcatccacctcctaaacggctaaggtactcatctcctcctcctaaacctctagatatcatcaataagactttaaaatttccaaagactattttacgtttaagcaagccacgagtttctcgttgagcgcttgttctttctgttgatgattatgcaggaaaaaggagtattccacccatacttgagttccaccctgctgatgctcctctcttcctagatagacctcatacactaattgcttctacacaagtatggatgatgagaggtctttctccgcgatatttactgccaccttctgatccacctgatccccaaactccaccaaagtcaagctat

SEQ ID NO: 165837 - DNA, 1290 bp, Arabidopsis thaliana landsberg
ataaaaatttggggtttcgtttgtcgttgtttaggattatgtttcgaactcacgagggatacaacttttcacgtgttcatggaaacaagaggagcagcaagaaccaaaggctttaatctttctctgtcatggctacgccatggaatcaagcatcaccatgagcagttccgtcttttaaaatcatgattatgatataatcgtcaatatatatacattcatgattacattttaattgatattaaaacatattcatcaggcactgcagtgaggttggccaatgcgggtttctcggtctatggaatggactatgaagggcatggtaaatccgggggattaaatggttacgtcaaaaagtttgatgatcttgttcaagacgtctcttctcattactcttcaatttgcggtaagaatgtttttttttttaagaaccaccaaaaaaaaataagttttacctccgactagaccactatttttgaaaatatcgtaaacctaaatcttgtggtcttttgagaatttctcttcttcttcttcttcttcttctttttttttcctccgtttgaaaatgttattaattattaatatattttgccaatcatgaatgtgaagagttggaagagaataaggggaagatgaggtttctaatggaagaatccatgggaggagcagttgtgttactcttggagagaaacaagcccaatttttgggacggtgccgttttagtcgctcccatgtgtaaggtatgtgtatgatcgatcggtctcgtgttcttcaagttttagggtagcccttagtatactatatccttactatataagtgttgacttctaaactttaagattgagatttttaccaaattgagttatttttcatgtaatataatgtctatttcactatttttagtaattagatatgaatcacttgattttttttttattttttttttgagtaaagttagcagaagacataaagccgcatccaatggtgatctcatttctcacaaagctaactcggtttattccaacttggaagatagttcctagcaacgatattattgacgtagcatttaaagaaacccacataagaaaacaggtaacatatttgattatcatcattttagtatagttttcgacgtttaattttctttatctaaaaaagaaatgattttaaaggtaagggacaatgagtattgctacaagggccgccctcgcttgaaaaccgctcaccaacttttaatggttagcttggatcttgagaagaatcttgatcaagcaaatttttttatttttttta

SEQ ID NO: 165838 - DNA, 500 bp, Arabidopsis thaliana landsberg
ttgctttcatactttggctcagtttacgccctcatagacctgggttccatatccaagacttcgtggtacaaggtctagaccagcctaccggagtcgaaaacgcaagaattgctttcaatgtaaccatacttaaccctaaccaacatatgggtgtttactttgattccatggaaggttccatttactacaaagatcaacgggtcggattgatcccattgctaaacccgtttttccagcaaccgactaacacaacaattgtgaccgggacgcttacaggagcttccttaacggtaaacagtaaccgctggaccgagtttagtaatgatcgggctcaaggaaccgtgggtttcaggctcgatatagtttcgactattcggtttaaactccataggtggatcagtaagcatcataggatgcacgctaattgcaacatcgtggttggaagagacgggttgatcttgcccaagtttaaccataaacggtgtcaagtctaaatcact

SEQ ID NO: 165839 - DNA, 453 bp, Arabidopsis thaliana landsberg
  unsure (1)..(453): unsure at all n locations
nnnnnnnnacccatggagaataatggacctatgagcgaactgacccttgaccctcgcactactgccattgttgtaatcgatttacaaaagggcattgcgcagatgcccggcactcctcactccgcacaagaggtgattgcgaactcggtgcgcattctggatgcggcgcgggcggcgggagcgcagccggtgctggtgcaagtgggcttcgccgacgactggcgcgacgccctgcaggtgccggtggacgagcccatgcgcgcggccggcaacatgcccaaggactggaccgagttggtgccagagctaaagcaggcggccagcgatctggtgattttgaaaaagcaatggggcgcattctacggcaccgggcttgacctgcagttgcggcgacgtggattgaagaccatcgtgttatgcgggattgcagcggagttcggcgtataaagcacc

SEQ ID NO: 165840 - DNA, 1210 bp, Arabidopsis thaliana landsberg
acaaaacaaactagagagtctacgtcgtgaaaaccgagaaactcagcttattcattttatgtttgattgcgttggaggcaagaggagtgagcaacagtatggtgcaagggaccttcaagatctaagtctttttactgatcaatatcttaatcagcttaatgccaggaagaagttccttacagaatatggtgagtcttcttcttctgttcctcctctgtttgatgttgcgggtgccaatcctcctgttgttgcagatcaagctgcggtaagcgttcctcctctgtttgctgttgcgggtgccaatcttcctgttgttgcatatcaagctgcggtaactgttcctgctatgtttgctgttgcgggtgccaatcttcctgttgttacagatcaagctgctgtaactgttcctactggatttcataacatgaatgtgaaccagaatcagtatgagccggttcagccctatatccatactgtttttagtgataatgttcaatatcagcatatgaatttgtatcaaaatcaacaagagccggttcactaccaagctcttggtgttgcaggtgccggtcttcctatgaaccagaatcagtatgagccggttcactaccagagtctgtctgtcgcgggtggtggtcttcctatgagtcagaatcagtatgagccggttcagccctatatccctactgtttttagtgataatgttcaatatcagcatatgaatttgtatcaaaatcaacaagagccggttcactaccaagctcttggtgttgcaggtgccggtcttcctatgaaccagaatcagtatgagccggttcagccctatgtccctactggttttagtgatcattttcagtttgagaatatgaatttgaatcaaaatcaacaggagccggttcaataccaagcccctgttgattttaatcatcagattcaacatggaaactatgatatgaatttgaaccagaatatgagtttggatccaaatcagtatccgtttcaaaatgatccattcatgaatatgttgacagaatatccttatgaacaagcgggttatgttggagagcatgcacacatccctttcatggacggaaactactacaactaccaccagccaccaaccgttggtcttacttccaccggtcacatgccttccaccaccaccaccaccaccaccaacaacaacaacaacaacaacaacaacaacaac

SEQ ID NO: 165841 - DNA, 2237 bp, Arabidopsis thaliana landsberg
atccaagcgagtggtgtgactttgcacatattcgtcaatggttttggttcccttcgtgagacgctggatttgttgccggagctgcttgatgtggccgtaacttggcttggcataggtgttgttgagagtggaccagatctgagacgagttagtggctcgtgacaccaaagattgcacggcaggagagatggctccgatcaaagcactgaagatcaacttgtcttgtcgtttcctgagagtaaacgccggattggcagagacaacactgttgatggtggttgtttctggtgggatgacaacagagttatcaagataacctgctagatcataaccatcaagcaaggcatggatctgaatactccacatcaaatagttggtcgatgtgagcttagtgacattcgacgtattgacgttaaagagtgtctgaggggtgagaacgatagcttcgtctctagtggcggggaggccgttgacttgagacatgattgacggctaggttttgaaaagaagaaaaagaaaagaaaagtaggttttaggatatcgaagctctgataccatgtgaatgcttaatgtattgaatattattagagtaggaatgtacatatatatactaaggcacagccctatgattagggattaactaattacaattatgtcctttaagacttcatgtaggttggtgattcatgagagttgtgtctccgtatttgacttaccagagatttctcacccttttcataacaatacaccttcttaagcttatcaccaatggagctccagattacacagacggaacatgtcatatatctggagtcgatgttggcaatatactttatcattgtgatatttgtaagttcaacatggatttggaatgcgcagtaaaaaatactccaccagttgctctttcaaatatgaaggttcattagcaaacactcacactcatgccacgattgatctccttcatatgtgatgcttgtgggacgaaaggtgatcgttctccttatgtgtgtcatcaatgccatttcatgattcaccaaaagtgtgctcaattaccacgtgttattcacgtcaatcaccatgaccaccgtgtttcgttcaagtatcctcttggtcttggagaatggagatgtggagtttgttgggaagagattgattggtcatatggagcttattcttgttccctttgtcctcgttatgctattcattcactatgtgcaacaagaagagacgtatgggataagaaagagcttgatggggtacctgaagaagtagaagatattgagtcattcaagaggaatgatgacaacacaatcactcattttgctcatgaacataacttgagcaaagacaatattactttggaggaaaacaacttgtgtggagcatgtgtttgttccattggttctaacacattctaccattgttcacaatctgaatgcagttttatactccatgaaacgtgtgctaatctccctaagaagaaacgacattttctaagaccgggacctctcgctctatgcttccagcaccaaagctacacaaatatttgtcacggttgtcgtcaagttttttgcaaaggattcttctactctagaaatagtcgaaattttgacttactatgcagttctgtgccagtgccttttttccatggaagtcatcctcatccgttactctaccttaactcacgtttatttggaactatgaagacttgccagtgttgtggcgtcgatgaagataaagccgttgtaggttgtatgaaatgcagttactttttggattttcgttgtgcaactctaccgttaagcgtaacgcttcccaggtacgatgatcatcaactcactctttgttatggtgatgaaaaggcaagcggcaaatattggtgtgatatttgcgaaagagaaacaaatccaaagacttggttctacacttgtaaagattgcggggtcactttgcatgttttctgtgtagttggggatatcaggtacgcccaaccaggaggaaaaatcatcgaccatgctgaatggggtgttagaaatacatcttgcatatttgaattgttatctaacaacagttcttcacggccactttgcattagttgtcattgtcgttgcctaggtcccttcattcttcatgatccatataactatcatggattcataagtcgagatgatagcgacgtcctatatttttgttcttattattgtttcgtcctccttgccagacgacgccgcgggaac

SEQ ID NO: 165842 - DNA, 2297 bp, Arabidopsis thaliana landsberg
aaagcagttgagaggctggtattcaggatcactaagatctataggataaccagatcgagcaaagaagacatgagcatacagacttccattattcttcagtgcctggaacaacaaacatctttaattcaatgcagcaaatatattaatctcgaaggaagcatatgaaaaaaaaccaaacttctattacctcggaaggatagtacgtcattgacaaggtcctagtgctctctggtttccacacagcataaggtatgtttgtctcatgccaaataagcgcaccttcattgccgaagtcattgaatttctcatgctccgaaagataaaaccacatatcctgacaaacaaaaacacaaaacggaaaaaccctaaaccacccagaagttgaaaaactctgattcgaagtttcgaaccaaaaagaaacgtttttttttttgttttggaagaagagagaaacgaatgaaattgcatatattaacgaataagcaagtaatcaacacaattaaccagaagattactatgggctcgcccctctgaaatagattggacatgagatgagtaggcttggaaggatccgcaggtttttgtttgggagaaaagaacttagaagcaaagtaacagaagacggcgattcttatgattccggtaattgtctgcccaaacccaccagcttgtcgttgctgctgcccatctccgccctcaacaaccgctgctgtttcacctgccggcgacgccataatcgcaggaagatgccttcgtcagtgtgattcaagctgagattattgtaactttaccgtgtgagagatgtgtaaaagcagagtcgacgaaagatatatatatttatggaatttgttttttttcttctaattattcgaataagaatagaaatagtaaattttcatgtaaggacctaagtaaattaatatattcttttttagcccttcagttttaattaaatcggaatagtccatatatattcataattttcaattcactcaagacaaaaactgtcgcttgtatgtggaggagatggagactgagagacaccttcattgcttgataaattgaggagcttgataaagatattgctttttcagtttctctatgtctgttacatctcgacaacgcttatatctagagaaactgttcttgcatatcaggtgtttgtgaaaatgtctgacccaatgtaacgtagattttttgctaataaagggccgttgttgggatattcaggggaaagatgggccctttacggcaatttgttcagaatttcagacttttgtctggttttggaactgatcacagggtttttctggatgttgtcaaagcttgtgcttcagtgtctgatctcacatcagggagggctctgcacggttgcgtgttcaagcttggtcatatagcctgctctgaggtttcgaagtcagttcttaacatgtatgcgaaatgcaggagaatggatgattgccagaagatgtttaggcaaatggacagtcttgatcctgttgtttggaatattgttctgactggactttctgtttcttgcggtcgtgaaacgatgaggtttttcaaagcaatgcactttgcagatgaacctaagccgagctctgttacctttgcgattgttcttcctttgtgtgttcgccttggggattcatacaatgggaagagtacgcattcttatattattaaagccggtttagagaaagatacacttgtggggaatgctttggtttccatgtatgccaaatttggttttatttttcccgatgcttatactgcatttgatggtatagctgataaagatgttgtctcttggaatgcgattattgctgggttttctgagaataatatgatggctgatgcatttagatcgttttgtctaatgctgaaggaacctacagagccaaattatgcaacaattgcaaatgttttgcctgtttgcgcttctatggacaagaacattgcatgtcgaagtggtagacagattcacagttatgttgtgcagaggtcttggctgcaaacccatgtttttgtatgtaattcacttgttagtttctatttgagagtcggaaggatagaagaagcagcctcattgtttaccaggatgggttctaaagatctagtttcatggaatgttgtcatagctggttatgcatcaaattgtgagtggtttaaagcatttcagttatttcacaacttggtgcataagggggatgtttctcctgattcagtaactattatcagtatccttcctgtctgtgcgcaattaactgacttggcctctggaaagagatcgacag

SEQ ID NO: 165843 - DNA, 900 bp, Arabidopsis thaliana landsberg
agatcaaatttacgtctgtcacgtctttcactgcgacggtttattgttatgcatcatgaaagacaaccctaggcttgtggtttgtaacccgtatagtggacaaacccggtggatcgagactacaaataatcctcagagattagatgcatattcgtatgctctcggatacaatagcagtaccaaatcccacaaaatcttgagttttgttacttgtttgagaccccattttcatgagttcataatctaccatcttagctctaattcatggagtgttcttgatgtcactcccgactgggagatagtgtttaatcaacgcggcgtatctttgaagggaaatacttacttttacgctcaagaaaaagcaacggtggaaggagaaggaatggaagaggtcgacgtagatacaacgtatcttccagtttttctactctgttttgattttacagcagagagatttggaccgcgtcttcctcttccgtttcactctcatgataactctcatgatgaagagattgtgtctctattctgtgtcaaagaggagcagctcgctgtgttacatcaaaactttgctagatgcttggagatttggattaccaccaagatcgagcctagtgcggtgtcttggagcatgtttttgaaagtggatatgagaccactcactggctttaagtgtcatgttgaagctgggagtttctttgttgacgaggagaagaaagtcgccgtggttttcgatctagacggacgtaaaaagaccgagacttgccgctaccagacagctcacatcattggacaagatggatacttcaaatctgtgaatatccgagaagcacagaatctcgggaaacctgacatatttggatacactccttccatttattgtgtcccacttggatatacata

SEQ ID NO: 165844 - DNA, 941 bp, Arabidopsis thaliana landsberg
ctccaagacattctggttaccaggtttctgctgtcacagttcctccgtatcgatcctctacgtgatgcaggactatcctggaacgatcacctcttgctcagtgtctgtgagctccctctggagccttacacactgcgtattaggcgaattccagacgattccattcttaatactctgtctgcctgtccaattctcgatggcctgacactggagacatgcggattacttgagcgtctagacctgagtaactcaccgaacattaggagaatggatataattcggcaatatcgccgcacaggaccagttgcgattgttgcgccacacatctattatttgagactgacatactctagcacaccatctactatagtggatgtctcctctttgagcgaagctaaccttaccattatcagtagcctactctctcccttgactgctgatggttatcaaaccatggcgctggagatgctatcaaaatttcacaacgttaagaggcttactgttggggaaacccttcttcaggtatactctaaagtctaaaacctgtagaactattatttggttaataatgtttgtttgatggtttagaacgccaacttgctaagtgggtttctagcaaacatgaccttttaatttcatctcgttttgtcagattctatctctcgccgagctccgcggtgttcctttcccaacgctcaaggtccaaactttgactgttaaaacggagttcgttcgatctgtaatccctggtatatcaaggttactacagaattcacctggattaaagaagctaacattacacacattgcagctaagccacgacataatggtatttttacctcttttatttccttgtcgatccccctatatataagaccatgcatactaataaagcaataggaacattccatgaaccacatgtctttcactttcgttgggag

SEQ ID NO: 165845 - DNA, 1630 bp, Arabidopsis thaliana landsberg
tatccaatgattactctcgtttcatctctatccttggagtttgcaaaacgacggaccaattcaagcaattacattcacaaagcattacgagaggtgtagcaccaaacccaacattccaaaagaagctctttgtcttctggtgtagtcgtttaggtggccatgtgagttatgcatacaagctgtttgtgaaaatacctgaaccagacgtggttgtgtggaacaatatgatcaaaggttggtcaaaggtggattgtgatggtgaaggagttagattgtatttgaatatgttgaaggaaggtgtgactccggatagccacacgtttcctttcttgttgaacggtcttcgtgatggaggagctttggcttgtggtaagaagctgcattgccatgttgtgaaatttggattaggttctaatctttatgtgcagaatgctcttgtgaaaatgtactctttatgtggactaatggatatggctcgtggggttttcgacaggagatgcaaagaggatgtgttctcgtggaacttgatgatctctgggtacaacaggatgaaagagtatgaagaaagcattgagctttttgtggagatggagaggaacttggtttctccaacttctgttaccttacttcttgttctctcggcttgttctaaggtgaaagataaggatctctgtaaaagggttcatgagtatgttagtgagtgtaagactgaacccagtttgagattggaaaatgctctggtcaatgcatatgctgcgtgcggggaaatggatatagcggtgaggattttcaggagtatgaaagctagggatgtgatttcttggacatctatcgtgaaagggtatgttgagagagggaatctggagttggcaaggacatattttgatcagatgccagtgagagacagaatttcgtggactattatgattgacggttacctacgagctggttgcttcaatgaatctctggaaatattccgagagatgcaaagtgcaggtatgatacccgatgaattcaccatggttagtgttctcacagcttgtgctcatctgggttccttggagataggtgaatggattaagacatacatagacaaaaacaagatcaagaacgatgttgttgtggggaatgctttgatcgatatgtatttcaaatgtgggtgttctgagaaagcacagaaggttttccatgacatggatcagagagacaaattcacatggacagccatggttgttggtcttgccaacaatggacaaggtcaagaggccattaaagttttctttcaaatgcaagacatgtcaatacaaccagatgacattacttaccttggcgtcctctctgcttgtaaccatagtggtatggtagaccaagcaaggaaattttttgccaagatgagaagcgaccatagaattgagccaagtttagtacattacggatgtatggttgacatgcttggtcgagctgggctagttaaggaagcatatgagatactaaggaaaatgccaatgaatccaaactcgattgtgtggggatctctactttgggcttctagacttcataatgatgaaccaatggctgaattggcggctaagaaaatccttgagttagaacctgataatggggctgttta

SEQ ID NO: 165846 - DNA, 664 bp, Arabidopsis thaliana landsberg
atgggtcaatctcaagtttctctctttcttcttctaattcttgttttcatctatggagtttcctccaccactttcaccatcgttaaccagtgtagctacaccgtctggcctggacttctctccggcgccggaacctctcctttacctacaaccggattctccttaaaccctaccgagacacgtgttatcccgatccccgcagcttggtccggtcgtatttggggtcgtactctctgcacacaagacgcaaccaccggaagattcacttgcatcaccggggactgtggttcttccaccgtagaatgctccggatccggtgctgcaccaccagcaacactcgctgaattcacactagacggatctaacggactcgatttctacgacgtcagtctcgtcgacggttacaacatcccaatgacgatcgtccctaacggcggagctatcggagtcggtaagtgtaacgcaacgggttgcgcggcggatctcaacggcttatgtccggagcagctgaaagtaacggttgaagcggctggaacggctgctgtggcgtgcaagagcgcttgtgaggcgtttggaacgccggagttttgatgtaacggcgcgtttggaacgccggacacgtgtcagccgagtgagtactctgtttcttaagaaaactgtccgc

SEQ ID NO: 165847 - DNA, 1958 bp, Arabidopsis thaliana landsberg
atgtctcagcttctctcccgactctccaatctctctcccaggagcctattcactcgtaagcttcacagtttaccgaacaaaaatgatttttttcctctggaaattaaattacgttatgtacttgaaaaaaagaattgaaatttcagtttctgaactctttggtactaatttggttaggttcgtttgttttcatcatcatccaccaacccctttttgtcacttgcgtgcaacacggaagcgttacgaagtggcggaaacattggagatgttctcttgttcgacgctgctaaggaatatatgctcactgtacctgacaaaatagtacttcaagagatcgttgatgggagaggactgggaacttctcatggataggtagttttctgtgaccctcatgatcgttttgtgtgtatcagtgacgtttttaaccccttggcttctaagacaaacccgaaaatgattcctctgcctcccgcttactgctcttaagtcttgtcaaagccaagtcttttggaatgtggcaatgtcctcttctcctcctgatcaagattggattgttgccatcaagttcttggatagacagcttagtctatgtagtcctcatcgtgacttgcggtggactaatatcttaactcctttggacttttcggaaaactcaaatctgatgttttcaaagagagaccaaaggttctacttagcttgcatgctcctggaggcaaccgtttgttctcatatgatctcaactttaaactagtcaagaatcctcacttccatgagttgcagttccgagaccttccggaatttggttttcttaatcttgatgactttcccggccacgtcatagctggttttggaagctcatcataaacacggttacaaattcaataatatttcttacaacaagtgaacaagagcaataaccatatagctatttgatcaaatctctcgactaaacatgatgaatacaaaatgtggaacaaaatattaatcgaataagcaccaacactgttttgtatggacatcgcttcctacaacctgtgcaagatggtcgagacatatgattattgggcaacacaaatagctttcttccatccttgtagatacacaatgaaccgggcttcatgtataagtccttcccaatcagacatctgatgtgtaaggtgacacaacaatattcatcacacttataaaaccgatctttcgaacttactttttcctcacagacttcacaccaatatgtctcggtacttgtctccttcccataagaaagagtgagaatatgatcatcatgcttatacctcacattttgaggtaaagtagcacatccaaaacacaaagcaaagtcgcatttgatgcaattgaatgtttcatttgtacattcaagtcttgaatctttgcaaacagagcatcctctttgctctcctggtttagatgttaggaataaaggatccatatgactttcatggactaatggctcagaaattgtagcgcactgcacatgaatcttaaaataacatccttctttatcacactcataggagaaaccagctatgcacgaccaaggacaagctgaacacttatcctcgtacttcctaacatcatcatttcctcccattagagagagcaaatgtggatgtattgggttatatgctttgcgagaaagatttgcacattcttcatggagaatataatcacattgcatacatgagaagaagttaccgaaatagatgggcatgatgtatgcttgacatagcttgttctcgtcgtagattctgtctctgttctcatcaagcctcaaatgatgattctgatgactaaaatggtgtattactcctttgcttattgtcacaaacggctcaacttcttcttcttcaatctcttctggcactccctcaagatctatgccatcccacacatttttttgtgtggcacatcttgaatgtgctacatacgaacaaccg

SEQ ID NO: 165848 - DNA, 520 bp, Arabidopsis thaliana landsberg
  unsure (1)..(520): unsure at all n locations
atggggacacaaacaaacaaagggcttttctatgatgaatttctgnnnnnnnnnnnnnnnnnnnnnnnnnnnnnnnnnnnnnnnnnncgggacagtgagaaggatgcagctatctctgctcataagcgtattctggttgcgacttcttcttcttcttcttcttctactttttaagcttgttaccattatctgatttagttagaatgatttccttgtaacatgtatagtctgcaagatcagaagtgtttgaggagatgtttgaatcagataaatacaaagcttcgtccaagctggagacaatcactctctcagagatgaaacacgaagagttggaggctttcgttgacttcacctacagcgacggctctatgctttcagagaaagctaagcaacacgctatgtcactctatagcgcagccaaagattatgaaattccgcgaatatggtgcttatgcagaaaggagcttatggcatctcttaacatgtcgaatgctcttcgagttcttcagctcgtttagag

SEQ ID NO: 165849 - DNA, 3050 bp, Arabidopsis thaliana landsberg
aaaacagaagagctcaaattggaatacaaaagctagtggatgatgatgggaatgagtggcacacggatactcagttaggcaaagttgtggaagcatactttaagaagttgttcacgtcagaggatgtgggatatcaaattgaggaaatgaaagaagtcagcccaatagttaatgcacgcatgaatgcgattctgctggctcccgtttctagagaggaagtgagaaaggcaacattcgatatcaatcctagcaaatgtccaggaccagacggtatgacgggatatctattccagcagttctgggacattatgggaactcaactcacagaaatggtgcaagacttcttctgcaaagggcacatcccgagagagatgaataagactaatatttgtcttataccaaagaagctcaaggcagaaaagttagttgacttccgtcccataagcctctgtaacgtcgtctataagattattggaaaattgttagccaatagactgaaggaagttttacctcagattatttctaaatcccaagctgcttttattaaggggaggcttattagcgataatattctcgtggcacatgaacttcttcatgctttgagctccaataataaatgttcttcagagtttattgctatcaaaacagacatatccaaagcatatgaccgagttgaatggtcatttcttgaagcagctatgttagtcttgggttttgaggcaagatggattaatctcataatggagtgtgtaagatcagtgagctatcaagtgttaatcaatgggacagcacatggtgagattctaccatctaggggattaagacaaggagacccattatcccctcatctgtttgtgatatgtactgagatgctcattaggatgttgcagctagctgaacaaaaaggacagataacgggtctgcgtgtggctagaggagcttctcctatcacccatctcttgtttgctgatgatagcatgttctattgccaagaaaaggatgaggagctaaatcagatcataagaattgtggaggaatacagccttgcctcaggtcagcgagtcaattaccaaaaatcaagcatcacttttggcaaaaatattccagaaaacagaaagtctgaaataaaaaacaaactggggattagtcaagagggtggtcaaggagtgtatctagagcttccagaatctttcaaagggtccaaggtggagacattgacttatattcgtgagaggcttcactcaaagattacgggctggcagaataacttcctttctccaggagggaaggaagtacttctcaaggctgtagccatggcccttcccacatacaccatgacgtgttttaaacttccggttaccatctgttagcaattgtcctcggtaatggctgaattttggtggaaaaataaaagagaatcaaaaggattacattggaaggcttgggagcatttgagcaggccaaaatcaaaaggtggcataggattcaaagacatcgaagcattcaatcttgcgctgcttaggaaacaactgtggcgaatggtgactaggaaagaatctctattggccagagtttacaagagccgatattttagcaaatcagaccctttgaatgctcctcttggttctagaccatcttttgcttggaaaagcattcacgcagcacaagagctcttaaggcaaggaacccgagctataattgacaacggtgcgtccactgagatttggcaacaccaatggatagagtcaaaaccagcaaaggctgtgaatgtagtgaaaagagttctaccatcccatgctaggtccgtttcttctctccaatatgttagagatttattggatgaaagtgggagggagtggagaagggacttactctctgcattattccctgaggatattacaaaacaaatcattcaactacggccagggggtaggcatacattggatagagttgcttgggactactctagggatggacattactctgtgaaatcgggttattgggtcctaatggaggtggtgaatcgtagaacgcagactcaacatgtccttcaacccagcctcaacccgctttatgagcagatttggaaagctaaagtctcacctaaggtacatcactttttatggagatgtttgagtaacattatctctgtagcgggcaatctatatcatcgacaccttgtcagggatggttcgtgtcctcgctgcccatcacaggtcgagtctgtcaaccaccttcttttcaaatgttctttcgccagacttgtatgggctatatccaaaattccagctccaccagagcgtgagtggttagattccttctaccaaaacttgcacaaattattgaacataactcagtgtcatccatggttgggtgatgatggactggtagctccatggatcctgtggagattgtggaagaatcgcaatgaccttgttttcaaagggaaacaatttgatgcacctgatgtaattcggcgggcaatagaggatgaagaggagtggaggctgagtatgcagcggagtttcataccgaagcacatagagaaaactgagccacctgcggtcaaatggaagcaacccccacatggttgggttaagtgcaactcagatggaacttggactgcagaccgaagcaccagtagcattggctgggtgcttagaaactccgaaaagaatgtgctttggataggtgttcgggctattccaagagtccaatccgctttggttgcggaggctgaagccttgcgttggacggtgctgtcactttctcgcttcagttaccgaaaggtaatttttgaatctgattcccaacagttggtatccctccttgttgataatggggacagacctgcactagatctgattatacaagatatcaagcacctgcttcagcattttgaggaaacaaaattcgtgttcacgaatcgtgcaggcaatggagtggtagataggatagcaaaggaatctctttctctcgagaattatgatcctcagttgtattctataatgccaaattgggttaaatcctttgtggagtatgataagatg

SEQ ID NO: 165850 - DNA, 1083 bp, Arabidopsis thaliana landsberg; identical to SEQ ID NO: 9725

SEQ ID NO: 165851 - DNA, 480 bp, Arabidopsis thaliana landsberg
gtcgtccgtctagtactcacctggttcccgagtgctcctcctgccattgttaaccccctcaggtaaaacgttgccttcaaatgccacaatgattttatatcttatccaggtttaaaagttttcgatcaatccatgaaaacaaaatctagatcatagaagtcctattcgtgattgttgaaggtagtctttttacttgatttagaggaaatttattttggataaactctgtctactacttttttgtccaactcttaaatggattaaagattggttaaaccctgattgatctgcccaagaaccctagttgattcctatttatgtgtatatgcgttaccattgtttcagcactttatgtgatccatacttgaacattttccggggattcataccgcctcttggaggattagatttgtctcccattttggcgttccttgttctcaacgccttcaccagctcggctatggcacttccttgcgaact

SEQ ID NO: 165852 - DNA, 649 bp, Arabidopsis thaliana landsberg
gctttcaaattgatcaaaagaatcattgatctctgctttaattgtcacgcatcctaattgggatcacccttttgagaatcatgtgtgatgcttcggattacgctgtgggagcagttctaggacaaaggatcgataagaagttgcatgtcatctactacgctagtagaacgatggatgatacacaagtaaggtatgccactacgtagaaagaactataagttgtggcctttgcattcggaaagtttaggaactataagtgacagtctacactaatcatgctactctaaggcacatctatgcaaagaaagataccaagccgaggttgctaagatggattctgctgctccaagaattcgatatggagatagtggataaaaaggggatcgaaaatggtgtagctgatcacttatcacgaatgaaaattgaagatgcagtccctattgacgataccatccctgaggaacagcttatggtcatccaggaagtgaacaaaaaattcaaaagcagccagttttgggatgagatgcttgtagtagaggagaaacttccgtggtatgctgattatgtcaactatttatcatgtggtgaagagcctccaaatctttcaaggtacgaaagaaagaagttcttcaaagacataaatcgcttt

SEQ ID NO: 165853 - DNA, 1869 bp, Arabidopsis thaliana landsberg
atgattgttaccggagcttgcgacttctcttcatcactctccatcgcctcttcttcctcctcctccaccgtctccgtcacaaccttcaacatttcctctctttcctctaaccccaacatcatcaattccagctcaactctcttccgttccctttccttctcccttatccgccaccgcagcagctactcacgtcgctctctccgccgtctctctatccacacagttcatggaaacaaaactcaattcttctctcactcgtctacacgtactccaccacttttcacagctaattccacggcccaccgaagcgggactttcgtcgaacaccttacaggcattacagaatcggaagaaggaatcagcgaagccaacggtttcggtgatgtagagtctgctaggaacgacataagaaacgtcgcgactcgtagagtagagactgagtttgaagttagagaattggaagagttgcctgaggaatggcgacgctcgaagctagcttggctgtgtaaagaggtgccaacgcataaggccgtgacgcttgtgagactcttgaatgctcagaagaaatgggttcgtcaagaggacgctacttacatctctgttcattgtatgcggattcgtgagaacgaaactggattcagggtaaaaccttcatcaatctttagaagctttatcaatggatttgtgttgaatttgtattgaaatttttgatcttttaggtgtatagatggatgacacaacagaattggtaccggtttgatttcgggttagcgacgaagctagctgaatacttggggaaagaacggaaatttacgaaatgtcgagaggtatttgatgatgttttgaatcaagggcgtgttccaagtgaatctacatttcatattcttgtagttgcgtatctaagtagcttatcagtagaaggttgtctcgaggaagcgtgtagtgtttacaatagaatgattcaacttggaggttacaaaccgcgtcttagtctgcataactctttgtttagagctttggttagtaaacaaggagggattttgaatgatcagcttaagcaagcagagtttatctttcacaatgttgtgacaaccgggcttgaggttcagaaggatatttatagtggattaatctggctgcatagttgtcaagatgaagttgatatagataggataaactctctaagagaagagatgaagaaggcggggtttcaggagagtaaagaagttgtggtatcgttacttagagcttatgcaaaggagggaggtgtggaagaagttgagaggacgtggcttgaattgcttgatttagattacggtataccttctcaggcgtttgtgtacaaaatagaagcttattcgaaagtcggcgattttgcgaaagctatggagatatttagggagatggagaagcatataggtggtgcaactgtgtctggataccataaaatcattgaggttctatgtaaagtccagcaagtggaacttgtggaaactctcatgaaggagtttgaagaaagcgggaagaagccgcttctaccatcattcattgaaatagccaaaatgtacttcgatttgggtttagatgagaaattggagatggcttttgttgagtgcttggagaaatgccaacctagccagactatatataacatatatttggattcattggttaaaataggcaaccttgagaaagcaggggatgtcttcaatgaaatgaaaaacaacgggacaatcaatgtgagtgctagatcctgcaacagccttttgaagggttacctagattctggaaaacaagtgcaggcagagaggatatatgatctgatgagaatgaagaaatacgaaatcgaaccaccgcttatggaaaagc

SEQ ID NO: 165854 - DNA, 1060 bp, Arabidopsis thaliana landsberg
atggagtatgcgtctacttttcaaaggccgattccattccatggtggagatggtgcgagttactgctttccaaatcgattgataagtcctaaaggaatcagcattacatctggggattctaaaatgcattcgtgttttcgattgaggagaaatgtagcacaaagtggtacattgaatttgatgaatgcgtgtttctctggaaggttttgtagtggtcatttgcattctacaaaatcaatacttggcaatggccaccaagccaaaagaatcccttttggatttaggttacgttgtcagggtcatgaatctctgggtaatgccgatagtaataatcatcggatcggggaatcttccgaaagtagtgatgaaactgaagctacagatttgaaagatgcgagagtggaaaacgacactgatagtttggaggaactcaaggagttactacacaaggcaattaaagaattggaagttgctaggctcaatagtaccatgtttgaggaaaaggctcagagaatctcagaaagagccatagcactcaaggatgaagctgctactgcttggcttgacgtaaacaaaacccttgatgtcattcgagatactgtttatgaggaggctcttgctaaagaagctgttcaaacggctactatggccctgtctctggctgaagctaggcttcaggttatagtggaatcacttgaagctggggcagggaatgatattccacatgtgtttgaagagactgaggaaacaatagatgttaatgataaagaagaagctcttttagctgccaaggatgatattaaagaatgccaagttaatttagataattgtgagtcccaactgagtgctttgctgagcaaaaaagacgagctgcaaaaggaagtggacaagttgaatgagttcgctgagacaatacagatcagttcgttgaaagccgaggaggatgttgccaatattatgaaattggctgaacaagctgtagcatttgagcttgaggctactcaacgcgttaatgatgcagagattgctttacagagaggagagaagtctctctccatct

SEQ ID NO: 165855 - DNA, 735 bp, Arabidopsis thaliana landsberg
cgtgcaggtgagcgaggccgacgacgccttgcgccaggcgcgcaaggtggagcgcctgtactactgcgtcgatcccatcggcctgcgccacgagttcagttacggcccgcagcaggccccgctggcggcgcccttccactcgccgctgctggtgggcggcggcttccagaccggcgagctgggcgtgggccacgtgttcgtcgccgcgatgaatgccgaggagtcggtgcgcttctacaccgagcagctgggcctgcgcatctccgactacatccgcgattcccacagcatccccggcctggccatcgacggggtgttcatgcatgcccgcaccggccgccaccattccctcgccaccgcggccattccctcggcgaagaagctcaaccacctgatgatcgaggtgcaggcgctggacgacgtcggcctggccttcgaccgcgtccgcgccgcccaggtgccggtgatcatggagatcggccaccaccccaacgaccgcatgctgtcgttctacatggccacgccctcgggcttcggcatcgagtacggctggggcggcgtggtcatcgacgacgccaactggaccgttcgcaactacagccagctcagcgactggggccaccgcttcgccctgccgccggtgcagtgaaacaccccctcccttcccccgcttcaaaggagttcgacatgagcctgtggcttgattttctcggcgcggaaatccgctgcatcgac

SEQ ID NO: 165856 - DNA, 1165 bp, Arabidopsis thaliana landsberg
tcttttttatatgattataggtttggccaacaaaaagacagtgaccattcaggcggctggcaaggaccaaggtgttgtactcggaaccaccaagactaagagacaaaacaagcctaagctctctgttaacaagtctatcctcaagaaggagttctcgaggatgagtaaagttgttgccaatcaggtactactcatcttcttaagatcaatgtttgtttgctttatctgcggttatacatgttgggttatttggaaaatcttacggataagtgctttagtgaatttgagacttaggattgagaatagtttagttttatgagctgtgatgagaaagctaacacgtaagaagaggtattcctttgtggggtatttcttcaatgaaatacatttgttacgcttggcttctgagctataaacttttaccattgctttgggacagttttctgtttctatttgtgacaaattttatcagtaatgagtaatctaacataaaaaaattctaatgaaatggaacaataggtttgataatagtttttggtccttttgagctgtgatgagaaagctaacacgtaagaaggggtactcctttgtggggtgtttcttcaatgaaatacatttgttacgcttggcttctgagctaaatccttagctatttgtttcaatttaatgatttcgtctattttttctgtctaattttagctgtgatgagaaagctaacacgtaagaagaagtactcctttgtggtgtatttcttcaatgaaatacatttgttacgcttggcttctgagttaataataatatgaattattgtagcatacctagaatttgagattacttttatttagtctgcaattcgtacctatcagtgatgagaaagctaacacgtaagaagaggtactcctttgtggtgtatttcttctatgaaatatatttgttacgcttggcttctgagataaatctttcttctgtgcaccatttcatattgcatctgttttgttttctatcagtaaaagtactaaccgattgattgtcttcaactttccaggtagtggacaactactacaggcctgatttgaagaaagcagcacttgctaggcttagcgctatcagcaaaggtcttagagtagccaagtcgggtcccaagaggagaaacagacaggcttga

SEQ ID NO: 165857 - DNA, 597 bp, Arabidopsis thaliana landsberg; identical to SEQ ID NO: 63791
  unsure (1)..(597): unsure at all n locations

SEQ ID NO: 165858 - DNA, 969 bp, Arabidopsis thaliana landsberg
tgcctgcaggtcgactctagaggatccccccttacgaggcagctactacatggcctttgctactcgtgaaggcgacttactttccatgtggtggcatggccataggattatgcatcactcacaaaatcgcggacgaacctccatctcaactttcattcagtcttgggctgctatggctcgaggagaggctggcgacatagtggctgatcccgtgtttgcggcacgaatttctacccaccagcaaatgagttatttaagtttccggttgacgaaaatgccaacaagataagccaaataacgaagagattcgtgttcagtgcgtctaagttggaagagctcaggaccaaagcagctagtgaagactttgtaggccggcctacgcgggtggaaagtgtcactgcgcttctttggaaagcctttgttgcagctgcatcctcaaatacaaatgcttgtgatatgaaggtattgatccagccctctaacttgcgccccaagataccctcccttttgtcggaaaacctaatcggtaacctcgtgttctccactatgaccttgaacggagaaggcgaggtgcagattgtagaaactgttagggaactacagaaaagggcagatgagttagcccatttgatccaacatgacgaagggtcatcgacgacgataggctcaagaattgttggtcaaatgatggattatcattccaagtttagcctcgagactcatgacatgtactgtgtgtctagctggtgcaagattccattttacaaggcttgctttgggtggggaactccagtttgggtcgccggaaatgttgttccagtttttgacaatgtgacagtgttgatagattccaacgacggtgaaggaatcgaggcatgggttacactgcatcaagataacatgccaattttcgagcaaagcacagaactgcttgcctttgcatccccgaatccaagtgtattgatctaa

SEQ ID NO: 165859 - DNA, 1678 bp, Arabidopsis thaliana landsberg
ctacttcaagctgctacaatagagaatcacctacggattctgatttctccggtactagtcagagcttgagtttttcggggcaagattctgccaagaggaaaacagagattgaagaagattcaagcgacgaatccaggagattgggtaaagatggttttgcaagtgttataaaagttggtggtgaagaagatgatgagaagaagaagaacgtgagactagttagaaaccgtgaaagtgctcacctttcaagacagaggaagaagcattacgtggaggagcttgaagataaagttaagaatatgcattccactatatcggaattgagcagtaagatgtcttatttcgtggctgagaatgtcactttgaggcaacagatgggcacaaggttctcaagtggaccaccgatggttccaattgtttatccatggatgcagtatccggcttatatggttaaaccacaaggttctcaagtggctttgcttcctattcctcggttgaaaccaaaacattctgttgctaaggtgaagaagttcaagaaggttgctagttttagtgtttttggttttctgttttgtatgtttttgtttggtgcattggtgaacattagctatggggagtataagtctaactatgttactgacggggtttatgatcagtctagaggaagagttttggttgttgatagtagtagagtacattgtgggggagattctgatcaaggagtgggaagaaacgtatctgaaacagagaatttggggcctcctcgaaatagtagtgaacctctagttgcatcgctatttgttccgaggaatgaaaagcttgtcaagatcgatggaaatttgattattcattctgttttggcgagcgagaaagccagggattctgaaacaaagaacgaagaagggaaaagtgttctagcaactacaactaaaactttatctcctgcattgcctttacctgactccacaagcccaaggaccagggatgtgtctaagcacctctatagcgaaacggggaaaggcctgtcatcttctggttctgatgatgcttcgaacgaccaactcaaatcaacaatagccaatggtaaaatgcagcaatggtttcgtgaaggtgttgcaggtattcacaagcttccaatgttactgattctctccttgagacttggagagcagccttttagctagaatagtgaactgaaacgtttgcatttgcatataataacacctatttttctttaatgtatccactgatagggccaatgttcagttcggggatgtgcactgaagtgtttcagtttgatgtctcctcaaactcaggagccatcattcctgcttctccacatactcaacagtgtaagaacaccagtgatacacaaaaggggaaaaagaacagaagaatcctcagtggtggtcttccggtatctgactttaatcttaccaaagaagatcataacagctctagcaaagacaagttccgggaaaccaagccaggcccatcaatggtagtgtctgtgcttgttgatcccagagaaggcggtaatggagacatcgatgggatgatgggaggaacaaaaccacagtcccgagttttcatagtcgtgcttgtggacggtgtgaagtatataacatactcttgcgttcttccacgaccagatgtccctcatctcatgaccagttga

SEQ ID NO: 165860 - DNA, 2876 bp, Arabidopsis thaliana landsberg; identical to SEQ ID NO: 7241

SEQ ID NO: 165861 - DNA, 874 bp, Arabidopsis thaliana landsberg
ttgaattaaaggcaaactcggctgcttatgatgctgagatgattattttgtgacattgttattttttgcatgccaactgggtctatcataccggtggaggttgatccaggcatgacagtgctgagcaagcttgtttatgggtcaacgcacgttagtgcatctgattgggctgagcccgaccaatctgagctagacgatccatctcaaggttaaaagagactagtaaactgccctagtataacttctgcggtatatgaatcatttcaaaatgagtgatatgttgctcacttttactaataggaagacccgtgaaggtggtccaggatattgatatgacttcccctagcccagcaaccactctatatccaacaaccggtggcaacattcattgtttcaaagccattactcattgtgcaatctttgacatcttatctcctccatactcttctactcatggcagacactgcaactacttccgaaaatccccaatgctagacttacctggtaaaatatcacaaacttcacgaaataccagtttataacttcttaaaagtgctactatatttcgtaatgtaacagctttcataacaattttggaagaatcatggtttaaaccactaggttgttgattagagaaaaggtctcatactctcatagaacatgctcattatctgtattgctaaacagatttggtttaagactatcatttgttactatggcaatgttgttgatgacatcatatgtgaaaccaggtgagattgaagtgatgaatggagaagtgatctcaaatgtgacatggcttgaagagtatcaacctccagataactttgtgatatggagagttccgtacagaggtccagtgattagaaaatga

SEQ ID NO: 165862 - DNA, 1108 bp, Arabidopsis thaliana landsberg
atggataaagattactcggtacgtacgttttttttcagtatttcaagatccttaatctcttttcttatacaaattgatagatatctatgtataagattcaaatcttcctgcttatgatattaacttcattctccaattctggtttttattaggcaccaaacttcttaggtgaatcctcaggcggtaacgatgataacagctctggtatgatagactatatgttcaatagaaaccttcaacaacaacaaaagcaatcgatgccacaacagcagcaacatcaactctctccttccggatttggagcaacaccttttgataaaatgaacttctctgatgtgatgcagtttgcggacttcggttcgaaacttgcgttgaaccagaccagaaaccaagacgatcaagaaaccgggattgaccccgtttatttcttgaagttccctgtcttgaacgacaagatagaggaccataaccaaacccaacatctcatgccttctcatcagacgtctcaagaaaaaggtgagtgtggaggaaacataggcaatgtgtttctgaagaaaaagaagatcaagacgatgacaccgacaacaactccgtgcaactacgttttattggaggagaagaagaagatagggagaacaagaatgttacgaaaaaggaggtgaagagcaagaggaagagagctagaacgagcaagaccagcgaagaagtggaaagccaacggatgactcatatcgcggtcgaaagaaaccgtaggaagcaaatgaatgagcatcttcgtgtccttagatctctcatgcctggctcctacgttcaaagggtatgatattcataaattatatcttaaagaaagaattttcgtgaatgtttttttatatgtatatgtacaactaattatactgtctacaccaaatattaattgtataaaatagggagaccaagcgtcaatcataggaggagcaatagagtttgtgagagagctcgagcaactcctacaatgtcttgaatcacagaagccccgaagaatcttaggagaaaccggtagggacatgacaacgacaacgacttcttcttcttctcccataactacggtagcgagaccaagcacaac

SEQ ID NO: 165863 - DNA, 2333 bp, Arabidopsis thaliana landsberg
ggagatgattatgggttgatcacccactgtatgacatttagatacctaatggctataaaagatgcatcgatttcattggacgcattgactcgattgttgcatcgacaacaaggtcatatttatccttgctataaacccgcaacatagaaccttgcgagattactcccttgattaaagtacaagagtatttcagtgtttatttattataaccattattggatatccgttgggataagggtttaacattttgaaattcatgttcatacacaaaatgccttagtaacatcgatacgcatcaagccaatgaataattaatagttttccccattattattggttttgggtcagaaaccaaatagttttcatctaaaagctttgaatgtgaaaagtgctccaccacagcacgcagagatgaaccctcaaaggaggataagtatacatgttggatatgaatgataactaagccatcctagaaggatttatataccgctcgttttgaagactatcatattatatagtcagctattccaacataagggggagaatgtatacagctggtgaaaaagataaatagaaatgaattatcaatgatcctcggagtaaagaatgtatattaagagtctaaaagataattcaattacagaatttagcgttgtaattgccagacgcatttgctgacccaaataaagtgatgaagtcacttataccagttgtaaattaaatgctccagaatataatgaatgtcctgtaaggaccaatttcaaactgctattgagtcttaagatcgcatgaagcgtaatagactttggttccaaatataaatatcctcgtaaaagtgaaggagcacaaaattaaaaatgaccaaattgaggaaataaatattttgatgatctcttgaagagagtgaatgatctctaaaagagacataaacatgacaaatgaaacattcaagtacttgacaatgaagagatctagctagctatgtcatgtcaaaatataatggaatcaaaagcaaatcgacgtcgtaatatatttgcatgctatgagcagttgatattatagacaaaaaggaggatcatgaaagaaagtctattgaaaagtgtacacaaagtaatgattagccaaaaatggaaaagaagaaatagacatataattataatctctagtagagatatttggactagtagtctatgcacatgatgtgtaaaaccagtggaaaataaatgagtctttatgtgaaagaatagtgaaattaatgagattttcacaaagataagaaatgtattatgaagagatatattctcttgtggtggatgtaatatttttttttaagtatctaaagtctgacaataaaagacggaacactggatatgacatttatatgaaattcttgaaagatataatctctgaaggattaattatatgagaattatgttctctagaactctactcgatcgaataaaaagaaatatgtaacatgacatataatcatataaatgtatatttatgttgagtttgtcaaaatatattgatcaaactaatatttgttttgaaaatcattaaaactcctacagaattatcataagtaatacgatgacaataatctatgataaaatatcactagataatgatatttataagtctatatgaaaaccatataattttgatcattaagattatggttattaattccaacgagatattgtatttgattgaaaatcatctcctgaagaagatgtttccgagggggagattgaatgatatgcgtggatgtaccctttttccttatcatagtttttatcccacatgatttttctatgacaaggtttttaacgagacattaaagaacacgcaaataatacacttgatgaatattaagaaattctatcaatcatccaaatgaatattatacactaatgatatttagagaaataaataagatggtcaagatgaatcatctaaaagattcatgagcagaagaatggcgttgtactttatccagaaatttgttcaagagaaaattaggcaaacttattctcaaatactgtttattctttgccacatcttctaatcatgcagagattttaccaattcatgaagctagtcgcgagtgtgtatggctaagatccatagtttaccatatacaagaagattgtggtatgtatgcagggaaaaagactccaacaattatgtacgaagacaatgcagcatgcatcgcacaactcaaagacggatacatcaaaggcgatagaacaaagcacatcctaccaaaattcttcttcacacacgatctacaaaaaagcggcgatgtacgagttctacagatcttttaa

SEQ ID NO: 165864 - DNA, 1330 bp, Arabidopsis thaliana landsberg
tggtgtgggttgtcccattggtacagtccctatgcaaagagtcaccaaagacgatcttttaagattagactcatttggtgataatcataaaccctgtggttcctggaacactaccacttatgatcctaataatgttgttcattacaaccaacatcgtgtaagtcacttctttttattaataaaacaagattatcaattcacattttgatatatattgataatattcctgggcattcaattcacagtttgcggtagctcgaacgaagaacataggaaggaggttcaatggagcaacgatggaactttgtataaccgctcctaaggttaagccaacccaattcagtgcttcaagacttcacattcagatgggaagggatttcctccaagccggtttgactgtaagtcgcttagtttatttattttgcattgagctacgacttctgtttacttaataactttaaaaaacatgtgttaattatactttttaataaattaatgatttcaaataaaacaaatattgtttactattcaggtaaatccagtattgtacaaggacaagcaacctcgaacttttgtctatacagatgtgagtcagtcacattattctagtcaattctttttctaatattttttttgaatatatatatatacaagaattaacatggatggaacagtcaaatggaaactcatgttacaataccaactgcaacgttggaatagtacttattcgtcatgacattgcacttggtatgtcattggtgccggtgtctactcgtggtgattggccaaaatactatacaaagatcggtctagacaaggttttctcttatcaaatactatttcctgacaaattatatcctatttattattaaaaaaaaaatcgggtttgagtgcgactaaccattcaaaagttcgacaaacataaaagtaatgtcttaattcacctattattttctggtaataggagagaaaaaatggaaattggtggttgcaaatgggtggtaattatgagccagtaaatattggattttggccggggcataggcttcaacaaagctatggaaattatgtcgagtggggtggagaagtgtacagggcatcactgccgagtcctcaaatgggatatggatattttccaattcaggataaaaattatgatgcatatatccaacacatatccatacgcgaccgttattataacatagaccgcaatgtggactatctcgaagactattcagacgataatcgaggctatcaagtgatagacacccgagatcctatacatagggccggtcatataatcttttatggtggtccaggaaatatctaa

SEQ ID NO: 165865 - DNA, 1745 bp, Arabidopsis thaliana landsberg
atggctgatgagattgtgccgccggcgactcaattagccgccgtatccttagaaaacgatggatctacggtgcaaagagctcaattctctaaccgggttttgattcgaacgattttggatcgacctgacggcggagctggactcgccggtcaaacggttcgaatcggtggttgggtaaaatccggaagagatcaagggaaaagaacgttttctttccttgcggttaacgatggatcttgtccagcgaatcttcaggttatggtggatccgtctctctatgatgtctctaacttggttgctacgggaacttgtgtgactgttgatggagttttgaaggttccaccgaaaggtaaaggtacgcagcagcagattgagcttaacgttgtgaaggtgattgatgttggaacggtggatgcgtctaagtatccacttcctaagactaagttgactcttgagactttgagagatgtgcttcatcttcgttctagaactaactcggtattacttcttatctctttcactgagttgtgttttgattgttcctaggtttgattgaatcaaagaatagttgatttatggtgatatttgcctgtgatttcacatctcagctgttgcaagaattcgtaatgctcttgcttttgcgactcacagtttctttcaagagcatagtttcctttacattcacactcctatcatcacgacaagtgattgtgaaggtgctggtgaaatgttccaagcaacaactttgatcaattacactgagaggttggagcaggatctcattgataaccctccgcctactgaggctgaagttgaagctgcgaggctcattgtcattgagagaggtaatgttgtagcggaactgaaagctgccaaagcaagcaaggaagcgatcactgctgctgttgctgaacttaaaatagcaaaggagacttttgctcatattgatgagaggtcgaggcttatacctggactacctaagaaagatggaaacattgattattccaaggatttctttggtcgtcaagctttcttgacagtttccggtcaattacaagtggagacctatgcttgtgctcttagcaatgtgtatacatttggcccgactttccgggcagagaactctcacacttcaaggcatcttgctgaattctggatggttgagcctgagattgcttttgcagatctagaggtaataaacatacgatattctttggttttcttctttatcgttaatgtagactcagtatcttaaaaaccttcttttaaatttgtgcaggacgacatgaactgtgcagaggcgtatgtgaaatacatgtgcaactggttgcttgagaaatgttacgctgacatggaacttatggctaagaatttcgactcaggatgcattgacaggctaaaattggttgcctctactccgtttgggcgtataacatacactaaagcaatagagctacttgaggaagctgtggctaaaggaaaggaatttgataacaatgtggagtggggaatcgacttagcctcggagcatgaaaggtttgtgataacccttaagaaccattcctcagctttaaacagttttaagaaatggttgctaatgaaacatgtcttgcaattacagatacttgacagaggttctgtttcaaaagccacttattgtctataactacccgaaaggaatcaaagcttttacatgagacttaacgatgatgagaagacagttgctgccatggatgtcctcgttc

SEQ ID NO: 165866 - DNA, 543 bp, Arabidopsis thaliana landsberg
atggacggcgacgcgcacgaccttcgatggcgacaggcgtcaccggtagcgtccggtgtcgccatggacccccgcatcgcccggacccagaaggcggtgctcgacgccgccaccgagctgctcgtcgagggtgggccggccgccctcacgatggatgccgtcgtcgcccgctcgggcgtggccaagtcgaccctctaccgccactgggagacccgcgacgccctcgtcgccgcggtcttcgactcgtgcgcccccgccatggaggtgcccgccgacgccgccacctgcgaggagggcctgcgggcgctcgtacgttccctggcccgctcgctgtccgaggagcactgggaccagctcgcaccggcgctcatcctcctgtcgcgccagcaccccgagctcaaggacctcgactcggagatgaagcaggcccagcacgaggccaccgaggccgtgctgcggctgggcatcgaggagggcgtgctcgacccggcggtcctcgacgacgtgtcccgcaccgtcgccctcgtcatcggggccgtgatc

SEQ ID NO: 165867 - DNA, 1515 bp, Arabidopsis thaliana landsberg; identical to SEQ ID NO: 24669

SEQ ID NO: 165868 - DNA, 1901 bp, Arabidopsis thaliana landsberg
ctaaaagtgctaccgatgatgtctgcgttaaacatggaaggtgtggtcttgcttttgtatgtattggttccatggaactgttattattatgtttctcactttgatgaaactacaggacattgacaaaggaagtgaagttgggaaaatgtttggaatctattaaagctaatgcctttgctatttcaaagtatcctgttattattactcttgaagaccatctcacgccaaaacttcagtttaaagttgctaaggttttctttcttttcacctctatagtcttgagaccttaaagtagttcatggttccgtctatgtatatatgaataccgtaaagtgtttgctctgcagatgataactcagacatttggagatatgttgtattaccatgattctcaaggttgtcaagaatttccttcaccggaagagttgaaggaaaagattctaatttcaacaaaacctccaaaagagtacttagaagctaacgatactaaggagaaagataatggagaaaaaggtaaggattcggatgaggatgtatggggcaaagagccagaagaccttatttctacgcaatctgatcttgacaaggtttgttctagctttgcaactgtatatcaaaataacaattgaagcaaaaacttgtagcatcataccacttttgattgctttcaggtgacaagcagtgtaaatgatctcaatcaagatgatgaagaaagggggtcttgtgagtctgatacgtcatgccaattacaagcaccagaatacaagcgtcttatcgctatccatgccgggaagccaaaaggcggtttacggatggctttaaaggttgatccaaataaaatcaggcgacttagtctgagtgagcaattacttgagaaagctgtagcatcatatggtgcagatgttatcaggtatataaatatcacatgctaaataggcactgtatagctagtgtttgcttcttgtatttcaagttaatttattaaaacccttatacgtgagcagattcactcagaagaattttctgaggatatatcccaaaggcacaaggtttaactcttcaaactataaacctcagatcggttggatgagcggagctcaaatgattgcattcaacatgcaggtttgtctcaaatcctcatttcgtgtatcgtcatccaggttttactatgatcatgaaactaaataatgattgaaaacgtaaatgtaggggtatggcagagcattgtggctgatggaaggaatgtttcgagcaaatggagggtgcggttatgtcaagaagccagattttcttatggatgcaagtcctaatggacaagatttttaccccaaagataattcgtctccaaagaaaactttaaaggttaggctttagatttaaacacccgttggttccttcatctatgcctcccacgcttctcggttcttaacatctaacaatggcaggtgaaagtctgtatgggagatggatggctcctagacttcaaaaaaactcactttgattcttattctcctccagatttcttcgttagagtatgtgaacgacaatcttgatttttcctttatcccttatcttgattgaaatggaattataactggtcaatacaggtgggtattgctggagcacctgttgatgaggtgatggagaaaacaaaaatagagtatgatacatggacacctatttggaataaggagttcacattccctttagcagttcctgaacttgctctgctccgtgttgaagttcatgagcacgacgtgaatgaaaaagatgattttggaggtcaaacttgtttaccagtttcagagataagacaaggcatacgcgctgttccactctttaatcgcaagggagtgaaatacagctccacacggcttcttatgcgcttcgagtttgtctga

SEQ ID NO: 165869 - DNA, 2454 bp, Arabidopsis thaliana landsberg
gatcactgttctgtagaaacttttgcatgaatgtgattgggctatcatgatctgactcttaagaatttcatgtaaataagtagaaagtttaagtttcattggtgtaaaagaagtaagacttatattttgacccgttgtatcaaagcagaacacagaggcgatgacgaacggagatgagaagaaaggttggaaacatgtaacacttaagcacagtaacaatgaagcagcactcgtctctgagatcgagaatctactaagagaagaagagagaaagagacagagcaatcaaccggtcattgtgagcgcagagattgatcagaaacataaagaagatacaaatgcctttaagctcaagaaacagttctctgagatcaaatctggtcctttatcgttacctcccgatgcagcgaaaaaacagatgaaacttcggacaaatactcttgccttaggaagaaagactttaggaatggaaggtattccaagacttaaacagcttaagtctattcagttgcattttgacggacacaaagatgatagtagtcacaaaaaggcgagtggagtggttaacaaggtaggtttaataactccgcaagattctaaaacagagacgcttgaagatgagcttaaggaagcagcggttcttgaagcagctatttactctgtggttgctgagcatagtagctccatgagcaaggttcatgctccagctcgtcgtcttgctaggttttatcttcatgcttgtaaaggaaatggcttagatcattctaagcgggccagtgcggctagagcggcggtttctggattgatattggtttccaaagcatgtggaaatgatgttccaaggttaaccttttggctatcaaattccattgtgcttagagcaattttaagccgcggtatggagaaaatgaagattgtcccagaaaaggccggttcagatgaatgggaagatcctcgagcattcctcgcggctttggagaagttcgagtcctggatattctcccgagttgttaagtcagtttggtggcaggtaatcaaaagaacaattttccatgtggatttgtaaaggtgttttcatctaaaccattaatgtgaaattaatcttgttgcagagtatgacgccgcatatgcaatctccagcggttaaaggatctatcgcgaggaaagtttcgggaaaaaggcggttaggtcaccggaaccagggactctatgctatagagctatggaaaaatgcctttagagctgcctgtgaaagactttgtccactaagaggttcaagacaagaatgtggttgtctacctatgcttgcaaaactggtaagagattagcatttagttacttaaaacacttagcagagccagaatcaagaatgttgaactacattgttatagctgcttcattttcttctgtattcaggtaatggaacagttaatcagtagacttgatgtagcaatgttcaacgcgatactccgtgagtcagcgggtgaaatgccgacagatcctgtctctgatccgatcagtgacataaatgttcttcccattccagcaggaaaagcaagttttggggccggcgcacaactaaaaaatgcggtacttaagctcacatgaacagagagtttgttctcaatcacaaaaacattccttttggtatgtaaaatatgtaattaagtgccattgcagattggaacttggtcaagatggcttgaggatcaatttgagcaaaaggaggacaaatctggtagaaacaaagacgaagataacaatgacaaggagaagccagagtgtgaacatttcagattgttccatttactcaactcgttaggtgatcttatgatgcttccattcaaaatgcttgcagacaaatccacaagaaaagaggtaatttagacttgaacactcattcttcttgttccaacactaggctaattctatttcctctctatataggtttgtccaacccttggtccaccaataataaagagagttcttcgaaactttgtcccagatgagtttaacccacacagaatcccaagaaggctattcgatgttctgaactccgaggttagaaaaaactgtcttcatagtactaataatcagtatgtgtgtgtgtgtgtgttcttgaaccttttgtcttcaacacagggattaacggaggaagacaatggatgcatcacagtcttcccttccgctgcatcgcctacggtctacctaatgccgtctacagattccataaaacgcttcataggagagttgaacaatccgtccatatctgaaaccggatcatcggtatttaagaaacaatataccagcgacgatgagcttgatgacttagatacgtccattacctctatattgtctgctccggaaacaaccaattcatcagagtggatgccgaaaggatatggacgcagaaagactgtaagatatcaactccttagagaaatatggaaagaa

SEQ ID NO: 165870 - DNA, 2420 bp, Arabidopsis thaliana landsberg
gtcgtttcttgagcttggcagggagattgactctgacgaaagcagtgctggcgtcattaccggttcatacgatgactactattgccttacctaagtccaccttagctaagttggatcagttgtcaagatccttcttatggggagcactctagagaagagaaagttacaccttatagcgtgggatcgggtttgcttacccaaagcggaggggggactgggaattcgctctgctcgaccaatgaatttagcgctgctttcgaaagtgggctggagactaatgaaggataggactagcctttgggctcgggttctacgcagcaaatacagaattgggggcttgcgggatactacttggatgaatactaagcgaaatgcctcttccacatggcggagtatcaaatctgggctgcgtgaggtggtgatcccaggtatgaattgggttgttggtgatggtaaagacatttgtttatgggatgataagtggttggtggaggacccgatacgtgatctagcagtcgtggagcttccagcggactttcaggggattaaaataagagagctttggcacgagggttccggctgggaccttgcgaaaataacactttatgtctccgagggtgtgcgtttacgcttgctgtcaatggtggtggatacggttacaggttctaatgatagaacaagttggggagcaaccgcaaatggtcagttcacagtgaaatcagcttattcgttcttgttacaaagtgggactcaagcacagaatatgaggcagttttttgatcgggtatggcgagtaactacaacagaacgggtgcgagtgttcatttggttagtcgtccatcaagttattatgacggatgtggaacgaagaaggcgacatttatcagcgtcgggcgtttgtcaggtttgtaagggtggggatgagacgattcttcatgtgctccgagattgtcctttaatagccggaatctggggtcgccttgttcctcggggtaagatcacagctttctttgccagcaacatcttggactgggtttatcaaaatccgagtgatgttacggagatacgaggctgtccttgggccacgttgtttgcgatagtggtttggtgggcctggaaatggcgatgtgggaacgtgtttggagagaatggccgttgtcgagatcgtctgcgttttgttgtggatcaggctagagaaatttggatggctcatcaaatttacggagaggagctatgcgggggagtggggtggcaatttattgtcagcaaaggttaagctacaaggtgtctttatcaaatgtcagtacttatgttagctaattaaaagcttaactttgatgaatctgttaaaaagaaacattttaccacgtagagagtaaacaatgaagtcaaaattgttgttcgaggaaaaactctcttgtcatgggttagaagaaatgctactcctttccgaacttaatgccaaagaaggtggatttcttgtgaacaatgaagtcaagattattgcagaggtagatgttcttcaggttattggcaaattagatgtttctgaggaatctcaacctctaaaaggataaggctaaatgatgatggtgaaagctttgatgtcaatgtgtttcatgttcttccttcccaggtaaataaagatgcaacctttttagagatttaagcattataatttataagactttatcatttgtttctgacatgtatatgtgtgggattttaagtttgttcatccttttgtatttgcaggtgaaatttgtaagccgtgtttttgaaacatacccagaaattgcatccatattgcaagcaaagaagcaccatttgagcccagcatgcatgtatgtcctcgtaagtcttattgagacactgtgcaagtcactggaagagctctccaatgatgatcttgtgggaggagacaatgcgttccaatacctgaagttttctggctttaaggttgattggttggagaagaagctggaggaagttaaggaaaagaagaaggaagaacagattggtgaaactcgtatgcaagaaatgatagtttttaaccagaagtgctcagatatagaagctcttatgaagacaaagaagtcaaagttgttggtcaccacaggttctcctctaacgttgtataatgttctttgaagacttacgttctcaacaacgtttgttctggtactgtgcgtttgctgtctaggtttcaaaataagagacttccccatgaaataagaagttcccattgtaaagacctttaacgcaagttttttggttatagatgttagcaaaaatctgtctttaacgctagttttcaattgttataagaagctgaggattatttaaaaaaaacactaatttagttttcgtgattctgtctcccccttagtttcagtgcgtgtgataattaaaaacgctgc

SEQ ID NO: 165871 - DNA, 409 bp, Arabidopsis thaliana landsberg
catcaaagagaatccagagagccaaaaagtaagaaatattgatgatttgactgtggtatgtactaatagcgcgatatcaaacctaacaaaagtgaaaggaactgtagagaacattttgaatgaaagaaagtataagaataagttgagtcatacgttcttacgggagtgcctcaagctttattctgagggctatgagttgttaaactcagctttgaaatacctcaaaacactggattacgagaaatttataggaaatatggatatggcaaaaggtaaaccaagagcttgcgaaatgaaattcaatgatgacaatcaccagatatctccagtgaagaaagagaacgatgttctcttcgacatgatcaacattccgtattatttttgtttcaatgctcatattaacggctag

SEQ ID NO: 165872 - DNA, 931 bp, Arabidopsis thaliana landsberg; identical to SEQ ID NO: 15136
  unsure (1)..(931): unsure at all n locations

SEQ ID NO: 165873 - DNA, 4660 bp, Arabidopsis thaliana landsberg
  unsure (1)..(4660): unsure at all n locations
caaccgatacctggggattctactctccccggtcctcccagccgtaacaacttcggatccgccgatctcagtccctccggtctcttcgcctttgcctctggctcctccgtctctgtcgtcgattctcgttctctccagctcgtttccactatccctctccctcctcctcccggtgctctctctcccttcgtcacttccgtccgttggattcctctccctctcccccgcgatctactctccaccgaaccctccgcctctcaccttctcctcgccgttgcagatcgccacggccgtgtcgctctcgttgacttccatcttcgctccgtcgtcgtctggcttaatccttcctccgatcccaagctcggaattcaagacctttgttgggttcaagctcgccacgattctcatgtcctcgctgcgatttctggatcttcgtttctctcgctctacacgacctccggtggacttttctggaagtacgatgccggcacggagattctctcctgtctccgccgcgatccctatgattctcgccatttctgtgtgcttggccttaaaggattcctattgtcggttaaggtacttggagatagtgagaacgatgttgtgattcaggagatgcagataaagacagatttcagtgagctactgaggttggaaagagaggcagctagtaatggcaattcatcatcgtcttcgcctgcttcagccgcatttccgttatactttgctagatttgccttctcgccacattggaagaatatactctttgtgacgtttcctagggagctattggtgtttgatctgcaatatgagacgcccctctcgactacgccattacctcgtggttgcgccaagtttcttgatgtcttgcctgatccaaacaaggagttgctttattgtggtcatgtcgatggcaggctcagcatttggcgtcggaaagagtaagatatctatgtcctttaagggtggcttcattttagcttttgatggttcagggttttgtgtttccagtcactatacagattgagttgcttgttaaccaggagatggttgaagcaatcaccgtttacatgttagaagtatcatcttttaaagaatctacactgggaaaatatggatagaatattttaggtatcagattttagggtaatcatgctaatagccttgtgcttcaaccagtctagtctacctatctggtcatatttgaactatctggtgtctcgcttcgtttaatatagtgtctgagattgatggtataaaagcgtcatatgaatatgactttgtatcttgttatgttgaacagacttggatacccctgttctggatgcatatctaaactatagctcgttacatatcattgcagaggagaacaggtgcatgtcatgtgtaccatggaagagtttatgccatctattggaatgtccatcccgtctccttccgctctggctgttctactcagtcattcagactccacaatgcaaaccattacaaaaattcacccggatggaacctcttctatagattttgataacccatttgacttttatgacgaaagtcttcttgtttctaagacaacttttatctccctatctgatgatggcaaaatatggaagtgggtcttaagtgctgaaagtgttgaagatgctcnnnnnnnnnnnnnnnnnnnnnnnnngggtattggagccactgaagcagcacttcctggagctattcaggaaaatgattcctcaagtctggatgatgaattagttgttgcacctacaaatcgaagcagaggtcacacatcaggtttctccatggaaaaatcagatctatcatttaaggttggtggctggaaggtttttgggttaactagttccttaatcactatatgactattccgccagagggtagaagtttggcgttaccaggttcctcatcattagggttgtgttttccacagtatgtgtttattggtcttttcattatttttctacttaacagggcttatacttgtttacttcgctcaatgcagatcagccttactggacagcttcagcttctctcttccacagtctctacacttgctgtaccatctccgtctcttacagcaaccctagcaagtttgttttgttctcccttgtatttgtaatactaaaagtgttcataagaaactcaaatgattgatttatggattgattttaaatgaaggagggggtaacattcctgctgcagctgttccgttggttgctttgggaactcagagtgggacaatcgatgttgttgatgtatcaacgaatgctgttgctgcaagcacttcggttcatactggtgttgttagaggccttcggtggcttggaaattcaagattagtttcattttcttacagtcaggtgtgcaaatatattttaataatccaacatgttacgtcgcatcgctttcttctattttttcgtagtgatttccaatctacagttggtttaagaatagtattaggtttagtttaatttccagtgtttttttataaaaaataatagaattaggaaagtgacatccggcatcatgcactggtttgtggtttcaggtgaatgacaaaagcagaggctacataaataggcttgttgttacctgccttagaagtgggttgaataaaccatttcgtgatttacaaaagccagagcgcactcccataagagctcttagaacttcttcttccggaaggtttgattttaatgtttttttacctgcttgagtatttgatgcctataaataatgtaactaaatgcttgtgctcttcaagctatcagcttctcactaataatttaagcttaagaacatcgtctttcagtattgaaaatatgttcctttataagatgacaaatgtcaattcagatcatcgaggatactccttcactatttcaaagatgaggaactattgtaaaattggaagttattactttggacccgagcttctagatacctcttctgatgctgagaattcgttttttctgtcctgttgcaggtatcttctaattcttttccgtgatgctcctgtagaagtttgggcaatgaccaagcatccagtcatggtgagtgagctcaaaccccaaaatatttactttttctacttaagttagtctcagtgagtggatgacaataactttttctctcttatgtttgcaagcttagaatttgcaattttacattctgacttttttctttagatgtcccattctatatatcttactctctcattcctgtaatactttcttcgtatggccatttactttcacgtaataatgccttgcccaccttacactttttgcatgtgaaattgagtaattggcaccaaataatcactggctcatgttaggtcttgaacatcataatgcctaataagaacgattatgcataaaattgataaagcttgtccctttaaattttttgaggagatttacttataacaacattctctatgtggcttcttttcttggctccccccttttgcaagtgctaacaagcctttcttgccatgccaatatctattcttgtgaacttttaagaagaaagtaatgatggtatggagaatgggtcaaatgagaactaaaagcgttctttatataaatatactcttgcatcttgtttaaatatgtcgtatctaacttgtggagtgtttagtatctttttgaggttatgtattctaatcaattatattatgtttcttatttctcttaatcgtgtagcttagatcattagctcttcctttcacggtagtggaatggacgcttccagctgttccgcgcccaggtcaaggcggtccgtccaaacaatcgctctcagcatccgaaggagtaactgcttcaggagactcttgtgagatgtttatgacaattcaaactgtgttatcctgaatatacccaagtctttgattcatttttttctaaggggcggtaattgacatatttgcagcatcagtgggctcagatggatcgcaagaagaaactgtagagagttttgcatttgcactagtaaatggtgctcttggagtatttgaagtccaaggacgtcgaattcgagatttcaggtaaaactaatcagagttccgttaactcaattttttttcagaattcttctttccgtagtaatccattatagctgcgtttttatttttgtcacaatgctgatcatagttaagggcttctgaatatctctctgattctgagaaaataatatgaaatagtgattgcacattattgcttacctgctgtagagttccttttcacttattccatgcttgtttttcaatctgtttctttgccatctgtcattaaattcttcttaaaaaattgcgagatagggagtagatctttattgtccaatttcagaaagtgcagaaaattcactacctgatagttgttagtagccgcctttacataaattagcactcactttcttgaaccttgattgctgtgtaatcttcttcctatattcactgacgtatagatgatcccgcctctatttctagacctaaatggccatctacttcatttcttccctcagatggattggttacagccatggcatatcgcttgcctcatgtggttcgtttctttttaccttccaattctgtctcttattttatgagagatcatattttgctctctcttttcaagttatg

SEQ ID NO: 165874 - DNA, 1361 bp, Arabidopsis thaliana landsberg
  unsure (1)..(1361): unsure at all n locations
ccattttcttaccctttctttgaaaagtctgatcattgtttagattcataccaattggtctgagtagcagtagctgatgatgatgtacattattaactttgtggttactgttgtttggctcagggactcaactgttgagcaccacattgggtgtgaaagagtatgtggagaatgaattcttgaaactggaacaagagatattactgcctaacaaagatctcttctcatcccgcataacacttgatgacttcatatgggcgtttgggatcctcaagtcgagggctttttctcgtctccgtggccaaaaccttgtcttgatccctcttgcagacttggcaagctatcttcttgtttcagatattgtctagtgaaaacttcagaaaataatcttcatcattgatgcttggctcagcagagaatctctgacttcaatgtttgaatttgaacagataaaccataaccccgcgataaagacagaagattatgcatacgagatcaaaggagccggccttttctctagagatctcttattttccttgaagtcacctgtttatgttaaagcaggtgagcaggtatgctccaaacactgtctacttagttttctccctcaagagtgtaagaacaagccctttaatactgtttggatgatctcttccataggtatacattcagtacgatctgaacaaaagcaatgcagaacttgctctcgactatggttttgtggaatcaaaccctaaacggaactcatatactttaacaatagagataccagaatcagacccattctttggggataagttggatattgctgagagtaacaagatgggtgagaccggatactttgacatagtagacggccagactcttcccgctggtatgcttcagtaccttcggcttgtggctcttggcggtccagatgctttcttattagaatctatcttcaataannnnnnnnnnnnnnnnnnnnaattgcctgtaagtcgtacaaacgaggaactcatatgccgtgttgtcagagatgcctgcaaatctgctctgtctggttttgatacgaccattgaagaggtatatatgttcgagctcttacttgtactgtctttgcagcttaagactcatttcttactcgtcttcatcgtctgttgtaggatgagaagcttctggacaaaggaaagcttgagcctaggttggaaatggctctcaagataaggattggtgagaagagagtgcttctgcaaatcgaccaaatcttcaaggatagagagcttgaacttgacattttagagtattaccaagagagaaggctcaaagatcttgggttggttggcgaacaaggggatattatcttctgggaaaccaagtga

SEQ ID NO: 165875 - DNA, 1264 bp, Arabidopsis thaliana landsberg
cgaaatatcgcattgtcaaagttaagagggcttgcttttgtgacaccaaaaacaaaaaacaaaaagcgatgggtaagtacgttgggctttaaagataatgttgggctttattattgaggctcgaattgggctttcttctctgttttgcatttgttgcgttcgacctctgcttgaaatgctggtttggcaacattccggttagatctcttcggccgccggagatgatggccgccataagagcagcgattctgaagccgcaagactattattctcacctcaaaacagctcttttccattcgactcctatcttacaacgcaaacatcaatctgtcagtctctctcttttatgtttcctcttctgcaaattctcaatcgatgcttggattgtgcctctctttgaattgtgttggatcaatatcaccttattctcagagtttgatcttgtggataagtctcgttttgatttgacatcatcttctgacagaattcaaaagctcgaagcaaaaggtttggaagaaagaaggcaaagcaagatttgcgtcgtaatgtgaatgcttttgcacaacacttatttggggtaatgtcaagtctctgtttttgttttgtcgtaatgaaacatttcttttgtcaatgtaagaactaaaaagctttcaattttgatgcaatttttgtaatttggtttcccagatatggagtgatgggtttgattactctggtaagcacacctcatggtttgagaaacagtactctagggtttccaaaaggaatcggaatggtaaaacacacatccctcaacatttggataaaagtaagtaagacaactactcttctttgcctctgctttctcctcaatggttgaactatagttagtgtaactgcttctacaatgaaggaaggtttatagactgtgtagctaccaatgctagtgatatagtttatgttaaggaaaagtcaattaagtgaaatttaaaaggtgttgtttgttggtttcagtatttgcatgtagatattaatctccaacaatgctttcatttatgtaggatgttttgattttagcgaagttgatgagggataccaaattgagtactttttaaagactgcgttgggtggatcccgaggtttctcttggtcaaacactcgtgaggggggaactcgctcagggaggtactctaacaactttagaaaatcttggggttcaagatatcgcttagatgaagaagaagaagaagaagaagaagaatacgagtattcttcaacaggagtg

SEQ ID NO: 165876 - DNA, 1933 bp, Arabidopsis thaliana landsberg
tcaacctccaccagaaaaatggagtgttcttggttcgacgatggttgcattcttgacattgattatttcgtcaaaaccatcgccggaatcaaatcaaaaggcgttcgtcctgatctcattggatccatcatcgttcattacgctgccacatggctccctgacctctctgacgtcgtcctaaaccccgatgaccagcaaccgcagccgcagcagcaatcagagagcttctctgttactgcgtttgtgatgaagaaacgttccttcgtcgaaactctaatcggaatcatcccacctgagagagattccgttccttgtgatttcctcctccgtctactcagaaccgcgaacatggtcggagcagatgcaaattacaaggcggagctcgaggcgaggatttcatggcagcttgatcaagcttcactcaaggatctaatgataccttcctttactcacacgtgtgggacattgctcgatgtcgagctcatgactcggttggttaagaaatttgctggcttagacaacgaaggagttaaatccggtgcttccctaattaaagtagcgaagctcgtggactcttacttagcagaagccgccttagacggcgatttaaccctctcggagtttatatctctcgtggaagctctccctaaccatgctcgtgtaaccgaagatgggttataccgtgcaattgacacttatctcaaggtaaatgttaagttcaatgagcttcacgacttagaattaattggcaatgaatggactggcccgtctcacatttatatttattttacatagtagaagtaaaaaaatcgaaaatttgaagcatatataatttgtgatgggttttattcaaattgaatcttggttatgttacttaggcacatcctaaagtgaccaagcaagaaaggaagagactttgtggactaatagacagcactcagctatcaatggaggcatctcttcacgctgaacagaacgatcgtttaccggttagaactattattcaagttttgttctctgaacaggcaaagctgagtcatcgcagccacggcaatatggaatggagtggttcatcgttcagtggcgttaggagcagccctaatccttctggttcacactactcagattctggtcctgcgcggtgtacgtccaaacgcgagattaatgttcagcaagcagagataagaagattgagagaagatatggcgaagcttaagtgcgagtgtgaagcgatgcaaacacagttacataagctggttgagaagaaaggaacttgtactagtgggaataaaggtttttttaggtggaagaagttgggatttaggagcggtttaagcgttagcgttgtggaaaacacgaatggtgaagagtttggtaataatggagaaggtgaaaattttgagtatgtgactcaaacgcctggtaatatgatgacaaagcttgttaaaggaagaacaccttctaggtggagaaaatctatgtcttgaaaaaccgtctttagtttctgttcttgttgttgccttcttgtgcatttgttcttcagtctttgtgtctgaatctaatattttgtacattttgtaagctcatatagtcatatcgatggcttgtgggtcaagtttcacaatggtttttatcttatccaagactctcttagaatcttagattcttgtacatcttgtttctctgttttatcatcagttagttttttatcttcgaaacactacaagtctacaataggttttaagacattttctttggtttctcactgtcttggtttgttcctcttcaatttcctaatgctttttgtctttcactttcagcctcagctgctatctataaacctgcattagctatagcggctctttgggccaaatatttcggcccaaacaatatcaagcccaaaatatttgtcgttgaaaaaggctacttctaa

SEQ ID NO: 165877 - DNA, 1288 bp, Arabidopsis thaliana landsberg; identical to SEQ ID NO: 26501

SEQ ID NO: 165878 - DNA, 1917 bp, Arabidopsis thaliana landsberg
  unsure (1)..(1917): unsure at all n locations
agtggcttcactctatacgagggattctttatctttgcttccctggtgntcganccttgtctagncctggagnacgtgaccttgtatcagatagctctctctcagataacggctcgatctttgaggcatctcatttggatactggtgcattgctatgagaccgaaaccgaggtcacgcttgcccatctgaggaattatttagagatccaacgagtcccgaagtccgtagcggatcgatattacatctcccttgctaaaaacaggaaaattatcgagggttttccgagcaaaatgatgcctacaccgactactttttcttcatggctttagaggatgccgttatcgatgatctcctcgggaaagttctgacgaaatggggatttttgggtagtatagatattacggcttatttattcatgcccgagctgattgttacgattttcgcttatattctttactttgtcgtagatctcccaattcgattcctcaagccgtgtcccgaagatctcgtctcgtgttatcaagagctatccgcccgaaagtgccactggacaaagcatttannnnnnnnnnnnnnnnnnnnagcgcttcgattgtttcacggtgttccttgccccttcagctcagagtcttcagatcaccgaacccaattttttgtcgacatgcagactagcaaacctaccataagggtggtttatgagaggaagaggcttgctgccgaggagaagcgtgcgaccgaggagaagcgcgtcgcggtagagaaaatcggtgctgaaagtgcgaatgttagtcccgacgtgacaagggatctggaagttgcccccgaggctgcttttcctaccacatcgtagcccgttgaagcgggtgacacccacgtggttttgacagatccgccggttgaagcggctaggaaagcaatcgtcgcgcttccggctggcgacaaggcctcgggaaagcgtccgcaggttgacgactccgaagagaacaagagcaggaagaagaagaagaaagcaacgaaaaggaaggagaagcctcctattttcaaggataaggctgcttcagcgaatctccttgggaagtgtgcaagtcacctacttccgcctctaggcactctgctggaatctagaaagtacgccttccgcctaagggtaagcgtgttattcattttggttatttggtgtgttttccgagctgtaatgaatgtggatgcctgcctctatgttttaggccgttggttcgatgaatcggatggtccagtcttatgatttggccatgcgaaacaatctggaggtggttaataagttggctgaagatgaggcaagggcgaaagaggccgagcaagcgagagttgcggttatctccgaggttgccatcaagagagaggcctttgtcaacaaggagaatgccatcaagatggccaagcgcaaccttaagatggactccgaggttgttcgttgcagacgactgtttgccgaggcgagaggacttatggaaagcgaagtggctcgggctacgcaaacggcgaggcgagaaacttcggaggccttcaccgccaggctcaagatggctgaggagaagatgtcgctcttcgaggatgctaacaaccaattcatgtatttgtcccaagcgtgggctaatgcacaattgatcaaggcgctggaagacggtggatctttggcgatcgagaaaaaacaagtcgaggactcgcccaaggatttcgccaatgccgaggtgaaccttgttcgtctcacatctaagctgaaggaagtgctcaaagcccctgcgcccgaaccggctcctctaagccccaaaggtcatagatcggtcgagactcttgcgaatgaggtgggagtcaccgatcagatcgggtcgtacttgcccgctgctgggactctcccgactgaacagcatgagtag

SEQ ID NO: 165879 - DNA, 352 bp, Arabidopsis thaliana landsberg
atgtggactttgatttttatttgttattttcaggtaaatgtgtttccgagacatatatgttccattaacgacacagtttcagcggaggaagctgcaacagagtatgaattcgccatcagacagatggtgagatcacgaaccgtggctgcgtcagacaacagtgacagtcccaggtttgatctgatcttgcttgggatgggctcagatggacatgtagcctcactcttcccgaaccacccagcacttgaggtgaaggacgattgggtcacattcctaaccgactctcataaaccgccaccagagagaatcacattcactttgcccgtcatcaactcagctgctaacgttgtcg

SEQ ID NO: 165880 - DNA, 949 bp, Arabidopsis thaliana landsberg
ttttttttttaaccaaaaaagatttttcccttaaccttccaaaaattttggtcccttttaaaccccaaaaaaaaaaaaaaaaaaaaaccgaggatcttctgttctgtttcttaaacatacatttttggattgcaacagaaaggcagtggaagagtacattaaagagatgaagagaatgtcgagcaaatttctggaaatggtagaggaagagctaaagatagagccaaaggagaagctgagccgtttggtgaaagtgaaagaaagtgattcgtgcctgagaatgaaccattacccggagaaggaagagactccggtcaaggaagagattgggttcggtgagcacactgatccacagttgatatcactgctcagatcaaacgacacagagggtttgcaaatctgtgtcaaagatggaacatgggttgatgttacacctgatcactcctctttcttcgttcttgtcggagatactcttcaggtactctttctgttgctacttctttttattttaattatatatctatcactactaatttacattatgagtttattatattttgtgctatttgggtgatattttaaattttatagaaacttatatattcttagatttattgcagttttagactttatgtataggaactaatacaaaaggagtatctggtggctcttgacaattaatgcaggtgatggcaaacgtaagattcaagagtgtgaaacatagagtggtgacaaatacaaaaggtcaaggatatcgatgatctacttcgcaggtcctcctttgagcgagaagattgcaccattgtcatgccttgtgccaaagcaagatgattgcctttataatgagtttacttggtctcaatacaagttatctgcttacaaaactaagcttggtgactataggcttggtctctttgagaaacgacctccattttctctacccaatgtt

SEQ ID NO: 165881 - DNA, 1129 bp, Arabidopsis thaliana landsberg
  unsure (1)..(1129): unsure at all n locations
gacacatttccaagcgttaaagaacattcacaaggcgttaaagaagctggacacaccaatataatgagagccacgatcccacaaaacgcagaagtttaccaatcagccaacgacaagccatcagaaggtgatttccgcaaggatgtcaaacaaacgatgcttgatatcgtcaatttcttccacgaaaacgacttacctttcaccgtcaacatttaccctttccttagtctttacctaaacgagcattttcccgttgagttcgcttttcttgacggtgatggtcagacaatgactgacaaaggaaagaattatgataacgtgtttgacgccaattacgacacacttgtttacgcgttgaagaaggctgggattcacgatatgaagattatcgttggagaggtaacgtgacaagcaagttattaattagatatatttatcaagaatgttattgagtttggtttatgtttttctttaggttggatggccaacggatggtcacaaatatgcatcgccgaagctagcggagaaattctatgcagggcttatgaaaagacttgctaaggacggtgggactccaacgaggcctgaaagattagaggtctatctcttcggtttcctcgacgaagacatgaagagtattcttccagggccttttgagagacattggggaatctttagatacgatgggacaccaaagtttatgctagatttcacgggacaaggacgccaaatggtgcccgttgcagctaaaggtgtgcagtacttggaaaaacaatggtgcgtagtgaacaaagacacggtcaatctagacgaagttggtcctgatctagactatgcgtgttaccacggggactgcaccgcgatggaagccnnnnnnnnnnnnnnnnnnntaaccaaagtccaaaacatatcatacgcatttaacatgtatttccagatacaagaccaagacgttagggcttgcgatttcaaaggagctgcaatgatcaccaaggtcaatgcatccgtgggaagttgcttgttccctgttcagatcgttagtggaagtgatgatttcaggatcaactttgtgttcggaagattcgtcgtctttggacttgttcttcttggattgctcacggttatataa

SEQ ID NO: 165882 - DNA, 2305 bp, Arabidopsis thaliana landsberg
accaaaagggatcagaaaaaaaaaaaattgaatttcaatctttgatcttttgatgtaactttcatagtatttgagtttctatagacactatttgtgcttacaaatgtgtaatctattggagcagaaactttgttttgaacacattgaagaatgtttctagtattgcttcattttgctgatttatggtctttgttttgtttaaaacttgtggcagtagtaccaatagtttaatgaattcatgttctagattcaattaataaactatgtgaatcgtaaattgtttgagttctatgtgaattgtattaaagtttcaatctttgatctttctatgtaactttcatagtatttgagtttctagagacactcatatgtgtttataaatgtgtaatttgagttgaaagtttgttttaaacacattgaagaatgcgtagattcgtgtgtctagtgttgcttcattttgctgattgatttgttttgttaaaacttgtggcagctgagttcatgttaaagctcatttgatcaccattgtactctttcttgctgtttgagttctatgtgaattgtgttaagtttcaatctttggtctttctatgtaactttcatagtatttgagtttctatagacactatctgtgcttacaaatgcgtaatgtattggagtagaaactttgttttgaacacattgaagaatgcgtagattcttgtttctagtgctgattgatttgttttgtaaaacttgtggcagctgagttcatgttaaagattcaattaggttataagatcaattgatcaacattgtactcgtcttgctgttgtcattttgtgagcttcacataaacatttttttttccaggaaaaacttggcaatgttttactccacacattgttaatctaactcctagtgaggtgagtatttttctttgatactattctaaaggccttcttttgagattatgatttggttaaaacttggaatgtattcataatgcatttgattttgttgccttcttatgtgttttgcggattaatttgataggatgtggcggagaagattgttcttttcactcaacaaagcaagcatgaactatgcgttctttctgcatcaggcactatctctaatgcatccttgcgccaaccggctccatcaggaggcaacttaccatatgaggtgattttctcttgcagtaaaatagtactcagcttgcttctttgttgtttctttccaaaggggagaggagggttttttctttctgatcctttctctctattctgtgtgatagaggaaaattgatacacaatacagttagcatgttgataaagcaaagagattcttaattcagatactttctttgaagtttgcatatcattgttaaacttgcctcaaatttcaaaaaatttattcagggtcaatacgagattctctcactatctggatcctatatccgaactgaacaaggtggtaaatccggcggccttagcgtttctttatctgcttcagatggtcagatcatcggtggagcgattggtagccatctcacagctgctggcccggttcaggtacaattctgttgtatcatagtttcaacttgcatatattgaaacattgttattgtttccaaccatcttacacaaaactgatcatttcctaagataggaggtctggctttgattgatcgccttagatttgtgcaaatgcaggtgattcttggtacgtttcagcttgatagaaagaaggatgccgccgggagtggtgggaaaggggatgcttcaaacagtggaagtcggttaacttctcctgtaagctctggacagttgcttggcatgggtttccctcctggtatggaatctacgggaagaaatccaatgaggggaaacgacgagcaacatgatcatcatcatcatcaagccggtttgggtggacctcatcatttcatgatgcaagcgccgcaggggatacacatgacacattccaggccatctgaatggcgcggaggaggcaacagcggtcatgatggcagaggcggtggcgggtatgatttgtcaggtaacaaaaaagctcaaaacttctcgaaagatgtcatctttcttcatcaaagttcaaacccttaaatccaaacaaggacagattagaattgctatggagattggtggaaattagtattttgtagagttctagaagattacaggctaaagctcttctccgttgtggcaatggcttgaaacgctgatggatgtaatcttgtgcaggaaggataggacatgagtcgtcggagaatggagattacgagcagcaaataccggattag

SEQ ID NO: 165883 - DNA, 901 bp, Arabidopsis thaliana landsberg
  unsure (1)..(901): unsure at all n locations
atgaatggatccgacaatatcactacttcttccggatcacggtctatgactcagccttcacttgcctcctcctccttgcccccattgagcccttcttcgtcaacattccattgcaattcattaccatcgatgagcttttctctgtcagctcctgtggagagtagagactcttccattaaggttaataaaaacccttcattgcctcctttgggtgtgaagagaagagcagccaaagacatggcacctttgaggagacattacaggactgtttcattggatagttgttacattacttcctaaagctgcctccttctccgggtaacttttcctcttcaagttcagttgatggagacgaggatgcttcctggctcgagtttggtagcagtgattatactgatgatgaattgaataagattgcaaagagtaccaaacttcaagagattgcaaagagtaccaaacttcaagagattgcatctgatcctaagaaagtcagaaggtaagtgaacttgtatgactaaattattatttgtcctttttttgtttttttatcatgctttgtgacatttatccatgtggatgctctttcagaatcttgaaaaatcgagagttagccgcatcttcaaagcagaggaagttaaagtacatgattgacttggaacatagaataaaatttcttgagaacaaaaatgctttaatatttgaaaagatcaagcttttggaggtgaaacgtatcacattagtaatcatgagcntgtcatgtctaaacagtatctagaaaaaagtttatttaatttttattgttttaatgtacatgcagaatgataaaacaatgatgatgaatgagaagaagaaaatcncgattcgaattgaatcattggagcaattggcccaacttcgggat

SEQ ID NO: 165884 - DNA, 676 bp, Arabidopsis thaliana landsberg
atgatcgccggagtattgcgccgatcttcactcccgtcgaggcagactctctccgccgcgttagcctccttcaattcgtgtatttcgcacaatctcactccagccaccaccggagcttccgtcagctctcgattcactctcgcgtcgtctcctaactcttttggcatcagagcgaggaacatccacattagatctgagccgtcgatgattgttcccgcaggaatcgcgtcacaaggttacgccactgtcacaaaggatcgcaaaaacgagattaagaaagctaagattaaaatttctccagacaatgtcagaccattgagtaggaaggagatcgctctccaggtatatgcatttttgttcaaattcatagaatattattcaaagtgcttcatcagattcaaattcgaataggaatcggaatgtgaaattcattgaaatgatttagaactgttgtttatgttgttgttgctgtgtgtttggggttgaatagttttttgttgtggacaacaaagcacatcaaacataataggaacaaagattggtataacgataccgcctatcgcacaccctgaaaatcaagctatccatgccgctcctcacactcttaaagtggccgagcccgatacacaaactgtctacacggtgctatcagctcatcacagtagatacataagtc

SEQ ID NO: 165885 - DNA, 3056 bp, Arabidopsis thaliana landsberg
  unsure (1)..(3056): unsure at all n locations
atctttaattgataatctatcaaaaacttagttggttcaatccattaaaaaggaaatcagatttctgctcaatattcatcaagatttagcgttttgttgaccttctttacaaacgaaaattagagcttttcagagtgatggaggagaagaagaatttattagtcaaaggtttctcaagcagttacaagattcaggcatacaacattatatgtcatgtcctcacacacctcaacaaaatggcatggctgaaagaaaacatagacagttgacagagatgggactcactctaatgtttcaaagcaagacaccacagaaatattgggttgaagctttctttacatcaaactttctcagcaaccttctaccaacaatagctctagcaaccaagatcagtccatatgaagctttgtttggaaaagttccaaactactcggctttaaggactttcggttgtgcatgctttccaacacttcgagactatgctcgcacaaagtttgatccgcgatctctgaaatgtatctttctaggatacactgataaatacaaaggctatcgatgtttctatccaccaacaggcagagtttatctgagtcgtcatgtcttgtttgctgaagaatctttcccattcgcagacacttacatcaatcagcagactgcatctccaactccattgtttgcagcttggcttcaaggtttttccactacttcgtcatcagaaaccaatacgcaagaaaatggaacaactgcttctacagagaatcatcaacaagagtccatgtcagaaaatcaacctatttttggaaatggtttgagtgaggagaactctgaaaatatgcaactaacgattgcaggaccaataagntagtatccgttacnaaacagttcttcagcaagataatgaaacaacaccggagcaaaggtctagaagtgatggaaaacgtcctgagtgtacggctagcttagatcttgatcctataggcatcaacgtttctctgttaccttctagactagagcaacttgcatcaagaacaactacagctacagaatcacctcatcctatggtaacaagatccaaggcaggtattagcaaaccaaataaaaggtatgccatgcttgctcataaagtctctcatccaatgcccaaaacagtaactgaagctttaaaagatgaaaagtggactgctgcaatggttgaagaaatgggaaattgttctgaaaccaaaacctggtctctagtaccttttacaccagatatgaatgtgttaggttccaactgggttttcagagtaaagcttctagctgatggatctttagacaagtataatgctagattagtagctcaaggctttaatcaagaagagggaatagattaccttgagacctacagtcctgtggttagatcagcaactgtgagagcagtcttgcatcttgccaccatcatgaattgggaagtgaagcaaatgaacgtaaagaacgcatttttacatggagatcttacagaaactgtgtacatgaagctaccagctggatttgttgatcttgcaaaaccagaccatgtttgtcacttacacaagtcattatatggattaaaacaatcacctagagcttggtttgataagttcagcacttatctgttggagtttggattcatttgcagtatgtcagatccatctcttttcatttacacgaaaggcaaagacatcatcatgctcttgctttatgttgacgacatggctatcactgcaaacaactcagaaaccttaggtactctccttctgaacctcaacaagcacttcagaatgaaagacatgggtaggctgaactacttcctgggaatacaagcacagttccatgaaggaggactgtttctctcccaacaaaagtatgtagaggatcttctggctgttgctggcatgctggattgtgctcctatgcctactcctctacctctgcagctaaacaaggtatcaaaacaggatgaaacattttagaatcctacctactttagaagtttagctggaaagctgcaatatcttacacttacaaggccagatattcaatttgcggtgaatttcgtgtgccaaaagatgcatatgcccactgtgtctgacttcaatctcctgaaaaggatcatcagatacattaaaggtactactactatgggaatatcgtttaataaagatacagattgtaccttgcgggcatatagcgacagtgatcatgcaggctgtcaggaaactagtagatctactggaggattctgcacttttctaggaaacaacatcatttcctggcaatcacagaaacaaccaacagtggctaaaagctctacagaagcggaatacagatctatgtcataggcagcatcagaaattacctggttgtgcaagatcttgaaagaacttgtgatccctcttcatcaaacgccggagctctattgtgacaacctatcggctgtctatctcactgcgaatccgaccttccacaagcgcagcaaacatttcgcgaatcattttcactatgtaagagaacaagtggctttaggaacgctgcgagtctctcacatcccaaattacttgcagcttgcagatatcttcaccaaatctcttcctcttgcgccgtttgcttcactccggttcaaacttggcgtagatgttccacccactccaagtttgagggggactatcaatggagaagctgagaaggaagaagattcgactgagaatgaagaagtacagtcaacaaccctaactcaagaagctgacaaaagacctttggactcaactccaaacgacagcatattgagtaaacccagctttgggccaaatcagaagacaaggcccaatgacataacagaagcagtctggaagcccaagacaaaaccagagcccaatcaactgcaacgttcacctgcaaaacaagaagaagacaaacttgttaaaggtgagaagaaagcttcaaggcaatttcctaaaagtgaaagtaaatccagctgtccaagtcaaggtctaaagctctctaataggttcaaatgtttagaggcttaacctaatccc

SEQ ID NO: 165886 - DNA, 549 bp, Arabidopsis thaliana landsberg
gagatgcttgaacttctggaaactcctccacctgtaattttttttacagccttcgacgagtacgcgatggggggggtcgaagcacacgctatcgactatttactaaaacccttcagcaaagatcgtttcgacaaggcgatgacgaagtggttgagtcagcgtaaacagggtgagcctgtgaaaagtgtttcgataccggaaagtatcagtcagccggaagagaagagtcgcattgtagtgcgcgagggtggaaacatccggatcattccggtgcacgaggtgttgtatctcgaagcgtacgatgattacgtaaagatccacacggcgaaagaaatgtttctgaagaagaagacgatgaacttttatgagaatagtcttgacgcatcacaatttgtgcgtgtacaccgctcgtatattctgcagctcgcgcaattgacccggatcgaaccgcttgaaaaagaaacgtacgttgcattattgaagaacaacaccagaattccactcagcaaaaccgggtacacataattgaaagcggtgctagggctgtag

SEQ ID NO: 165887 - DNA, 1923 bp, Arabidopsis thaliana landsberg
atgtcatatttcaaccctttcatattccttttccttttctcattcctcactagcttcagagcttctgctcaagatcctcgtttcctagcctattattgtccaaatgcaacaacttactcaagtaacagcacttacttcaccaatcttaaaacccttttgtcctctctctcttcccgcaacgcctcttactccaccggattccaaaacgccacggtgggacaagcccttgacagggtcaccggacttttcctttgccggggagacgtctcgccggaagtttgccgtaactgcgtcacctttgccgtcaacaacacctttagtaggtgtccgaatcagagagaagctgtgttctattacgaggagtgcatactcagatactctcacaagaatattctatcgacggccattacaaacgaaggagaatttatcatgaggaaccccaatcatatttctcctattcaaaatcaaataaaccagtttactaatttggtgttatctaatatgaaccaaattgccatcgaagcagccgacaatcctagaaaattctctacgataaagaccgaattgaccgcactccagactttctacgggcttgttcaatgcactcctgatctttcaagacaaaactgcatgaactgtctgacaagttccatcaatagaatgccatttgttagaactggagcaagacacttttggccaagttgtaattcaaggtacgagctttacgatttctacaacgaaaccgccattggtacaccaccaccaccaccactgtttccagggtctacgcctccgttgacatccccttcaatacctggtgaacactttctttcttcttcctctgttttttgctctgatttactatatcttgaaatttcagtaataccaaaatagaaactttgattcttttgacaaaattttggtattattatcgtctgccagtgtgatcttaaaaaaatgatgtttgaaaaacaggaaaaggtgggaattcaaatgtgttggtggtagccattgttgtgctggctgttctgcttttcatagctttagttggttattgtttccttgcacagagaacaaagaagacttttgacacagcatctgcatcggagggtaaagattactaacaatcttaattaggtttgatatattagtggtcgtcattcatcagcctctttagctgattactaagacatttgttctgtttattgtgtaacaggagatgatatcacaaccgcagactcactacagcttgattatagaacaattcaaactgcaacagatgattttgcagagagtaataagattggtcaaggtggatttggtgaggtttacaaggtaaattatagttcccttgagctgtgtttttttttcttgaaattttaagccaacacttttggataatgagatgatgctgataaaaacaacagggtactttatcggatgggactgaagttgcggtgaagcgactatcaaagtcatcaggacaaggtgaagtagagttcaagaacgaggttgttcttgttgcaaagctacaacatagaaatcttgttagacttcttgggttttgtctagacggagaagaaagagtactggtctacgagtatgtgcccaacaaaagtcttgattacttcctctttggttagttgcatttaatgctttgtttcaatgattcttgatacttggggttacgaatgtttagagatctcattgtgatttatggatgtggacagaccctgcaaagaaaggccagctggattggactcgacgatacaagattatcggtggagttgctcgagggattctgtatcttcatcaagactcacgactcacaatcatacaccgtgacctcaaagccagtaacattctcttggacgcggatatgaatcctaaaattgcagattttggaatggctaggatctttgg

SEQ ID NO: 165888 - DNA, 1813 bp, Arabidopsis thaliana landsberg
caaatcttgcgaggtccaacttctcagttttctttcaagtagaacctctatagtcacacatattagttttgtaatccatatacgttttggtactttattagggatactcgagctgcggtgttggaacagagtttgaggaaattaggagtggagaggcttagccaagatgatgttcagagaatgcaatgggaggtattagaggccaagattgggaatcggatacattacatgagaatatccgtaaaaaactctctcccacaaaacaagaataccttactagatcgctactgtttccttcgtttacacggcacttgcttttgttgccttgagacaggtgaaactgttattcgccgcggaaaagaaaatctgcgaccaaattcttgatggtgttgagtctctcagagatcaatgttttggtgaggtcactgtaaatagtgtagctgtgctgcttagtttcggggaggctattgctaaaagcaagagatcacctgaaaaactgtttgttctgttagatatgtatgaaataatgagagagcttcagcctgaggtaacgtttaatgtctcacaccgtcaaagaaactatgtgtattagctagcccctctaattgtctttcatttatagattgagttgctctttggaagcaaaccatgtgctgagatgaaagaatccgcgctgaatctgacaaagcggttagctcagacagctcaagaaacttttgctgattttgaagaagcggttgaaaaggatgctacgaaaaccgcggttatggatggaaccgttcatccacttactagctacgttataaattatgtcaagttcttgttcgagtaagtaactttacttagaccaacggacattgtcatttttgttggactaatcagtggtttttgggatatggaaacagttaccaaacgacgttgaggctactttttcaagagtttgatagtaaagatcctgatagcgagcttggagctgtaacaacgaggatcatgcacgctttacagaataatctggatggtaaatcgaagcagtacaaagatgtagcattaactcaacttttcctaatgaacaatgttcactatatagtgagatctgttaggaggtttggttctgtttcttcggctccatctttcttaaacagaaccagaaaagcctaaacataatcctgagttagagttacatttttcacaggtcagaagcaaaagatttattaggtgatgattgggttcaaatacatcgaagaattgtacaacaacatgcaaatcagtacaagagagtttcttgggcaaaggtttactcaatcgttttaggtttatactttaaaaatgctttaaaatgtattttctgattagtcttttcttctgcagattttgcagtgtctcacggttcagtcgagtgggagcggtccgatagaaaactcaaatatatcaagagcatcagtaaaagacagattcaagactttcaattctcagtttgaagagcttcaccaaagacaatgccaatggacagttccggacagcgagttgcgtgaatctcttagacttgctgttgcggaagttcttttacctgctttcagatcgtttcttaaacgttttgggtaagatcaaaaacacttttaaacagattttgtttcgcgcttgtcaagaaagagttaaaagttttgtttctttggttgtgttgtgtatcaggccgatgatagagagtggtaagaacccccagaagtatataaggtttagtcctgaagatcttgagagaatgcttaacgagttctttgaaggcaagacatggagtgagccaaagagataaatatgt

SEQ ID NO: 165889 - DNA, 5406 bp, Arabidopsis thaliana landsberg
atgtcttcggttgctttccttgatctgaggcctcctcttgctccaccaccggagtcttcttctccgctgactccaccagaaccacctgacccccctgaccctcagatccgcctctcctttaatgtatctcttactcagtcgccctcgacgacgagaaaccctcttcttcctgcaaagccacgcaatagttttggagtgctgcttctcgacgagtccctctttgcaaactggtttggagagatgttcccccaggtttgcttgtccttctcgttctctaattcttctaatatgggaaggaatttgaagttcgttgaatgtgtggttctggttttgtggaactcgtggttaactcaatcgatttcgatggatttagatacttttgtgtttacgtttttgctctcctctagcacccttatcgccttgttgcgatcgcttactgtagtatgcagattctctctcgatttagctcggcttgaaattgtctcatggcaacttagacatagttctttgtttcagtttaaccggccagctgcccgtaacttattggtttttgaaaataggactatcactgaagctaacactttgtctaaggctctctatgttgcgaacgtgacttgtcaggctcctaaacgtggcatacctacaactctacctcttattaaggcggctcccctatctttaccttgtattgaggttctttccaccagcattcctcggtctgaggctctttctcttgtcttacctcagtgtgaggatattacttgtttcatggacgcggcttgaaacgcgttctctggctcctgcggtatgggatagatttttaagactcaacaccaaagagttatccatcagggctcgtcttctcgacttcatacaccttcggccttagctgccgaagcccttgcgattaaatcggctaaatcggcgctgactgcagcgttgcgaatggaattcacctccatcacagtttgctcggactctcaagtcctcacatctttactcaatacagagaccacatcgaatgagcttcaggggatacttcatgatattacatgtttgtgtcgttcactcctatcttttaaattctgctttatttcacgtttagctaatgtttcagttgatgcaacagccaaagaggctttgttttctttggatttccctgttgtatgaaccttttaagattacttaaatgaagattacaatttgaccaaaaaaaataaaaatagaagaaaggtgattccttacctctaaaatttaggtcgataggcacatgcgattcatttgcatctttaagtccacttcatgcagcagtaaaaggtgattccttatccgatcaaaattatctgataaggaaggaggcgatgaggtgaggatgggagattttttttttaatttctttttcacagtgtgaagaaaagggacattatccaacgaatggctctcgtgaagggcgattttttggccgacaggtgtctttcgtttttctccggcggagtagttttccgaccaaaaaagatctagatttcttgtatcgggtcttctatggcggttttatcttccaaaagtctatggcaattactttcctccaaattttcgggaggtaaccgtcaaccgaaaccgccatagaatcgtttatatatcttctccgatcacttgctttctcttttcgattcactactccaccaattcgttttcaccacaccacaaatcatgaatgaagttctccgaaaatctgttcaggatctcgatttgggaattgatgatatcccaattgctttgtcactggaatttgtttctcaagcggccgctgtcaaccgcttctcgctaattgtcaccacggtgacccaaggaagcaaaacctaagagcgttaattggtcagatgccaaaggtttggggttttgcagaccattgtgttggtcggattgttggtcaagggaaagtccaattcaagtttcaatcagaggaatccatgaatctggttctgcgtcgtggtccctggtctttcaatgactggatgttgtctgtgcatcgttggtatccaaacatcacagagaatgagatgaagatcatacccttttgggtccaaatcagaggtattccgcttctctacttgactaatgcaatggctagagtgatagggaatagattgggacatgtctcagatgtggactttgatgagaacacaaaccaaacgggcttcgttagggttaaagtggcttggaacttcaacaatccgttgcgcttccagaggaacattcagtttgatatgaatgataataccatcatcaagttcagatttgagagactcaggaatttatgtactaagtgtggttccctcaagcacgacgtgaaggaatgcgctctagccttcgaggaaaatggccctgacaatgaggatgagggatataatgatgatcatcacaaccaggatcatgatgcacagaagatgtctgatgaggactcacttcctagcattgatctaacaactctaatttcgggacttcagagaaacactcaaactgctttcaaccagggatcgccctcagactcagtcccatctgatctggcaagtgcattcgaggacacaaattaacagcggaacgactcaggtacctccatgccaaacatctgcgtgagtctttgatgaaacaaagggaaacatgccttcttgaagaaatctctgacaatgctacaaatgagtttgcttttgtgaagcgtaagcgggtcagttttaaaacattgtacaaccaggcggaggctgcagaggaatcagcagtactaggtcatcttcgtaagaaagacaggagagtaagctttgctgcatctatgacatctccaatctcaatggacggaggcgtgggggacccggtacccccacagcccccatgaagatcagttcctggaactgtcagggtttcagagcgccgctgactcaatcgcgtcttactaatctatgtaaattacttaagtttgatgttttattcctcattgaaactctaaattagtgtgatgttataagtactctagcaagtgtattaggatttcccaatgtaataacacaacccctcaaggtcatagtggtggcttggccttgttgtggaaggataatgtgtgtttatccaagatttctcaggatgaacgccatatcgatgtaaatctctctatcaatatatcaacttctatttgtcttgcgtatatggtcatccatgtcaaagtgaaaggcattatttgtggacacactttgaaactttatcacttacacgcaatgatccttggatattgataggagattttaatgagatactgtcaaatgctgaaaagattgaaggaccaccaagagatgattggactttcagagattttagaagaatgcttgcaacttgtgatatggaggacataaggtcaacaagtgacaaattcacttgggtgggtgaacgccataatcatacagtgaaatgttgtttggatagagccttcatcaacacggaaggagcggctacattcccctatgcagagcttgaatttctggactttacagggtcagaccacataccattactattgactctagagaagctagaaacaccaaaaataagacctttccgctttgataaaaggtagctagaggttccggatttcaaaacgtgtgttcgtaatggttggaatgaagaaacttctaaacaaagtactcaaatctttgatcaagtgcgaacctgtagaagagcaatggctactctgaaacacaagtctaatatgaactcacgtattaggattgatcatttacaagcgtcgttgaacaaagctatgtccagtgtgattcgagtagaacggttacttataccacgtatacagagcgatctcaccaaagcattttctgatgaagagaaatattggcagcaaaagagtaggaacaattggatgaaggacggtgatcgtagtacaagcttcttccatgcttgtacaaagacaagattcttcgtaaatcgaataacaactataaaagatgcagaagggaggatccgcagaggcgataaggagataggaatacatgctcaacaatttttcatcaatgtctacacaagcaacagacgacctgtttctcaaattgatttcgccgatttcaaatcattagtcacaaaccagatgaacgatgatctcacaaaagacttcacggacacgtaaattttcaacgcggtgtgtcaaattggagatgataaagctcctggtccagatggattaacagctagattctacaagtcttgttgggatatagtgggacaggatgttatcaaggaggtaaaatattattttcaaacatcatacatgaaacatccattgaatcacacaaacatatgtatgatacctaaaataaccaatcctgaaacaatgtcggattatcgtccaattgcactttgcaatgttctatacaagatcatttctaagtgtttggtgggtcggctcagaagtcatcttaataacatagtctttgatgctcaagcggctttcatcccgggaagacttgttaatgataacgtaatgattgcccacgaaatgatgcatgctctaaaatcaagaaaaagggtctcacaatcttatatggccgtgaagacggatgtaagcaaggcctacgatagagtcgaatggaatttcctggagactacaatgcatttgtttggttttagtgagaaatggataaggtggattatgggtacagtacgatcgattcattactcagttttaataaatggggttcctcacggcatgatcaaaccccaaagaggcattaggcaaggggactctctgtcccctatctttttatattgtgtgctgatgtccttagccatcttattaaagctagagtctctgagggtgatatccggggaataagaattggaaatggtgtactaggggttactcacttacaatttgcggacgattctctcttcttctgccaagctaatgtccgtaactgccaagctctcaaagatgtttttgatatctatgagtattattcaggccaaaaaataaatctggctaaatcaatgataacttttggatcaaaaatacatagagttgttcaagaccgccttaaaaaggtactgagcatccaaattcatggagggggaggtaagtacttggggctcccagagcagtttggtcggaagaaaggagaaatgttcgagtacatcattgaaagggtaaagaaaagaacatcgagttggagtgcgaaacatttgtcacctgcgggaaaagaaatcatgctaaaatcggtagatatggcaatgcatgtgtatgccatgtcttgtttcaagctacctttaggtattatttaagaaaaattgaatctcttcttatgaatttctggtgggagaagaatgctaaaaaaaggggaattccatggatct

SEQ ID NO: 165890 - DNA, 1367 bp, Arabidopsis thaliana landsberg
ctatgttgatactgcagaaagattagaacttgatagattactattgtggagctctcatcagaagataagatttagtaaaagaacgttttctcagagaattgttgtgaaaatgtctgcttcaactttgcctatgaatcttggcaaagcaaagaaggtttggatatggactatgtgcaaagaagtcatgaccgttgcggtggaacgaggctggaacacatttatattctcatcggataatcgaaaactatccaatgagtggtcatgtaacaatgcagccctccatttgacgtgtttttatatatctatgttcttagttttacagtatgctcaatggatttttttgcagctattgcattgatggatacattgtttattgaagagaagaaagttattgatggtacggggaacgttgtagcttcggtctttgaggtttcaacacccgaggagcttcggagtttgaatatcgaaaacgagcagatagagaatattgttcttgatttcttagactggaaggtaataactttctgagcttgaagccttgaacttgaactcactgtgtggactatttagtaacacttgaagtttcgtttcgcagtcaatcccagcggaaaatctagtggcggctcttcaaggaagtgagaaaacagtatttgcagtttcaaatactccctcagaggctaaactattcctagaggttgtgtttagtttctgatgttgaattttagttttcaagagatgtttattcttagtgttatgcttggctctctaggctttagagcatggtctcggtggaatcattcttaaatccgaggatgttaaagctgttcttgatctaaaggttactatctccacaagcgtcctttcattttgtttaaaaacatggtctcttatagttactgttttgaaaaactattaggaatactttgacaagagaaacgaagaaagtgatacattaagcttaacggaagctactataactcgggttcaaatggtcggtatgggagaccgagtctgtgttgatctttgtagcctaatgagacccggggaaggtcttcttgtatgtttgcctgtatatacactctttctccaacataaagtactaatttttactattcttataagcattgaagtatcaatctttactcttcttacaaggttggatcttttgctagaggactcttcttggttcactcagaatgcttggagtctaattacattgaaagcagaccatttagagttaacgctgtgcgtttttttttctttcatttttcacttgctgggactattccttttatagatatcattcactaaaaatctcattgtaccggggccggtgcacgcttatgtcgctgtaccaggtggaaaga

SEQ ID NO: 165891 - DNA, 2932 bp, Arabidopsis thaliana landsberg
  unsure (1)..(2932): unsure at all n locations
aatgcctgttacacgttaagctacaacaacatgttattatttattttcttatgcattattattttttttgggatttgggtttgatagattgatggaacaatcatagcaccagatgagcctagccaatgggacccgaaattcccaaggaattggcttcaattttccaaactccaaggagttgtattccaagggaatggagttatagatggttctggtaccaaatggtgggctgcttcttgcaagaagaacaagtctaacgtaagtatcttctttacataaagtggactttcttctaatcaatcatgaagtagaaatctgacacatatctttcttgtttttcttttgtagccttgcgtaggcgcaccaacggtctaagttttttcccttgtgtgttcatcgaccattagacttagcatttatgcttgattttgcttataagaaagtctctacttttatacaggctctaactatatattcaagttcaaatgtgtatgtgagaggcttaactatccggaacagccaacagatgcacttgatcatacaacggtcaactacagttcgaatctctagagttatggtcacatctccaggagacagtcccaacactgatggaattcatataaccgcatctaccgatgttgtagtccaagacagtaaaatcagcacaggttcttcaccaaaaacttctatttaactcaaaacactatcatggtaattataatattaaactcaaaatgttatagctgacacttcaacttgaaaacaggagatgattgtgtctcgattgtgaatggaagcgccaagataaagatgaagaggatctactgtggaccaggacatggaatcaggtaaaccatctctaaccataaaaagaaatgagacacatatattattattgattgcaaataatttcttgttctgtagtattggaagtcttggacaaggacattcgaaaggaaccgtcactgcagttgtgttggaaactgcgttcttaaagaacacaactaatggtctaagaatcaagacatggcaggtaaaatctcaattctattgatctttgctttccttccaaagagttttcaggattgattgaaagatgaaactctttaaaacagggtggtaatggttacgtaaagggtgtacgtttcgagaacgtagtgatgcaggacgttgcgaatccgattataatcgatcaattctactgtgattcaccatcaacttgtcaaaaccaggttttaattctttcacataaccattgacttattcagtcaacaaacctcaagaaagaaacttaatcttttgattcctatttctttgcagacatcggcggttcacatatccgagataatgtacaggaacataaccggaaccacgaaaagctcaaaagccatcaacttcaagtgtagtgacacagtcccttgcagccacatagtcctcaacaatgtgaatcttggaaggcaatgatggaaaagtagaagcatattgtaactctgctgaaggatttggttatnnnnnnnnnnnnnnnnnnnnnnnctgtttatactcgcacgacgacaagggcttggaccagactcacaagtcagaggaagccgagactggccacgatgagctttgatggtgatattcaaactgttgttgtagtgagagatgatgatatgtaaaatagttttctgaagcatatgatacagtaaaaaatgatattatttttgtgtttataatcaaccataattaaggttgttgttaacagcatttctccaccttttatatcaaatgattcatctattgagaatgtaagagccatcagcccatcgctttgaaaagtcacgcttataccataaaccgggttctatacgtaaccaaatttcaatttctgaggggttaataataacccgggtttataaattgggttatgattatacagtataccaaaagctaacaaagatcaccattggcccaagctcaacgattcgtctcaaagtttcacactttcgtgaaatcgtttgatacagttgaagaaataggcaatggcgactccgtcgtcgtctttctggaacacagcttcacgagaagccatgaaaagcggcgtgttactcgcgaaactctactgcttcctccatgtaacaacaaactatctcggattcatggcttatgtgagtcaatcgaaatctctcttctttttttgtaaatcaaattcgttattgaaaatttaccataaagatgtagtctttttgagcaggcttatggtccgagcatgactccgacgcttcatccttcgggaaatatgttattagcggagagaatctcgaagcggtatcagaaaccgagtcgtggagatatagttgtgatacgatctccagaaaaccctaataagactccaattaaaagagttattggtgttgaaggtgattgtataagctttgtgattgatccagtgaagagtgatgaatctcaaaccattgtggtatgttttgttacttaaccttccttgttgacttcacttcactttggttttgcttatgaatcagattttgaatgtagtaatttagagtagaactgagtttgaagaaagtagatacattgttgagaaattgagtgatcagagttgaaacaagttgttaatcagtattgagctcgatttagcttattgcaattcatggaaatttttgaatctttagcaatgtttagtgttattggtgtacattacaatttactttagattgtttagtttcgattcgatatataagttgttaagtttgttggactaatggtgaattgatctttccatgttctattggttttaggttcctaaaggacatgtctttgttcaaggtgactatactcataactcgagagactcaagaaactttggtcctgtaccttatggtcttattcaaggcagagtgctttggagggtataagcttttttgtcatt

SEQ ID NO: 165892 - DNA, 478 bp, Arabidopsis thaliana landsberg
actataattaaaattctgaccgtcgtaatgaatgcgacggtggtgccaccttactccggccactggctaacgaacacagataggatgggtggattggcttacgggatcggagtctccattggtatacttatgctaattaccacaatcaccctaacttcttactattgcactcgaagccatatctctgcctctcccacgaccactcctaggacaagacgccggcaaagagagaccaatggaacgttaccacctggccaagaacggttcgacttcgaagatgatgaaagcgacaccgttgtggtcgaagtcttggggctaaacgaggaggtgatcaagggttttcctaagctcccgtacgaagaggctcgtgtgagttatagcttgcaaaaggaatcgagtacgacggcgtgttgttctatatgtcttgcggattacaagaaaatggacatgatcagggttttgcctgattgtaaccact

SEQ ID NO: 165893 - DNA, 1200 bp, Arabidopsis thaliana landsberg
tccaacacttgggctcctcaagaggagtcactccgaccgaactcttctacaaacaggaggtgatttagacggagaacgtaaagttagacttatggatccttgcgacgacaattcttgtgactggatagaagtcgataacggactcgctgcaagaagatggtacgctacgaaccatatcctccccgacggtcgtcagatcataatcggtggtcgaggtcaattcaattacgagtttttccccaaaacaaacgctccaaatttctacagtatcccgtttttgtccgaaaccaatgatcctggagacgaaaacaatctttaccctttcgttttcctcaacaccgatggtaacttgttcattttcgctaacaacagagcgatattgctcgattattccacaaacactgtcgtcagaacttatccggagatccctggaggtgatccacgaagctatccaagcactggctccgctgttcttttaccgatcaagaaccttgtgttagaggttcttgtgtgcggaggtgcaccgaaaggatcgtacaacctctcttggagaaacacttttgtcaaggctcttgacacgtgtgcgagaatcaatatcaacgacgtgaatcctcaatggatcgttgaaaagatgccgagagcgagagttatgggagacatgatgcttttacctgacggaaatgttctgttaattaacggtggttcttcagggacagctgcttgggagcttggtcgtgaaccggttttacatcctgatctttaccatcccgataaaccggtcggttcaagatttgaagttcaaaacccaagcactatccctcgaatgtaccattctatcgcgactttgcttcgtgacgggagagttctcgttggaggaagcaaccctcacgcgttttacaatttcaccggcgtgcttttcccgacggagctgagattagaagctttttcgccgtcgtatttggacactaagtactcgagtcttcgtccgagtattgtggatcctaggccacagacaacggtaaactacggtagagtcttgaggcttaggtttattgtgagcggaagagtgaaaagtccggttaaagttacgatgttatttccttcgtttactacgcattctttctaaatgcaactaaggcttttggttcttgatcatgtcttctcttttaaactcgggattagcgagatttatgtagttaa

SEQ ID NO: 165894 - DNA, 2686 bp, Arabidopsis thaliana landsberg
cgatattttcggtctaggagaacaaaaggtacaggagtaccactgaccgttttaagatacgcaccagaaacatgtgaagtatacattgtgtgtaaagacagaatcactacaaaatctatggatccattaatcaaccgaggtaaaaattaggattttgtgtttcgttttttttaaaagaaaattattgtttaatactacatccatagttgatgtagtttcttaaacatggtaatttataggcaaaaccttttatttgaacaccccatattttctcatttcttaaaacttctctttaatcgtggtaaccagagccgtgcacaagtccacacgcagccgcgactgcccatgacttcttgagagcctggtcggatagtttccacactatccggtctccaacgttacccgatcctcgacagtcaactggtcaaatatccatatagctagtcaaatatccatcagaattcataggaaatgaatagcggttttaggttgttttaatatatagtacattctcaattctgacattcttagcgaataaaaaaaaaaataattttaatggtcaactgactcatttttttgaattgaacctaattttgaaaaatatataacaacaatcttagttacaaaaagtaaactagttgcataacattataactctgaatataaatttgttatacgaagaaatttgcaacgaacatgcatctatcaagtatagattcatattataaaatatataaatgataatgcatataatataaactatgatgtcttgaaggcctgaagtttttctctttcttttggatgttgaagaggcaggaacaaggaggtcagcatcggcaagagagctgagatttgaggcattaagccttacttgtaataaacccaaaacgcctcaaagtagtaaggcttctagtgcaacaactccagagatttttaggcgacggagaggatccgatattcctcagctgaattactcagattttgataaaacatgtaccaagccccaatcaaatgttgagaacatcgttagcgaacaccgagactctgatcgttcacccccggaaacatcaagaaaatccaagaaggttactttaccatcatcttttgctgcaatgatgagactagctattatgacgtaaccgaggtttttgaaagatttggtgttgtttgacaggttgagattgaagaagaggtcgaacgtttgaagaatgagctacaaagtacagtctttaaatataaacaagcttgtgaagagctcttctccacacaaaacaaggtatagatttctgatcttgaagcctaaaatctgcaagaaaatgattagagatgattttgggaagagaaatttgtatatttgtgatggccatcaaaacttatctgtgaaagaagtgtttattttatatctgattttattgtttctataaaatagttttccaaactcactggtgaatcattttgcttgctttttctccaagtaaagtgtttattttggggtttctgttaggttaaaatgctttcgactgaatatttgaatgaatctaaaagagtgaacaatgctgtggagaaagaagagttgcagaggaacaccgcggcgctggagaaagagcggtacatgaaggcagttaaagaggtagaaactgcgaaagcgttgctcgcaagagagttttgtcagcgacagatcgcggaggtgaatgctttaaggacttacttggagaagaagaaagtgatcgatcagcttttaggaaccgatcagcggtacagaaaatacactattgaggagattgaagaagccacagaagatttctcgcctagtcgcaaggtcggagaaggaggctatggacctgtttacaagggaacactagactatactaaagtggcgataaaagttctaagaccagacgcggcacaaggaaggtctcagttccagcgagaggttgaagtactaacctgtatgagacatccaaacatggttctcctgcttggtgcatgtccggaatacggatgtttagtctatgaatacatggccaatggtagcttagacgactgtctcttcagacgaggaaactctccaatcctttcttggcagctaagatttcgtatagcatctgaaatcgcaaccggtcttcatttcctccaccagatgaaaccggagcctttggtgcaccgtgaccttaaaccgggaaacatattactcgaccagcatttcgtcagcaagatttcagatgtgggcttggccagactcgtccctccatctgttgctgacactgcaacccaatatagaatgacttcaaccgctggaacattcttttacatagatcctgaatatcagcagaccggtatgttgggaactaagtcagacatttactcattcggcattatgcttttgcaaatacttacagctaagccaccaatgggtttaactcatcacgtcgaaaaagccattgaaaagggaactttcgctgagatgttagaccctgctgttcctgactggccattcgaagaagccttggctgcagcaaaacttgctctacaatgtgcagaattaagacgcaaagacagacctgacttagggaacattgttttgcctgagcttaacaaactcagggatctagctgaagaaagcattaaatttggtgtaagacagccttcaccgatcaggagctcagggtccgcgacttcgatacag

SEQ ID NO: 165895 - DNA, 2223 bp, Arabidopsis thaliana landsberg
  unsure (1)..(2223): unsure at all n locations
atggtgagtaatcataaatgatctacaacaaccaccaaaaacaagaaaagtatcaggataaaataaacttatagaggataaagtaaaacaataaatatagcaaattcaacaaacgttacctcaagagtagatgcagcgatggtcatatttttgacacgagagatggcgacaagaaaatgaagaatcatatttctctttgacagatcattcggattaaactttttccccacacaaaagttaaactcaaccttgatatttgcctctacaagggaactcgatttatttattatgaaacttgaagttacttgatgagagagcttgaggatctcaagctttggggcatcaatagtaaccactagatctttaaaatgaagatcacgggaactagggccataatagttgaagctcaatagagactgagatctcacacgtaaaacgtttacattgtctaatgaacatttgcaaaatcttaaacgtttaattagtcttaaccagatcttttgttggaatgttgaggagaacttgaaagaacaacgattctggcaaatttcttcgtacccaatcaccttcatcaccaaatcttttgtcggatgattcaggagaagatgatcgtttggtaagaacatgtttctctccgtcttcgtccatgtaccttcaaaattgcgaagaaagcggcaagactagatgaaaatgaaacgataactattaaacctaaacctaacagttccactttaacggcttctaagaaagataacggagaaccaaaacgccgttaacgtgttaaaatatctcagattcttgactatttatttaaatggcaaaatagtttttttaataattttactaaacatatttatttttaacatctgttttatctaattattatcttggaacatatgtaatcataaaaaaacaaaaagaacaaaggatccctgaaatatatctgaacctttttttttctttcttgtttgcagtaaagtctttagactcttagttatcctataataaaagaaagaaagaaaattttacattaaaaaaggagaaacaaatttaaatattaaagagtttagattttcttctataagatgtacctgtaaataagctaacatagcgtcacccacataaggattctcaaatctaatggaaacttttaaaaaaccgtcaacaggaagtataaggaaagtagggtctattggcatcgttctatctataagtagcgaagtcttaagacaccgtacctcatctcttatccttcgatagagatggaaaacatcacgaataactccgagcgatccctcgaccgaccaaagaggcaaagacctgtctccatggagaatgttggaggaacggcgagtggaagtgaggtggnnnnnnnnnnnnnnnnnnnnnnnnnnnnnnnnnnnnnntgtcccatttgctaccacaaacttggggctcctatctatcaggtctctctcttcctttcctggtttataacttttcttctagggaaactaaaaacaattagtggcactgacgagtcctttaatttgttgatatgagacttttaggataacaatcatcaatttgcttgaaattcatgtatttcaaatgttactttgatgaatttacgaatttctcgatttctcaaatgtaatcttgactgccacattgagttgataagatgttattctttttcatttttttgattagatatttttataagttacactagactagttcataaaactttgataattaactaagtctgagttttgaatttcagtgtgacaatggacatatagcatgttcttcttgctgtaaaaaggtgaagtacaaatgcccttactgtagtttgcggattggtttttttcgatctagaatactggaaaaaatcgtagaagcagtcgttgtgtcatgcccaaacgccaaatatggctgcaccgagaagattccatatgacaatgaatcagaatcagcccatgagagggtatgcgagttcactctttgctactgccctgaaccagagtgcaagtacaccgncgtgtacacagatctctaccgtcattaccatgctgaacacaagactgatcactcatggttcaagtgtggcgagtacaataacgcgtggttacacgtcaccggtgaaaaattaagctttttagtccttcaagatatgaagatggtccatttggttgttgtcaatgttcgatggagtctcatggatatgtgtgactgtgaact

SEQ ID NO: 165896 - DNA, 730 bp, Arabidopsis thaliana landsberg
  unsure (1)..(730): unsure at all n locations
atttaagatactcagagtaagaacaaagtagtgaaacctanagtaaagggtgaaactattgatgttgtctacacttgcttagaaaacaccgggtaattaatgatgttaacttgattgaatctctttatttttcaaatgatttttctgtttgttaatttttggtgtttgaatgatgttaacttcgttattatatgagcaaagcaaggtgcttatgactattattttctgcttttcacatatcgaccaataaaggtagtgcctgatgaaacaaagaaggcggactggagacctttttatggtccggtgaaagatcagggagaacatggtagagtttcaaattctaggctgtttttacttatgaactggttcttgtttttccttaaaaatactttgatataatgtagatatatgttgggcgatcgtgacggctgaattagtcactgcgatacggtggatcaaacaacgtgaaaatgggactgagtactcgtatcaagagcttgtagattttgtgtttccggagaaaggaaagcttcaaaaaaataaggcacatttttgttataggctcaacatcgtaaaagctttgacgtatgttgttcgacaaggtattcaaaaaacactagatcggcctttcgatgggtgcaaagagttgccaccgcctcgggttttattgaatccccacctaggagggtatatttgtgccgccaagttgatacaacattgttacttatga

SEQ ID NO: 165897 - DNA, 1618 bp, Arabidopsis thaliana landsberg
  unsure (1)..(1618): unsure at all n locations
tacagcttgggtgaagttgagagaaggaaccaataagaaagtaggagttgtgtttaggacagaaaatggaagatttgttcatggaggtgaagttagggcaaagaaaagatgttggactttgcttaaaggtggcattgtgccagatgtttcaggctctgtagatattttcttcgaggtacaacaactagctatatatgtttattcctatatgtatatataacactgcgtcaaccacggttttatgtggaagcagagtgatgacaaagaagcaaagatttctgcaagcgatgtgtccctgaaacagttcagtaaacaagaatggaaactgaaacaagaccaactaattgaaaaggtagcattgatcttctgtcatctgtatagttttagccttttagggttttgttatgggccggctcaattaagcccgattcattgttgatttcggcccatttgaggcctataatgtttttaagttaaactcggtcttgattttacccaacgaatcacatcacacaatatacaaaaaagtaccaatatgtaccatgctcggagagccatggccgaactagcccgacctgattctgaccagcccacctactagcttttttaaggccggtctggccagttgttttgggtattacatgatttatgtttattgcagataaggaagagcaaggtgagatttgaagtaacttatcagaacaaaactgcggtaaaaggcgcagtgatatctatagaacaaaccaaaccatctttcttattannnnnnnnnnnnnnnnnnnnatcctacaaagcgaagggtacagaaattggtttgcgtcgcggtttaaaatcacatccttcaccaatgaaatgaaatggtatacaacggagaaagaacgtggtcacgagatctactcggcagctgattcaatgttaaaatttgcggaacagaaatggaatattggttagaggtcatactgtgttggggatgaccctgaatgcagccaacttgggtgccaaaaatagaagatccaaacgatttgatgaatgtgacattgaaccggataaactcggttatgacgagatacaaaggtaagttaaccgggtggcacgtggttaatgagaacgtgcattgggattactttgagaaaatgcttggtgccaacgcttcgtcaagtttctacaatttggcttttaagcttgatcctgatgtgacaatgttcgttaacgagtacaacacgatagagaaccgtgtagaggttaccgcgacgccggttaaggtgaaggagaagatggaggagattcttgcttacccaggtaacatgaacattaaaggagctattggagctcaaggtcactttcgtccaactcagcctaacttagcttacatgagatctgcattggatactttaggctcactaggtttgcctatctggcttacagaggttgatatgcctaagtgccctaatcaggtttgtcagcatcttaccttgcctaacaagaaagccttcattatcataatcattaaaatttgttaactatttcaattgcttgataggaggtatacattgaagaaattttgagggaagcgtattcgcatcctgcggttaaaggcatcataatatttgactgggcc

SEQ ID NO: 165898 - DNA, 1109 bp, Arabidopsis thaliana landsberg
ctgccacaatctaccaccactggtctctctttcaaggtgcatcgccagcagccggagctagtcactccggctaaaccaacgccacgagagctcaagcctctctccgacatagacgaccaacaaggactaaggtttcaaattccagttatatttttctatagacctaacctttcaagtgatcttgatccggtccaggtgataaagaaagccctcgccgatgcgctggtttactactatccgttcgctggtaggctccgggaactttcaaaccagaaactcgcggtggactgcaccagtgaaggcgttttgttcatcgaagctgaagctgacgtggcgcttgctgagctggaagaggctgatgctcttcttcctccattccctttcctagaagagcttctctttgatgtggaaggctctagtgatgtgcttaacactcctctgcttctcgtccaggtcagtccatagcttttcgttttttttttgttttgtttttttttgttttagagaagaatgaaacagagtttagtttgatgtaaaaggagttacgtgtaggtcacgcgattgaaatgctgtggatttatcttcgcactccgcttcaaccataccatgaccgatggagccggcctgtcgctctttctgaaatcactatgcgagttggcgtgtgggcttcacgcaccctcggttccacccgtatggaaccgacacttgttgactgtgagtgcttcggaggcgcgtgtgacccacacacaccgtgagtacgatgatcaggtgggaatcgatgtggtcgccactggacaccctttggttagccggtctttctttttcagagcagaagagatctccgctataaggaaactccttccgcctgatctacacaatacctcatttgaagctttgtcgtcatttttgtggcgttgtcggactattgcgttgaatcctgaccccaacactgagatgcgtctaacttgcatcatcaactcgcgttccaagcttagaaacccaccgctagagcctggttactacggacatgtgtttatcattccgcagcaatagcgacagatcgagatctaatagagacaccgcttgagtttgctttgacgttgatcaag

SEQ ID NO: 165899 - DNA, 3747 bp, Arabidopsis thaliana landsberg
atgagcaccaggggcaacgaaagttccggctaccaagcctccacccttgacgatatcaagaagctgcttcaagagctctccgacaagaccgagcgacagcaaaccgcagtaacttctttatctgataagttcgtttcttttcaggaacagtgcagtgggcagctcgcggcgctcaccaccagccattctgaaataaggacagctcacaacgcgtacgcagatcgagttgactttctgtctgccggagtgtcatgtacccctggagttcgctcacgccttgattttcaaggagacatcagtccgagcatccaaacttcacaggcaggagcaggtcagtagactccgccacctcagttacctctcgtctatcaagatgaagttggggcaactgcaaaccagaaccaggcggtactgactaccccggtaaatcccaaccttcctattgatggagttaccgcaccaactccatcattattttgagtagagccctcccttagacgtctgacctcagagtctccctaggagccggatggtgtaagaagtgagcttcaaaatctcaaagatcaaatttgggctatgaacgcaaaggtccaccgagctaccaccaaggttgatagagtaatcgaagcaacccgcaggactccgtttacttcgaggatctcgagacttctcatttgtgagttccaagatttcaagctcccgagctacaatggcgaaggagatcccaatgaacatttgacctcttttcaggttattgccgagcgagtacctctcgaaccgcacgaagaagacgcctgactgtgcaaacttttttcagagaacttgtctggaccagctctcacctggtttacccagttagaagaaggttcaattgataacttcaagcagctctccactgctttcattaagcaatacggattcttcatcaagaccgacgttactgaagcccaactttggaatctttctcagtccgctcatgagccacttcggacgtatatcactgcgttcatagagatcatggtccaagtgcctaatctatccaattcagccgctcagtccgccttaaaaaatggattgtggcatgagtcgcgtttcggagaatctctaatagtaaaccaacctgaaacaattcaagacgccctccatcgggcaacgaactggataactgccgaagaagaacgagctcttctggctaagaagtttaatgcttcgtcaaaatcttctcctgcgcctgtttcgaaaaaacccaccgaactccggaagcccgcagcaggaaccttctccgtagaaaaggagtcaccaaaatcttcgccaaaagcttctccatctaaacctcctttttctccaaagggcaaaaacggggcttttccgagtaataagtgggtcagtgacccaaacgcttattgtgatattcataaaatgaatggtcacgctaccaaagattgcaaagccctaggaagacttttggctgccaagtacgcatctggggaaatttccgaagtcgatgttacagcaattgagcaggcgcaagaggcgttggagtccgaaaaaacttcacccccgaacaaaaagcagaaaagcgaatccactcctgaaacctataagggtccgaagaaaatggtcaaagtagttatgggaggatcgaaattgttttcgtgactctattaatgcgatcaagcagcatgagaggaggacatttactccggtagcaaagaaaccaaaagcaagctgagttgactggcctgaaatttctttctctgaagaagagaccagcgacttggacaagccacatgacgatgcccttgtaattaagttggatatagcaaactgcaaagtgcagcgggtcctcatcgacactggaagttcagtggacttgatttttcttgataccctcgtacgaatgggaatctcgaagagcgatatacgaggtgccccaagcccactcgtctccttcacaagtgagacttcgatgtctcttggaaatataacaccccctgtcacggcacaaggagttgttaagatgattgaattcaccgtcttcaatcgtccagctgcttataacgttattctcggaactccgtggctgtacgaaatgaaggttgtcccatcaacttatcattagtgcgtcaagttcccaactcctgttggagtttaacaaattcttgggagttagcgcacttcgaggatgtgttatatgaccgggcaaaagctaaagatcaaatagcaaccacagctcgaggcagctccgaacccgatcaaaaaagtaggagatgacctcgtagagaaagtggttatcaatccagatcacccagatcagcctgttagcattggggccgaactaagcgaaaactttcgacgcgaactaattcaaaaaaaataggagtactttcgcttggactattagagaaatgaccagaatcagtacagaggtgatctcacacgagctgaacgtagatccaaccttcaaaccaatcaagcagaaacgtcggaagctcgggccggatcgtgccgaagccgtaaatgtcgaagtcaccagactcctcaaagcaggtttaattcgcgaagttacgtatcctgattggctcacaaatcccgtggtagtcaagaaaaagaatgggaagtggcgcgtttgtgtggacttcaccgatctcaacaaagcttgccctaaagattgcttcccacttcctcacatcgatcgacttgtagagtctactacggggcatgaaatgctctcttttatggacgcgttttctgcttataatcaaatcttgatgaatccggaggaccaggaaaaaacatctttcatcaccgagcgcgggacgtattgctacaaagggatgcccttcggagatgaaaaacaggggagcaacgtatcagcgtttagtgaatcgaatgttcaaagatctccccgggaaaactatggaagtatatatcgacgatatgttggttaaatcggccttctccccttcgcatctcgatcatcttcagcaatgtttcgatattctcaacgaattcggaatgaagctgaatccttcgaagtgcaccttcgctgtccctggggtatattgtcaccgaaagaggaatcgaagcaaatccaaggcaaataaatgcgttcttatcaatgtcttcacctcgcaccataagtgtctctatttttacacgttgcttcggaaagcaaataaggggttcgtgtgggacaagcgttgtgaagaggcgttccgccagctgaaaggttacctatccgagccaccggttctcgcaaagcctgagttcggagagcgactttttctttacatatccgtttctgaaaatgcaataagtggcgtcttggtgcgagtagagcgaagtgatgaacgacctaccttttacgtcggtaagtctttctccgatgtagagactagatatccaatgatggaaaaattggccttggctgtcgtaaccgcagctcggaatttaagaccatatttccagtctcatccaattgtggttttaacttcgcttccactttggaccatccttcatagtccaacccagtcggggagattggcttaatgggcaatcgagctgagtgagtttgatcttgagttccgtgcacggacaagcttgaagtctcaagttctcgcagatttcctgatcgaactcccattggctacttctgcatctgatgtcccaagtcaaccttggattcttcatgtagacggtgcctcttcaaaacacggttctggagccggagttcgccttaagtct

SEQ ID NO: 165900 - DNA, 2887 bp, Arabidopsis thaliana landsberg
  unsure (1)..(2887): unsure at all n locations
gctatatatggtaaaaaaaccttcatatatttaattttttgttcagaaataacattactagtttttggccactgatacaacaaaataaaaatctcctttaaatagtagaaatatatattctaaattggaaacagcaaacccaaatataatgatttgattttattattaaatttgtgtaagattaacatatatatatatatatattttattgtataaagtacggttttaaaaattaataactcacaagatcatgacacgtggttatttgaacagtctcagatttcaacatatattaaacagattttttttattcaaaaaaacattatatggaaatttgttttaaaaaattaaagaagataattataagaaaactcccgaaggcgcttcatattgctttagtgatccgccgaaacaaatatgggctctttcaaagattcctacggtaccaagggttttttctcacttcttccatttatgcaaatttggatcatttattctcaagaatccctttagaatttgattcatctgcatatccatggataatttggtatatttggaaagcaatgaatgaaaaagtgtttgaaaatgtggataaggacccggtagacgtgttatgtttagcagaaaaagaggctcatttttggcaggtaactcaagtagagttcaatactgaaaaccaagtctcctttcgttcggaaaaccaactacgggtgagggatatcacaagacattgtgtactctggcttccgttgttttgtggacagttcatggaaagaaaacgacaagttttcaggtctaggttggttttgtactacatttaatggagggacgtcaacaatgggagctgctaatctacgtagaagtctttctcctctccataccgaagtcgaagctttactctaggcaatgaagtctatgattggttccgacaaccaagaagtaccttttttaacagactgttcagacctggtgaagatggtgtctttcccaaccgaatgaccagcatttacagcgtatttggaggagtttcagagcgacaaggaagagttcatttctttttctttatctttaatttttcgtaatgcaaatgttaaggcgaacaatttggcatgaaaagttcgtgttgaaccgcttcatatcacttatgtaaacatttttccgtatttttagctcgtctgagccttaaataatatctcatgacagaataaaaataaaaattaatgagtgtttctgtaaatgacaatacctaaatcgaacaattgagattagtttttataaagacatgaggtcacataaagctaaagaaacacaattgaagatagttaaacactacagcacaatctttgtaaatgattataggtttaccgggtagaacacaaattcgtctcgccaaggagagaagcacacgttttgatcaatttgtaaatttatggacattatatgcgaagtggaattttaacttcgatgagttcaatgttaattcgttttactttgatgtgaatatcgcctaaagtcctaaactattgtcatgttgtatatatacatatatttaataaatttaaaatttatccaactcaagttcctttgaattttcattagagctttaccacatagcaaaattttcctcgatgcaaactaaacaactcgtgcatcgttcaatctcagcttctattatgtataacnnnnnnnnnnnnnnnnnnnnnnnnnnnnnnnnnnnnnnnnnnnnnggtcttttctaactccctttttaatatgatgatatcctctttggacttacatgttcaactccacaaattattattggactctttctttaaaaacctcatactagttgaagttggagttggcttatatattagaaatttctttttttaacttccgatatgagaactttactttgtaccaaacaatctccccttcaaaccaaagaccacgagcttgggtctcctcttcaacgaaactttagcacccttaacttggcaccttcttattcgtgaaattcttgaggcaccttcttatcgtgtcatgtttgataaattctcccacactgatcatagcctaagccctaggtccattttttcaacctaggctctaataccatttaatagcttttctaagaccattccaacttccatttagtatgacattgtcctctttgagcttacatgctcaagcccgcaaggatttgttattggacttctttccaaggccttatactagttggagttgaacttgccttatatattagaaactatttttctaaactttcgatgtgggacctttgatttgtacccaacatgactcaggtctagaccagactgccatcgatacacttcccgtgttcctctatggtgacgtaaccattagtcttcaagagccattagttttacgtgttttagtagaaaagagagtatatttgtctattatgtcttttttttttgggcaaattataatttcattacgaaagaaattaaggtacaaagtagagacttaaggcctctttagccagagcatcagctcgaagattttgggtacggggaatgaaattaaaggaacaaacaaagaaaaaaactgatagagaaaggatatcgaagatgatcccgtgaagctccttaacttggagcttcttgttgattgctttgacaaaggtgagaaagtcataagcgaaagagatggatttgaaacccgacgcgatggcaacttccatggctatgagagttgcaattcattcggcaatcagaggggagcccatgttcgcagcagaggtagatccatcaaaaagtctatgaccagtgtcatcaagagagatccatccgaatccggctgtaccattagatttcctggaagcatcggtgaagcacgtaaaatccacatgacgcgagttaag

SEQ ID NO: 165901 - DNA, 1236 bp, Arabidopsis thaliana landsberg
taaagggttttgtaataagaagaacgagaggtgaatgattacggttgaccttcatttcgtttctccccatttgtgtggattgccctttgctcatctaacctgagaataacaggttccttgtctacgagtatatggaaaatgggagcctgaaggatcatctacactgtatgctcatgattttcagattgcattcctctgttttagacttgactaagaatcttgaacgttgttattcctctctgcagccacggaaaaatctccactaagttgggaatcaaggatgaaaatcgcaattgatgtggctaatgctctggtaaatttccataaaactgatactctagtctatggtttatattattattactgttcttagttcttaactggatatgcttcctttcctgcaggaataccttcacttctactgtgaccctcccctctgtcacagagacattaagtcaagcaaaatatactcgacgagcactttgttgctaaggtgcgtctgcatcctttcacatcaactggtcactgacttatcaattcgttttacctcttaaagaattgacctgtgggtgtggggttatgtggtgcagcttgcagattttggccttgcacatgcttctagagatggctccatttgttttgaacctgttaatactgatatccgcggaactccaggtcaggatactaaggaattaactactcttgaaatattgagcaaaatctaaaaccatgaaatctgaatttcaggctatgtagatccagagtacgttgtaacacatgaactaacagagaaaagcgacgtgtacagctacggagtggtgttgctagagatcataactgggaaaagagcggttgatgaaggtaggaacctggtagaactgtctcagcctttgctggtatcagaatcaagacgcatagatctggtggatccgagaatcaaagactgcatagatggagaacagcttgaaacagtagtggcagttgtaagatggtgcacagagaaagaaggcgtggctaggccatcaatcaagcaagttctgaggctgttgtacgaaagctgtgatccgttgcatctcgggcttgcaatggcagttgaagagaacaaaggacggtcactgagaggtgactcagggttccaaagtggagacatccgtggcttggcttcttcctctagtactacttcaaggtcgcattgtagccggagttttctgcttgagactggctcccctcactctc

SEQ ID NO: 165902 - DNA, 1365 bp, Arabidopsis thaliana landsberg
atgcaggagataataccggattttcttgaagagtgtgaatttgtcgacacttcactagccggagatgatctatttgccatcttagagagtcttgaaggtgccggagagatatctccgacagctgcatctacacctaaagatggaaccacaagttccaaggagttagttaaggatcaagattatgaaaactcatctcctaagaggaaaaagcaaagactagaaaccaggaaagaagaggacgaagaagaagaagacggagacggagaagcagaagaagataataagcaagatgggcaacaaaagatgtctcatgtaaccgtggaacgtaaccggagaaagcaaatgaacgagcacttaaccgttttgcgttctcttatgccttgtttctacgtcaaacgggtatattcaatacatccatagattttactagtcagtatgtgagtttctggtagtgcccgactaattaatactattcgttcaactaatctttttggtatacctaactatcatattcatatatcatttcttagtaacatcaaaagtatcatgcatatctatgtttttttaggaataatgacaattataatgacattttggtcccactaatcatctctttttcttttctttcatttcatgtcacaatgagatatatagaatgttcatattgacttatattttctttatttcctcttaaaccaacctattaaaaaaagggggaccaagcatcgatcataggaggagttgtggagtacataagcgagttacaacaagttctccaatctttggaagccaagaaacaacgtaaaacctacgccgaagtcctaagcccgagagttgtcccgagccctcgtccttcaccgcctgttctaagcccaagaaaaccgcctcttagcccgcgcatcaaccaccaccagattcaccaccacctacttctccctcccataagtcctcgaacacctcagccaacaagcccataccgggccattccaccgcaactaccactcatcccacagcctccgcttcgctcttacagctcattggccagttgcagcagcttaggagatccacctccatactctcctgcttcatcttcttcatctccttcagttagtagtaaccatgagagtagtgtgatcaatgagcttgttgctaactcaaaatcggctttggctgatgtggaagtgaagttttcaggagctaacgtgctgctcaaaacggtgtcgcataagatcccgggacaagttatgaagataattgctgctcttgaagatttggctcttgagattcttcaggttaatattaacaccgtcgacgaaaccatgcttaattctttcaccatcaaggtacgtacgaataatcatccta

SEQ ID NO: 165903 - DNA, 5137 bp, Arabidopsis thaliana landsberg
  unsure (1)..(5137): unsure at all n locations
cgtctacaagagcccgcccgcatcgagcaagttcaggaagatgaacaacttccaggccctcccaagcgaagccgcaatgatgaagcacctgttccccgatgaacgattcacatgataatgggcggtctgacgtcttgtcgagattctgtccgttccattagaaattatcgtcgcaggcggaagtacaacgcggcttgatcgccagtagcacacctgcggttgacaatactaaaccaatcaccttcacagaggctgatgcagctggcctaacaggaccgcataatgatccactcgtcgtcgaactcataatcgatgaaagcaatgtcaccaaggttttgattgacattgacagctctgtaaatgtcatctttaaagatgtcctcatacagatggaggtcgatctgcgtgcaaccgaacacaatgttcagccgttgactggatttgatggagacacggtgatgacagtcggtacgatcctgctcccggtttacgttggaggcacaatgcattgttttaactttgtcgtcgtcgataagcctatcgtttacaatgtcattctgggcacaccatggctacataaaatgaaggctgtcgcatcaacttaccatcaatgcctaaaaattcacgaccacacgtggaatctacactttgcgtggcgatcctttaaccgcgcgcacatgtttcatcgttgaaaagcagcttcgcaacgcaagagcttttgttgttaccggacccacctagccacgagatgctagactggctccacgcaccgaatccgtcattcaggtcaatattgacacgactgatcccactcgttgtgtcggtgttggcgtggacctcccactttccctcaaagaggaactagtcaagttcctttgtgataatgcagcaatgttcgcatggacgatcgatgatatgcctggaattgatcctgacgtcacttgccacgagcttaacgtcgacccaactttcaaaccgattaaacagaaatgaagaaagcttgatcacgaccgtacaaccgcgataaatgaggaagtagcaaagttacttaacgctggttctattgtcgaagttcgatatcccgattggctgagcattcccgttgtcatagaaaagaagaacggcaagtggcgagtgtgcgttgattttactgatctcaacaaagcttgtcccaaagatagtttcccactctcacacatagatcgtcttgtggactcaaccgccgcgaatgaattgttatccttcatggatgccttttcgggatataaccaaatcatgatgaatccggaagatcaagagaaaacttcatttatcacggataggggtatctattgttacagagttatgccatgcgggttgaagaatgcaggaccaacttatcaacggttggttaacaagatgttcaacgagcatctcggaaaaacaataaaagtctacatcgatgatatgctggttaagtcgttgaaaaaggaagaccacgtaaagcatctggaagagtgtttcgcgattcttaaccaatatcaaatgaagttgaatccggcggagtgcacgtttggagtcccatccaaggaatttctcggctacattgtcacgaaaagaggaattgaggcaaacccaaaccaaatcaacgcttttctcaacataccgtctccgaagaatttcaaggaagtacaacgattaaccggtcggattgtagcattgaatcgttttatttcaaggtcgaccgataaatctttactctcttatcaaatcttaaagggtaacaaagtatttctttgggatgaaaagtgtgaggaagcattcggacagctaaaagcgtatctgacttcgccgcccgtactgttcaaaccagaggtagacgaaaaactttatctatacgtctcagtttctaatcatgcagtcagcggagtcttaatccgggaagaccggggggaacaaaaaccaatttattacgtaagtaagtttatgacggaccctgaaaccagatacacaatgatggagaagcttgcacttgcagtagtaatctcagcttgaaaacttcgtccatattttcaatcccatccaatcgaagtataatcaaatcagccacttcggactattctgcatagcccgaaccagtccggtaggttagcaaaatgggcggtggagttgagtgaatacgacatagagtacaagaaccgagtcgccatgaaagctcaggtcctagccgattttttaacagaattaccggtacccggagagaaggaacaacctcaaaattagacttgaagctacatgttgatggatcatcatcaaaaaacggatccggagtgggaatcaaattaggaagtccttgaacagtcatttcgcttcttattcaacgcattcaataatgaagcagagtacgaagcattaattgttggacttaggttggcacagggagttggggctgatgaagtggtcgcctactgtgattcgcagctagttgttaaccagttcaatggagattgtgaagccaaagattcaagaatggaagcatatctcgaagtagttaaagatctggctaagaacttcaagaaattcgaactcattcgcatacctcgaggagaaaatacaactgcggatgcgcttgcagcgctggcgtccatgtcagattctgaggtaaaaagagtcattccagtagaatgcatttcggaacgaagcattaaggaggagaaagagaacctcgtcataacaaggtctcgacctgcggcacgtgatcgtggtgagcttgatatagagttaccacctgtcaagcggaggaagtcaaaatgttcaaccgtttctgatctcggcgcacctaaagaaagcataagcgaggagccctttgacctgacagaggatgtagttccagagacaattatagagactgagccaccaatcgaggaggatatcctcgagccaaatgagcatcccgaaccggaaccacgagtatttcacgaagttgaccaaatttcggttaaagattggggggctgattggagggagccaataaagcattacattatgacaggcgagctcccaaagaacagatggcaagctaggaaaatgagaatcgttagcgcgaaattttgtctatcaaagaattctttgtataaacgaggtgtaagtgatccctacttactttgcatttttgggcccgaagtcgagatcgttatgagcgaagtacatgaaggtttgtgtggaagtcattcctcgggaagggctatggctttcaagatcaagagaatgggatactactggcctactatgatcacggactgcgttaagtatgctcgacgatgcaaacgttgccaactccatgcaccactcattcatcaaccttcggagttattctctttgatctccgccccataccctttcatgagatgatcaatggatatcattggaccattacataggtagacccggggtgtacaatatttactggttctaactgattattttttgaagtggattgaagctgaagcgtatgtaaatattaaagattcggcggtaaagactttcaattnnnnnnnnnnnnnnnnnnnnnnnnnnnnnnnnnnnnnnnnnnnnnntgacaacggaccacaatttatctcacacgagtttgaagcattttgctcggactgggggattaaggttagttattctactccgcggtatccacaagggaacagtcaggccaaagccgcaaacaagacaattctaagtaatcttaagaaacgtctaagtcatttgaaagggggctggtatgatgaacttcagccagtcttatgggcatatcgcacaactcctaggcgctcgaccggagaaaccccgttttcattggtgtacgggatggaggcagttgtaccagccgagctcaatgtaccaggacttcgtcgaatggaagctcctttaaatgaaaaagagaattctgcaatgctcgacgattcgctggataccatcaacgagaggcgagatcaggccttgatccgaattcagaattatcaacatgcagcagcacggtattacaattcaaaagtcaaaagcagacctttctttgtgggcgattatgttttgaaacctgtgttcgatgacaggaaagaggaaggagcacgcaaactaggaaatcctcctcgtcttgtaaaacacctcgaccccttgactggcgatgtcaagaatgggcatcatacaatccgggatgcaggcaaattctgcgattccgagttcgatccagtctccggggtgagagttgagggtgtgtaactcccttaatatcacggtgactctccgcagcatttggttgatcttctttcgaagtttcttcttttccgttgatcgtttttttgttgagccgcgagagctttgataaaggacatcgcgatgtcctgatctctgcccccaagccccttgattaacgcacacggagctcggataagggataagaagttgcgaagtggggagcgtcctctgtctggtacgttcggatgtcctcatcgatcatcccgaggctcgaaaagtctggcatggattccgagcatcggaggttgaaggccataactgcgaaagaaaagagcggtattgttagtaaggaatgaaaagaaccctagagaggaaatttatagggaggtctcttagctttcagagatgcgactccatttaaagccggagtgattcgcggaagcattcacgtcgctttggtcgccctgcattcaaagagtatctccaaaacgaatatttgatgaatcaaggaaaattaggtaggtccatgcgaaaataaaaaaagagggtttttagtctcagaaaacatttagggaaggggctcaggaacaagctccttcatcgccggttcggggttcgaagtggacgcctcgtttttgtcgtccacgtcgggttcattcttcacgcgcttccaggggttactgtcctcctcctcgtcgtcaccgtcctcactgtcagacgggatcacttgaaccggaacgtttacaggaccggagacttggcctcgagcacgaaggtacatccggagcatgtgcgggatcttcgccacgcagtcgaagttcctccactcccattgaaaagggtcgctctccatagcccttatcttcctctcgatacgggcaattcgggcctctagcgtttgcctcttgaggcc

SEQ ID NO: 165904 - DNA, 3371 bp, Arabidopsis thaliana landsberg
atggtgacaaccgaatcaagctcgaagaagagtgttaataaccaaaccatcatcgatgctatcactttacgattggagaatataatagatgtcaagcttaagccaatcaacgatcaacttaaagcaaaagggaaagcacccgatgaacaagttgtaatctcggaaggagagcaatctcaaagggagatgaaaagtcaaaccaaggacccaaagaaggacctagttgacccaagagctcaagaatattacagcagccacggtcactcatctcaccggagtaaccggagaccaagacgtgcgagagaagaaagatatcttatggttttgaatcttggtggctatcagatgaagcttccacctttccatgggaagaatgatctggatgcctatttggaattggaaaagaaaatggaactcgtattcaattgtcaaaactatgccgacgttaaccgcatgaaggttgctgccactgaattctacgactatgctattagttggtgggatcaaatcgtcactacaagaaggcgtaatggagagtatcctattgatacatggcaagggttgaagcttctcatgaggcgtaggtttgtgccaagccactatcatcgtgaacttcattccaaacttcaaaagctcgtccaaggtactcgatcggtggaagactattaccaagagatggaaactttgctgttgcgcagcaatagaggggaggatcgtgaagcgactatgtcaaggttcttgggaggattgaatcgagaaattcaggaccgtgtcgagatgcaacattacgaagagttagaggcgatgctacataaagctatcttagtggagcatcaagtcaagagaatgggttcctctcgggcaaattatgattcaaaccgaccaagctatccaagagatgtcaagccagccttcattcccaagagcgagcctaaaataatgccgactatccaagagcgagacaagaccaagcccgatagcgccaccactactaggacccgtgatattcgacgcttcaagtgccatgggcgtgggcactatgctaatgaatgtaccaacaagagagtaatggtcataagggagaatggcgagttgtagtccgaaggcgagttcgtgccaaaacctgattcgtcaccgaggagtgtattgctaagccagctaatggaaagctcttgatgtcaaggaaagtttctaaagatttggaagaggaacaagacatgacctcatccccggatgaggatgaagaacagttcggagaactttacgtggcaaggaggactttaagccttcaaacccgaaccaaagaagaagagcaaagagataacctatttcattcccggtgcatcgtcaatgagaaagtttatagcttgatcatcgatggaggaagctatacaaatgtggcgagtgaaacaatggtccgaaagctcaatttgaagcagtaaaagcatcataagtcgtacaagttacaatggcttaacgatgatggagaaatgagtgtgaagaatcaagtggttgtacccttagcaatcggaagctaccatgatcaaattctttgtgatgtgttgctgattgacgccagacatatccttctaggctgaccatggcaatcagatcagatagtgatccatgatggcttcacaattcggtactcattcatgttcaaaggcaagaaaacgaccctcattccattgacaccacaagaggtatatgacgatcaaatacaactctcggccaaggaaacaaaagtccgtaagcaacccaatttctttattaaggctaataaggttaagcaagctatgcactccaaacgacccatcttattgtttatttttaaagaagcactaacatctttggctaaccttgcacaggccgatccgagtgagttaacttttcttttacaggattataaggatgtgtttcccgaagacagccccaacggttaccacctttccgggaatcaaacatcaaatagactttgtcccaggagcaacacttcccaaacgtctagcttatcgtaccaatccagtggaaactaaggagttgcaacgacaactcgacgaactcatggctaaagggcatgagtccatgtgtcgttccggtcctacttgtgccaaagaaagacgggagttggcgtatcgttgattgtcgggcaatcaataatattacattgaagtatcaccaccctattcctagacttgatgatatgcttgatgagttgcatggttcatgcattttctctaaaatagatttgaaaagtggttatcatcagattaggatgaaagaaggagatgagtagaaagctacattttaaaacgaaacatgggttgtacgaatggttagttatgccattcgggttgacaaatgcacctactatattcatgcgcttaatgaaccacatccttagaacattcataggtcatttcgttgtggtttatttcgatgacattttggtttatagcaagagcatggctgaacatcttgatcatctagaatcgggcatgaatgtccttagaaaggaaaaactctatgccagcctaaagaaatgcaccttttgcacggataatcttgtgtttttaggctttgttgtgagtgtagagggagttaaggttgacgaagagaaagttaaggctagtagagattggccgagtccaaagactgtggtagaagtaaggagtttccatggccttgctggaatttataggcgatttgtcaaggactttagtaccattgtcgcaccactcaccgagattatcaagaaggatgtacgattcaagtgggaggaagcacaataagaagcgtttcagtctctcaaggataaactaactaatgcacctgttttgatattaccttactttcttaaaacgttttagattgagtgtgatgcatcaggtataggtattggagctgttctaatgcaagatcaaaagcctattgcctttttcaattagaaacttggaggagctatgctaaattacccaacctatgacaaggagttgtacgccttggtccgagctcttcaaacgtggcaacactacttatggcctaaggagttcgtcatttacactaaacatgaaacgctaaaacacttgaagggcctacagaaacttaacaagagacatgcgaggtgggttgagtttattgagacattttcctacgtcatcaagtacaaaaaaggtaaggataatgtagtcatcgatgcattatctctgaggtacaccctactctctactcttaatgttaagcttatggattttgaacaaataaaagaactttatgaaactgaccatgattttcaagaggtttataaagcttgtgagaagtttgcttcaggtcactattttagataagatgggtttctcttctatgagaac

SEQ ID NO: 165905 - DNA, 2216 bp, Arabidopsis thaliana landsberg
  unsure (1)..(2216): unsure at all n locations
aacttcaacacacgttacctaattgatgctacagctctgatagagaatcttgcttttagcaacatcactaagaacacagacttcgagtggaagaagattgttggagctgttttaggcaatcagatggcagaggtgaatgctaagctagatttggttcataacttgcttacaaggaagaagcatgtccactttgcagctgaagatgagactattgagcctgagactgagtctgaagagggagtcttctacatcgatggtcagagctacatgaagtttggacaaccacaaggcaacttcaatggcaacaggtttacagggaaccagagttcctccaactatactcccaagccggctttctagaagacctttccttagagcaacttttagaggacctatggtaattcagcctaccaagccccccccccccctccactctcatcagagacaagaataaaatctatacttgagcagattcgagagagcaaaacaaagctcgttgtggagtttaatggcaagtttgatgctgtctaaacaaatcttagtgggaagatcgacaatctgagctctcacttgaataagctggatgtacaggtagctcaactgcacaatcaatcaagagacaagagggctttcttcctggtaatcctgatgctaaaccaaggaagagctgtaatgccatcttgatcatagaaggggatgatgtgtgggaagaattggacactgaagacgagttggagttcgcagttgcagatatggtgtcgaccgacaccttccagtgtcgatcgaccaccggacctgactttgttttcaaaaacggttcctcacgagggtgtcgatcgacacacctttagcgtcaatcgacattgggtccagactgcaccatatgagggtgaatcccaatgaagcccgaggctgcttacactcctcatgtcccttatccgaggtagcgtcgttttaagcattagattcatgctgctaagtgcaccgccatcatggaaaggatcctcacttttcttcctcaggatgctttagagacatcttctgctccactcaacaagtatgtcaagcgacttgttgacaatggtattagctctaatgaagataaattgctgacaagggacatcagtgcaatcatgctgcctaaggtcaagaaagagaaggcacagagagtggacattgctgagtacatccgcactatcactcctgatcagaccattgagatgctcccggatccaggtagctttgttcttgattgctctatctcctcacgcaggttcaaccgctcttagtgtgatctgggatcaagtatcaatgttatgcctaagtctgttgctgagagactaggcatggctaactataggccgactagaatcactatcctctttgcggatcgttccaacagagtcgctgaaggaattcttgaggatgttactgttaaggttggcaactccctaatccctgcagattgtggtcctgtactacgagaaggaacccaagaatcctcttatcctttgaagagcattcctagttatagctggcgctaggtttgatgtgaagagaggaagaatctctctcaaggtttgtgattcggagatggagtttggcatggatggttcagagattactaagcctatcagttgcattgctttcagcacagacacacatcctcagactgatcagaatcccaccacagagccacacacaacgctcccatccgcccagctcgcaaatgagagttgcagggcaacagtgtcgatcgacattactacctctnnnnnnnnnnnnnnnnnnnnnnnnnnnnncgatgattctgcacattctgttcagcccacaccacttaaggacctatgtgataagttttcttctctctcttctcctgttttatctttgattaattctttggattattcgaagactgtttcacaagataacaaacctagagttcctggaaagcttgtttctcctgttgtttttgcaggtgacaagaagagtgtcgatcgacacacctctgagtgtcgatcgacaccagaagctgctccaaccagatccatttacacaccgccttagaaggcgaggatgcagcagcatattcctccaccactccacccacatcttgaactccgccaagtcaagctattgactctaaacaacgcttagtgggaggcagcccaatagtttgattttccttttatttttcttttatttttcacgcttac

SEQ ID NO: 165906 - DNA, 2091 bp, Arabidopsis thaliana landsberg
  unsure (1)..(2091): unsure at all n locations
gtgtgggctctgctttctttgatgtgaaatacgaaggagacaagctgtttgttggtagagtatttaagtccaagtctgattgcaagaataagatagttatacacgccatcaaccacaagtttcacttttgaactacgcgttctactccaaagtttatgttgttgaaatgcatctcgaggacttgtccatggtgggtgtatgcctctaaggttgattcttctgacagctttcaagtgcggcatgcaaatcagagacacacacgcactattgatcaaaggtatagagaccaccggttagcaacaactcaagtgataggcgagcttatgcaatctcgctttcttggtattaaacgtggtccaaacgctgcagtgattaggaagttcctacttgacgactatcatgttagtatatcatattggaaagcttggcgagctcgagaggtggcaatggagaagtctttgggatctatggccggtagctatgcacttattccagcttacgctggactccttcaacaagcaaacccaggcagtctctgctttacagagtatgatgatgatcctactggtccacgccgtttcaaatatcaattcatcgcattcgcagcatcaattaaagggtacgcatttatgcgcaaggtcattgtagttgatggaacatctatgaaggggtgatatggtggttgtctcatctgagcatgttgccaagatgggaattttcagatcttcccactggcttttggaatcgttaacagcgagaatgatagtgcatatgaatggttctttcagcggctcagcattatagctccagacaatccttatttaatgtttatatctgaccgacatgctagcatatacacgggcttgagtaaggtgagaaacaacattgctttgaagcattgtgttatatagtataccgctagatatgtacttattctacatatagaatctggttcacaattgacaagtacagtttgattttttgtctttggcatcaggtctatacgtaagccaaccactctgcttgtactgttcacctttggcggaatgtcagacatctctacaagccaaaaaacctctgctgactannnnnnnnnnnnnnnnnnnnntttcatgtcactgatttcaattggatttttctcaagatacaaatattaaacccaggatgtgctgcctatttagttgatttgggtacgtttgttttactctctattattatattgttcagcttccatatagttatagtaaagtggttgacatgattgtaaattacataaccatgtatgttgtaacgtgtatagggttttcagaatagaccagagtgcattcaaaaggtcggcgtttcaatattatggatagtaacatatgtgagtcgtgaaacaacgtttttagagaggcacgcgagtacccgcttatttgcatgctggagtacataagaacaactttgatggattggtttgctattagaaaggatcaagttgaagactgccctaccactttatcttcgagagtgcaggaaagagtataggaaatctatcaagccgtcatgtcaatgtctgttaagccgatttgcaactttgagttccaggtccaagttcggactggtgaatgttttattgtcaaattggacgagtctatttgttcttgcttggattttcagggtttagggataccttgtgctcacgcaatagcagctgctgctcggcttggagttccaacagattctttagcagcaaacgaatatttcaatgagctagttaaactaagttacgagggaaaaatctatccaattcactctgttggtggcgaggtcgcacccggaattgcttcaggcactacaggagaggtgcatccaccattagtgcggcggccaccagggagaccaaggaaactcagaattctgtctcgtggtgaattcaaggcaagtttaaaactattaatatatcatagtccattctactttgtgtacttttaaaaataccacagctgatatactgctacttttcagcgcaagaagaccggttcacagaggaggtgttcacgttgttgtggcaaaggccacaacaaagcctcctgccgtaatgctatctaa

SEQ ID NO: 165907 - DNA, 2602 bp, Arabidopsis thaliana landsberg
atgaattcttcattttttcttggcacttttgcagctgcaataggcttctttactctttttagaaaattcagattacaacaaaataacaaagaaattgattcttctactatatcttcttcatcagttccttcatcatcttcgtcccacaagtggacacatcaagtctttccaagcttccgtggggaagatgtacgtagaggttttctcagtcatattcacaaggagtttcaaagaaagggaattacaccattcattgataatgagatcaagagaggagaatccattggtcttgaaatcatacatgcgattagagaatctaagatcgcgattgtcttgctctccaaaaactatgcttcttcatcttggtgtcttgatgagttggtggagatcatgaagtgcaaagaagaatttagtcaaatagtgatccccattttctatagagttgatccatccgatgttaagaagctcacaggaaattttgggaatgtcttcaaaaataattgtgttggtaaaactaatgaggttataaggaaatggagacaagctctggcaaaagtgggaacaaccactggttacgattctcgcaactggttcgtccttctgaacatacgggcttaatcctttttaacacaacaaattatatatgtgtatctacaaatatttatgatctcccatatagaaatttatatattttaaatacgtacttgaaattttcatgactatattatgtatttattgataatccatcttaattaggcataatgaagcgaccatgattgaaaaaattgcctctgatatattgacaatgctgaattattctactccatcacgtgatttcagcgacttaattgggatggaagcccatatgaaagcaatgaaacggttgttatgcctagatctgaatgatgtgaggatgatagggatttggggtccgtctgggattggtaagacttccatcgccagagttttatttaaccagtttaatgacagttttgaactaagtgcttttgtggagaatatcaaagagttgatgtatagaccattgtgttccgatgactacagtacaaagttgtacatacagagacagtttattgctcagctaaccaaccataaggaaatcgagatttgtcatttaggagttgcacaagatatgttacacgacaagaaggtgcttgttgttcttgataacatcgatcagtcaatacaactagatgctatcgcaaaagaaacttgttggtttggtcaaggaagtcggattatcatcacaacgcaagaccaaaaacttttgaaggcacatgatggcatcaaccatatttacaaggttggttttccatcaacatatgaagcgtttcaaatattttgtatgtatgcttttggacaaaagttccctaaagatggtttcgaagatcttgcatggcaagttacaaaacttttaggtcatctacctttgggactaagagttatgggttcccacttccgaggaatgtctaggcatgagtgggtaaatgctttaccaaggttaaagattcgccttgatgctagtattcaaagcattttaaagttcagttacgatgccttatgtgaggaagataaagatttgttccttcatatagcttgccttttcaacaatctagaaatggtgggagttgaagattatcttgctttaagtttcttggacgtgaggcaagggtttcacctcttagccgagaaatctctcataaatcttaagtttttatctactaagtatacacgtatagagatgcataatctactagtgcaattaggtagagacattgtccgtcataagcctgggcaccaatccatttgtgagcctgggaagcgtcaatttttggttgatgctagagatatttgtgaaatactcattgataacacggtaagttatgttatcagtctctagtttccttgttttttacaaattaaattcattcaatagctaattatctctcgtcttctaacttttttgagtctttttacagggcagaaaaaatgtgataggtatactttttgatataagtaacctatcatgccaattaaatataagtgagagagctcttgacggaatgccaaaccttaaattcttaagattccatgacccatatgacgacgagagtgataaattgtacttgccacaaggtttgaattatctatctcaaaaacttaaaatactagaatgggatcattttccgttgacatgtatgccttccaatttttgtacggagtaccttgttgaactaaacatgcggttcagcaaacttcataagctgtgggaaggaaaccgggtaagaaattgttatagagttctctttaattttcaactttttttgttgaagttcatctgtatagatatttgattttccttgcaccttttacgcttcaaaggagttttacaaaagcattacgttttgaatttaatcttggtgggttagaagtttttttttacatatttttcactaataaatgtggtcatttatattgcctttttgttttgtttttatagccgcttgcaaaccttaagtggatgtatttaaatcattaaaaaatcctaaaggagctacctgatctctcaacagccactggcctt

SEQ ID NO: 165908 - DNA, 890 bp, Arabidopsis thaliana landsberg
atgtattctctaattcttcttggaaaaagatttaccgagttgcaaaaatggcgtaatatgaaagcttcagtgaaacttgtgcaaaacgtaatctctgttttctccaattcattctcctctgttagtgctgatgatgtgatccctagagatgctcaaaaagagccgaaattaacggtctcttaccttgttgattcagtgggtataccgataaaattcgcagaatcaatcttgaaggaagtcagctcaaaggacaagtgcaatcccaattctgttctgaatcttctaagaagttatgatttcacagattctcagatatcaagcataattacgactgatccagaattacttatggaagatgctgagaattcccttggccccaagcttaagtttttggagtccagagaaattttaagctctaggctcaatgacattgttactagagttccgaaaatcttgaggatggaagaggaaaaatctatgatcacatactatgactttgtcaaaaccattacactaacgagttcgcgttcggacttctataaggtttgcgaactttatccatatattgaaaattctattaggaaggttattgagatgggttttgatcctttcgccccaaaaattttcgatgctacggtcgttgtttgcacattaagcaacgaaacattagaagaaagagtcaatatctatataacgttaggctttgatgtcagagatgtatgggaaatgttcaagaagtgtcctacttttctgaatatctcggagaagaagataactcagagtttcgaaacattgaagaagtgtggacttgtcgaagaagaagtcatctctatgttccagaagactccacaatgtattgatttttcagagctggagataactcagaattg

SEQ ID NO: 165909 - DNA, 356 bp, Arabidopsis thaliana landsberg
gatcgccctgccgcttatgttcccgctgatcgccattgcgggcggcctctatcttggctggatcagcttgacctcgctgcgccgcgcgctcgatatccgcaacgaagggctcggcgtctcactcagccaaggcgtcagcccggacatgcccttttcgcagaccttccggcagggcttcatggtgcagttgctcaatcccaagatcaccctgttcttcagcgccgtcctgccgccgtttctcgacattcaccggcccatgccgttgcagatgaccgtcttcgccgccaccaccatcggcatggatgtcatcgccatgacctcttacggtttcggcgcggtcaccctgacgcgccttc

SEQ ID NO: 165910 - DNA, 839 bp, Arabidopsis thaliana landsberg
  unsure (1)..(839): unsure at all n locations
atgatgaacggcataaagtcttcaccgtttaatatgccttaccttcctgatgatttactattgaacatcataggccgtgtctcgagattgtactacccgattctctccttagtttccaagagattccgctctctcgttggatcacttgagctttacaagatccgaacgctcctaggacgacgcactgagaattgtctttatctgagcttacgtttcagttatggatctaacccacgttggttcactctatgccgaagaccaattcgaacccctaaccctgaacctaaccttaagtcacgatggttcacatcctgctttagaccaatcctaacagatcgcacaagcaaggaagaaaagaagttaagtggaaatcttatggtctcaatcccaactagcaattattgtcctctgtctgggttgacttgtaacacaattggttcttatatctacatgattggcggatacataaattggattgtcggtctcacacctggcacgaagctccaagcatgcaggttgcccgaaagtccccactcgtgaatgttcttgacgggaaaatatatgtagtggaaggctgnnnnnnnnnnnnnnnnnnnnnnnnnnnnnnnnnnnnnnnnnnnnnnnnnnnnnnnnnnnnnnntgtgccaagccctagcgcggagatgcgtgggaggtatatatcaaaaggcttagtctatgaagaaaaactttacctgtttggggataaaaatgtggtttacaagcctaaggaaagtacatgggatgcgttagggcttgatatgaatttgtggttggttagctttggttctttctgcgtgaaagataatggatgttatatg

SEQ ID NO: 165911 - DNA, 571 bp, Arabidopsis thaliana landsberg; identical to SEQ ID NO: 67278
  unsure (1)..(571): unsure at all n locations

SEQ ID NO: 165912 - DNA, 1082 bp, Arabidopsis thaliana landsberg
atggatattctcgtatttactatggtcggtgagtggagaagcaaagaagaagaatgaaaatttgaaccaaaggaaggcatgtttggtcgctgtgtacgtgttaaggaaaacatgacgtacacagaatttgtacgtacactaagcgaggctttcagtttgaaatccactgagatcaatcccataattagttattggatgccgggaaagatgttagtgatgatagatactaaacgccctcctgtctacattgacagtcaagtggggttggatacgttctttatgattcgtggtaggtatccttctctcaacttgtttgtctctttcattacaatcgtcaagacactcatgaataatgtctttaggactcatggtgacgatgctgaaagtgaccgtgtttcaaatgttgatgaaaataatgaggtcgtagatgagcaagacgacgttgaagacgataaaacagatgaggatgaagaggagggggacaacgaagatggtgatgggtatgatgattatcagggtgacgatggatctatggggggaagtaccctcgatcctactattgatggtagtgaaagtagtggcgaagattatgattacaacaagtgaaacgatgtaattgtagaagaatatggaatagggaatgttgaggagaacgtcattctcacacaactgactgttcaacatctaggggaattcagtcgtctgttggcagagtgtacgtacacaagtcagcgtgtacctggcgaagataacatttcccacttgggtgaccgtacaccagctgtgactccaagaagtatgtgtcaacatggtttgtaccaatgtacgtacactatagattgggaagtgtttttaagaacagaaaagtcatacaacaaacaatgtcttatctcgcaatcaaacaatctttttgctacaagcaacctaggtcatgtcctataagattggagatggtatgcgttgatgatacttgtccatgacatttgactgctcaagtcgtcaagaattcagaatgtttcaaaatcacatcgtataaacgtcttagaatatatctcagccactgccaatattggtttaatatt

SEQ ID NO: 165913 - DNA, 501 bp, Arabidopsis thaliana landsberg
cgcgcgcgcagccaggtaccggtgctgttgctgactgcccgtgcagacaacatcgaccgcatcgccggcctggagctgggtgccgatgactatgtgcccaagcccagctctcccggcgaactggtggcgcgcctgcgggcgatcctgcgccgtgttcagccgcaactgatgggcgaaggcatggtgcccgaggcgcccgaacaggtgcgcagcggtgccctgaagatgtggcccggtcgccgcgaggcgcattggggcgctgccatcctcgagctgaccggctccgagttcagcctgctcgaagcgttggcccgccaggccggccagctggtcagcaagcaggacctgtcgctcaatgccctgggccggccgctgacccgttacgaccggcgcatcgacgtgcacatcagcagcatccggcaaaagctcgggccgcgcgccgatggcagcagctggatccagagcgtgcgcggcatgggctacatgctgatcgtcgaatga

SEQ ID NO: 165914 - DNA, 1959 bp, Arabidopsis thaliana landsberg
  unsure (1)..(1959): unsure at all n locations
atgtcgggagatcacaccaagagggagatggagaccggcgacaagcccactacgagccaagggagcacctcatcggaagagtcccgcaccaagaggaaggagaagaagaaggacccctccaagcggaaggagaaaagatcttcttcttctcaccacaaagagaagaaggaaaaatcttcttcccacaagtcacatcggaaaggcgacaagcacaagaggatgaggaaagtggtctactacgagaccgacacttcatcaacatcgaccttcggctccgatgcgccctccgtaacttctaaacgccaagagcgtaagaagtttagtaagatccccttacactatcctcgtacatctagacatactccattactttccgttccattaggcaaaccgccaacctttgacgatgaagattatgctaggtggagtgatttaatgaaatttcatctaacctcactccacaaaagtatatggaatgttgttgagtttggagcacaggtaccatccgtagggatgaggattatgatgaggacgaggtgcccaaatcgagcacttcaactcccaagccacaaccatactcttggcctctctaaatagagagaatacaacaaggtgcaagggttgaagaatgcaaaggaaatttgggacctcctcaagaccgcgcacgagggtgatgaactaacaaagatcaccaagcgggaaacgatcgagggggagctcggtcgctttcgacttcgccaaggggaagagccacaagacatgtacaaccggctcaagactttggtgaaccaagtgcgcaacctcgggagaaagaagtgggatgaccacgaggtggttaaggttattcttagatcactcattttccttaaccccactcaagttcaattaattcgtggtaatcctagatatactcaaatgacccccgaggaagttatcgggaattttgtgagctttgaatgtatgatcaagggctccaagaagatcaacgagcttgatgaaccctccacgtccgaagcacaaccggtagcatttaaggcgacggaggagaagaagaggagtctacaccgagtagacaaccaattgacgcctccaagctcgacaatgaggagatggctttaatcatcaaannnnnnnnnnnnnnnnnnnnnnnnnnnaaggggaaggattacaaatcccgttccaagaaggtttgttacaagtgtggtaagcccggtcactttatcgctaaatgtccattatcaagtgacagtgacagggataacgacaagaagggaaagaggaaagaaaagaagaggtaccacaagaagaggggcgcgatgcccacgtgtgccgcgagtgggactccgacgagagctccactgactcctcctccgacgaggacaccgccaacatcgccgtcaccaagggactcctcttcccaaacgtcggccacaagtgcctcatggcaaaggacggcaaaaggaagaaggtaaaatcaagatcctccactaaatatgaatcctctagtgatgacaatgctagtgatgaggaagataatttgcgcaccctttttgccaaccttaacatagctcaaaaggaaaaattgaatgaattggttagtgctattcatgaaaaggatgatcttttggattcccaagaggattgtctaattaaagaaaacaaaaaacatgttaaggttaaaaaggcttatgctctagaagtagaaaaatgtgaaaaattatctagtgagctaagcacttgccatgagatgattgacaaccttaggaatgaaaatgctattttaaatgctaaggttgattctcatgtttgtaatatttcaattcccaatcctagagataataatgatttgcttgctaggattgaagaattaaacatttctcttgctagtcttagaaaagagaatgaaaatttgattgctaaggctaaagattttgatgtttgcaaagttacaattgccga

SEQ ID NO: 165915 - DNA, 2576 bp, Arabidopsis thaliana landsberg
aaacatttctatgtgaagaaaaatagacacttacaaatctggttcgagccaatccttcaacctatcaaattggtcatcagaaacaggttgaagatgttcatgtaccggaagaagacgatggtacatcagtgattatgcgcttcactgttgaatttccttcatacggatatttctgagaacccgctagttgtggcactcgtctactcttactagtaacactgtccaaattatctagtccgtcttgaagtgctctcaatgcatcagctgttgccttattagccatctgatctagaggattggagaatgtttcttcagaacttgaagccattttcagattgtttgcaataaccttgtcagtgacatccacaacatcatcatcaaatgtctttgttgtcggagctgcaactgacttcttcttctcaggttttggactatctaccttttctaccttcacaactgtcttcttcatttcaggttttggtttttctaccttctctacattgacaattgtcttcttcttatcagattttgcaactttcttcttagtaaggaccattgtagcagctttcttgttcttcactgaattaacagccttcttaaccactctttgaataggcaacccatcaacagaacctgacttctcctctactacccaagactggaaaaaaacacagtacatatacggtttaataaaggcaaaattcaaatccaaagtgcaaaacatgtaaaattaaaaactgacatctacttacaggttgattactatttgcctcatggaaatgtggaaaaccaatcgaaaaatggaaaaaatcaaatggaaatgtgacgggttctaaagtttatttatactgaagtcgatacctccgctgttgttgtggctggagaagctgcttttgaaaggagtaaataagaaagtgaaaaccaacgatgaacacgattatcagcagttaagaaagggaaacccacaaccctaatgctgcaacaaatctacagatctgcaacaaaaatattaatcactatctgaatcaaacgaaactcaatcgatatagggacttattcaatcgcggtggttgcgggttaatagtttacctacaccaccgaagaagtgaatccgggccaccgcgactattccctgctgtttgtgtagccggaacatatggcggctacaaaagtttgaaccaaagaagagttaaacgccgttttgtgtgagaagaagcagcgacaaccggagaagagatatcgcctagtcgagcagcgaccaccggagagaggagccaccaccggagaagagaagttggcggatcgagaagccaccaccggagatttgctagggtttcgatttgaaatcaaagaaaaagaagagacatgcaatttttgggtttcgatttcgagagtcggggaaaacactttcgctttaggtttcagtaaatttttttattctttatttctttatttaatccattcttttattaatgattttatttatttttaatcaaagtcacatttttagtataattctggttataaaactgattagggttaaaatgtctttagatttaaaatgtgagtcattctagtcagccatcaattacaagagtcatttaagttattaatcctaagttatgagtcaatctgagcaaaattcagtgtggaatttgacaacacaaaagtctcgtctacatcaccaatggaggtgttcgcatatctcattttcttcgtctacaacaagaaagaaaacaaatactttaccattcaaggttcgtacatacatagcctactctctctatctatatatatatacacacatatgcattgattagaaatctttgtataaatatacgtctagatgttgaagtaaagcggttcaatgcattaagaacggtgtggggattatcacaagttctttcacttaagacattcaatgaccctgaaaatggatacacatttgagggagaacaatgtgagtttggtgttgatgtgatggttgcttcacccattaccaagtgggaagtcgtctcttttgatgagaaactcgatattctcaagttctcctggagtgttaaggatttctcggtgcttaaagaggagttctatgtatcagaaagcttttcaatgggaggaagattatggtgagtctataaaagtattatatatgtccatttttggtaactgctaaaacgtgcataataacgttttatagggatcttcaaatgtatccaaagggagaccctagaagagataaaaaaaatggttttttttgcggttatctggtagtgaaaccgtaacggtggatgagaagatttacgtgatagcacatctgcgagttcttgacccacgtggatgaaatcacttcactaaaaatgtatgctcttttgttagagcttattcatgagatcgaaaattgtagatgttgttggggttcttgacttatggattttaaagtgtcctgctcactttacaaacattactggttcagggaaccgaacaaagggtggggttatcttgaattcttgtctttatctaaacttcggaaatcatacttggacctagaagatactttttttttccctaaactt

SEQ ID NO: 165916 - DNA, 593 bp, Arabidopsis thaliana landsberg; identical to SEQ ID NO: 68839
  unsure (1)..(593): unsure at all n locations

SEQ ID NO: 165917 - DNA, 523 bp, Arabidopsis thaliana landsberg
attttctgtcagcctcccccgttccctgatatccacatgccttaacatttagctgctaaaatagtgagcttaatttctaaggacggtgttgatatgttaaaggcttggattcaatcacgacccgatggcaaaggcgctgtttttcaagggaaactctttcttctgttcgactagataagtcccttgttttcattcacatggctcatgaatcgtctagttatcacatgtttgacaccaaatgcatagccttcaaaaatctgtatgccctatatcttcagaagcaattgctattttggatgctattaaagacgttttctcacatgctggtctactttacatcatgcttcatagttgcggtggatcaatcacgtggcaattttatactcagtacaagcgacagtattataaatttagtgaagtcgacttattcgcagataagctaatgtttcatatcaccgaggttggtccacgtcgccaagggacatacaaaagttcctgggagtttgaggattaccgtgaagct

SEQ ID NO: 165918 - DNA, 586 bp, Arabidopsis thaliana landsberg
aaaccattaaccacacgcttttcttatgccatcctgctcgtcagatttgggcactttcacacatacctacggtcccaagaaaatttccttatgcatctatatatgcaaatttggatcatttattttggcgcatacctttggaatttgattcatcttcatttccatggataatttggtatatttggaaagcacggaatgaaaaaatctttgataatgtggataaagatcctctagagatcttacatttcgcggaaaaagagtcagacttgtggaagtccgctcaacttgagtttcacaatgaaaattttggttctttcaatttggaagatcgtaatcgagtgcggcacttttctttagacaacaattattccgacaagttttcaggcttaggatggtactgtacatcatcaactggagaggcaccaactttgggagctgccaatctcagaagaagtctatctcctttacatgccgaggtggaagctctcctctgggcgatgaagtgtatgattggtgccgacaaccaaaatgtagtttttcttacagactgttcagatcttgggagatggtgtcttctccaaccgaa

SEQ ID NO: 165919 - DNA, 3594 bp, Arabidopsis thaliana landsberg
ttaatttcctttttctgctgcgatacataagtgtttcaattgcaggtttcattacataatcaattctaccttcatgtacttgttccacttgaatccatccatgtctccaatccttgttgctcattatataccctttaatgacaagatcaaaaacatgtaacagattcttgtctttaagattcttttttgaaaccaagtggtcatattcatgagaattaacaccaactatgggtttcacttcaaccttcaaatatatccctcgcaaaatagcaaggacaatgtaaggactttgggagcagatatgagaacgtcgctaaatcgtcgcaaaatttgtgaggaatatatccctcgcaatttttttttcttcctcttctttttcttcttctctagcagaactggaaggaactcgttcgatccctaaatattcctccatccttccaactttgtacctaagaacttcacagttttcataaacaagtcttattttctcaccaaaggacactgattttttttttcttctgcgatacacaagtgtttcaactgcaggtttcattacacaaacaattctaccttcatgtacttgttccacttcaatccatccttgactccaatccttcttgctcattttgtaccctttgatcacaagatcaaaaacatgtaacagatccttgtctttaggattcttttgtgaaactaagtggtcatattcatgagaattaacaccaactattggtttcacttgaacctgcaaatatatctctcgcaatattacgaggtacttgcgaggaatttgcaaaccaaaaaccctagatattgctataatagagaagagattcgacaaaaagaaataaaatcgaacgaacccaaatatcaaaatttagtatcataaacttgttacattcaattgattcctttgctgagaaacggaatttcttcaaattgttctaaggagaagacacaatgagagagacgacagtttctctaatttttattttctttttgttactttcaaagtttctttttcttttttgttttggtttgatgtgaattttgcctttagtgaatttttactaaaacggtttgctttttcaaaaataagaggccctatgcccaattactaacagttaaagtgttaacattataataatttttcaacgctttaaaattcttttaaaaagctttttactacaagaaaacaagcgatttacgaggaacatttgcgattgaaaatgtccctcgcaaatttgctacagaattgcaagaagtttgcgatgaaagagaacaacgtcgttactccgtcgcaaaatttgcaacgaacatttctctcgcaaaattgcgagacgtttgcgaggaaattgcgtgaaaaccatgattcctcgcaaagacgtcgcaaatttgcgagggagttgcgagtaacagaaatcccttgcagattgcgacgcacttgcgacgcacaactattctgtagcaaattttgcgacggatttgcgagtcttcgcgggttaggtgaccacgttttaaattatcttaccgaactggttggtaggtaggattccctcgcaaattccttgcaaaaaacttttttcctagcaaatcttgcaatattttttgggaaatctataaatagcctacgtaacgtctaagaaatcataactcaaatcataacatttacttacaaacaaaaaaaatcttttcaaaaaaaaaaaacttcttacaaagataataatgtcttgggggtggagaacatgagatttacacattacgaagttggatgtacaatcatagagatcaagcgaccagtgaggtgacgagagagtattatgacggattacgcggtttcatgtatcaagcgacaaacaaaccatttgctcgtgagaacggtaccatattctgtccatgtcgtaagtgtctcaatgagaaatatttggaatatttaatgtattgaagaagcgtctttataatagtgtatttatgccaaactactatgtatagttacgtcatggactgtagagatagtgcaccaacctactaattttattaatgatgcatttcatgaaactattgctacatttcttgaaaatattattaaagaacccaatgtagatgcacaatacttttatgatatgttagatgctgcaaatcaaccaatctacgagggatgtagagaaggacattctaagttatcttttgcatctaggatgatgactattaaagcagataataacttaagtgaaaattgcatggattcatgagcagaattaattaaagaatatttgccaccggataatatatcggctgagaattattatgaaatacagaagttggtttcgagtcttggattaccatcagaaatgattgatgtatgcattgactattgcatgattttttggggagatgatgtaaatctgcaggaatgtcggttttgcgggaaccgagataccagactactggcggaaggacgcgagtgccatataaacggatgtggtacttgccaataactgatagattgaaacgtttatatcaatcagaaagaactgcggcaaaaatgagatggcatgctcaacatacaactacagacggagaaataacgcacccatcagatgcaaaggcgtggaaacactttcaaacggtatatcctaactttgctagcgagtgtaggaatgtgtatcttggcttatgcacagatggatttagtccattcggtttgtctgggcgacaatattctctttggcctgttatcttgaccccatacaatcttcctccagatatgtgtatgcaaagcgaatttctgttcttaagtattttagtgcctgggccaaagcatccgaaacgagcacttgatgtcttcttgcaaccactgattcatgaactcaagaagttgtggtatgaaggtgttcatacgtttgattactcgagcaaacaaaatttcaatatgcgagcaatgctaatgtggacgattagtgacttcccggcatatggaatgttatcggggtggacaacgcatgaaaaattatcttgtccctactgtatgggtcgtacaaatgcgtttcaattaaataaaggcagaaagccatgttggtttgattgtcactgtcggtttcttaccctgcatcctccgtatcgaaggaacaaaaaactttttaggaagaataaaatggttcgtcttcccccaccagtttatgtttttggaattgatttgtttgaaaatattgattattatggtgctcaggaaacctgcaagcgtgggggtaactggcacactccggcgaatatgcctgacgaatattgaagcactcacaattggcacaaacaaagtatcttttggcaactcccatattggaaggatctcctcttacggcataaccttgacgtgatgcacatcgagaaaaactttttcgataatttcatgaatacgcttttgaatgtgcagggcaaaacaaaagatagtttgaaatcaagattggacttggcggaaatatgcagcagacctgagttgcatgttacacgagatgggaaattaccagtttcgaaattccgcttgtctaatgtagcaaagaaggcgttgttcgagtgggttgttgctgaagtggagtt

SEQ ID NO: 165920 - DNA, 1608 bp, Arabidopsis thaliana landsberg
ctgagagctctgatgtcgcaaaaggcatacgatgcaacagagcggaactatctggagctgccggtttttgtcaatcccaataatgtcaccactaatcagcaatacaatcagctttccagcctcccacctacgatatacatcaagaggaacaacttgactgggactataccagtcgaggttgggcagctaaaggttctccatatcctggagcttctaggtaataatttttctggcagcatcccagatgaattgtcaaacctcactaacttagagaggctggacctgtccaacaacaatctctccggtagaattccatggtcactcactggactccatttcctgtcatatttcaatgttgcaaacaacactctcagtgggccgatacccacagggacccagtttgataccttcccaaaagcaaattttgaaggaaaccccttgctgtgcggtggtgtactgctaacctcctgcgatccaactcagcactctactacaaagatgggtaaaggaaaggtcaacagaacgcttgttttggggcttgtccttgggcttttttttggcgtcagtttgattttggtgctgctagctctgttggtgctttctaaaaggagagtaaatccaggagactctgagaatgctgaactggagataaattccaatggctcgtattctgaagtccctccagggtcggataaagacataagtcttgtactgttgtttggaaacagtagatatgaagtaaaagacctgaccatatttgagctcttgaaagctaccgacaacttcagtcaagctaatataattggctgcggcgggtttggccttgtctataaggctaccttggataatggaacgaaactggcggttaagaaactcacaggagactatggtatgatggaaaaggaattcaaggcagaggtagaagttctgtccagggcgaaacatgagaacctggtcgctctacaaggttattgcgtccatgatagtgcccggatactaatttactcgttcatggagaatggtagtctggattattggctgcacgaaaatcctgagggtccagctcagctggattggccaaaaagactcaacattatgagaggagcaagtagtggactagcatacatgcaccagatatgtgaaccacacatagtacaccgagacatcaagtccagcaacatccttttggatggaaatttcaaggcatatgtagcagatttcgggttgtcaagattgatccttccatatcgcacccatgtaacaactgagctagtgggcacattgggttacattcccccagagtatggacaagcttgggtagccactttgagaggtgacgtgtacagttttggtgtagtcatgctcgagcttctcacagggaaaagaccaatggaggttttcaggccaaagatgtcaagagaattggtcgcatgggtgcatactatgaaaagagatgggaaaccagaggaagtgtttgatacattgctgagagaaagtggaaatgaagaagcgatgcttcgtgtgcttgacatagcctgcatgtgtgtgaaccaaaatccaatgaaaagaccaaacattcaacaagttgtagactggctaaagaatata

SEQ ID NO: 165921 - DNA, 1933 bp, Arabidopsis thaliana landsberg
atgttaagattgattatcagacctaatgctgctggagtcttacgagacagagatggtcaggcatacaatgatgagggctagaaacttgatgaacatgggaacttgataccagaaatcgccgagggtgtcgatcgacacaacctgggtgtcgctcgacaccaagaagaaatcagagcagatggtcgtcggatgactcttggtgactacaagtctacaacagaccagatctcttaaaaaccaatcggtctgcaatacgaccacctaccttcgaaagaacagatttcgagataaaacatgcatactttactcttgtgagtatgcacccttttcatggtctaacacccgatggatcatatcgcttcagatgcagacttggattcgatggttcaagcacaaggtcttgcttgtgactatcttccctgcagctcttcccatattctcttgctagggaagcatcttcttggcttatgctgttaaagcctggatctctgacaacttggaaagcaataaaggttgcttttctcaataaattttataatgatgcaaggtctgaggagctgagaatgaagatctctaccttctctcaagaagcagctgaagcatttaaagccgcttggatcagattcataggatatcagagagattgcccgcatcatggtttcggtgaagttcagttgttaggtatcttcttcagaggagttgattgcataatcagatgtctttggatgcagctagtaatgggaatttcatgtcaagatatccagaagatgcaacaatgttgattgacagcttagattccagcattagtaccaaaagcgttgacattgcaaggaaaacgcaagttcagtatgttgcacaggttgacagtttatccacttcagagaagatgaatcaacagagatacatgagcttcaatcaacaatatacacatcagaaaccggttcagcaaactacaagcttcattcaggattatgcttcttcaacctaagcccaccctccacccgacaccactaagacgattgaatcaatgctcgaacagtttctcaaaggtcaaatgaagcaaataaccgatattgatcacaaattggttgctttatctgaagatttgtaagggaagattcaaatattgaacaatcaaataaagcaattgagaatgtatagagaagatgttcgtgttattgagttaaggagtggaaaacatctaaatccagtgcttcaacgagagcttcctgcagccaaaatcgttaatttagaagaaaatgatgttgcagtttttgtagaccagacaccagtgtcgaccgacactactgggtgtcgatcgacaccagccacggtagacactacagaacgtgacagtgtcgaccgacaccaacagggtgtcgatcaacaccaacccagcccaaacgtgcgaattctccaaaacccgatttcagttgcaggaagggctaccaaacccaaggttccatttcccaagagtcccaggaggtccaaacaagagcttgatgatgctagatgcaaaggtatgatggataagttgattgtagagataccacttatagatgttgtgaagtcttctcctatgatcagacagtatgtgaagaggatggttactaaggatttgcttcctgagaaagctgtgatgacgatgtctacacaggttagcgacattattcagaacaagattccatagaaacttccagatccaggtagctttgttctcaattgtggtatccttaacgagagttttgagcgatgcttgtgcaatcttggttctagtgtcaacttgatgccacgttcagttgcactttggcttggtttgacaaatttagagcctgcgcaaatcactcttgttcttgctgatcgatttgttcgtagacctgatggtatcctatgtgatgtacctgtacaagtcagtactagctacattcctaca

SEQ ID NO: 165922 - DNA, 1620 bp, Arabidopsis thaliana landsberg
gtggactttcaaataacaaagtttataaatactttgtagatatttttcctaattctaatattatatgaatacaatattttaggaaacaaaatacacatacatgtaactttattttttacggagatgcagtaaaatttgaagtgaaaatattaatgttagtcttaactaattttgtgtccattaggcaaaagagaactaacgacgtgctgcatacgagacgcgagcattatagtcaacacaacaatcaccaccaaattcctcccacgacaacccggagacttgaccataatgtacgacgtgatccgagcctacgaccagaactacctaactgaagtaaccatggaaaaccacaacccgctaggcaggcttgaccattgggagcttagtttcgattggatgcgagacgagttcatacaaaaaatgcaaggcgcatatccaacggtcgtggacgccacaaaatgcatctttggtcctcagtccctaatctacactggtctagatttcgctgacgttctcacatgtgaaagaagaccaatcatcatagacttgcctccaaccaaaaaagatgactctactttaggaaatattccttcttgctgcagaaacggtaccatcttaccacgtatcatggacccttccaaatcagtctccgtcttcacgatgcaagttgccaaaatgcctcctgatttcaaccgatccgcgcttttcccaccgcagaactggaggattaaagggacgctaaacccggattactcgtgcgggccacccgttcgggtaaccccgactttttatccggatccgagtggtatgccgaccaacaaatcatctttcgccagttggcagatcgtatgcaacatcacgcaagccaaaaccgagataccaaaatgttgtgtctccttctctgctttcttcaacgactctatcatcccttgtaacacttgcgcttgtggttgcgtttccgaaacgcgacgcacatgcagtgcagaaactccgtctcttctcatccctccagacgctcttctcttacctttcgaaaacagaaccgctctaacgcttgcttggaacgcactcaaacacaaaaccctacctaatccaatgccgtgtggggacaattgcggtgtatcgattaactggcacatggcgtcggattatagaggtggttggacagtgaggatcacgattttcaactggggagagatagattttcccaactggttccttgcggttcagatgaagaaaccggcgcttctagggttcgagaaagcctactcgtttaacgcgagtctccttagcgtggacggaggtgtaaacaacaccatcttcatggaaggtcttccgggtctagattatcttgtggcggaggctgatgaaaaagatccaaagaagaagaatattaggattcctggtaaacaacaatccgtgatacagttcagcaagaaactcacgccggggattaatgtggcggaacgtgacgggtttccggcgaaagtgatatttaacggtgaggaatgtttgcttcctgatctgcttccgatggctagtggtggcagacgaaatggggctatcacggttttgtcctttataacgttttatgttgcggcgtttatggttctattataa

SEQ ID NO: 165923 - DNA, 788 bp, Arabidopsis thaliana landsberg; identical to SEQ ID NO: 50019

SEQ ID NO: 165924 - DNA, 1539 bp, Arabidopsis thaliana landsberg
  unsure (1)..(1539): unsure at all n locations
ttcgctaaactctcacttatggttatggataaagtgtgccaatttttgcaagttaatcgcaccgctcgcatagatttcaagggaaccctagacaaaatctcttccatcaaatcccttggaagattagagatcatcgtcgccattgttgggtttttgttttcaccttcanaaccctattttccttttcctctgatttcttacgatctaaggaaaaaaagatatataatcaattgaagatacaaaggaaaaaccctaaacgaactaagctgggccaatcttgggcttccgaatctattaactacgagcctacacctcaagccaatcgtgggcttcagaatctattagccgaaacctttcagactgagaacgtcgtatctgttcttaattaaacgttgaagtctttgatacacctatcaggtatatgtcatccctgcttatggtttttccggtagagccaatgaagcaatccatgtgctcatcagaaaataaaatgctaaaacccatctgaataatgtagtttagagcaccacatattctatagtctcgaactaaattcttctttttttttacaccccattctctctgaacttatacttgttttcttaagtgccttaaatataccacactagctcctgaaattaagtcttgcctaaaataatcttatgaactctttgactattgtcttgttaaattgtcgtgagttaactctttcgtgctcttgcactaagttcgcttctcattactcatttcattgtttcggaaactctttcattgaattataaacattctcttgtacaactactcaaatcacataactaaacttatttgtttaaagctgttcaaattaaatggcttggaagaatgattaattaattcgttttaacatcctgagatagatgagatcgagatgctctaatggtaccgagatgcttattctgtattttgacatttcatacttcaattcaaattatacatcaaggaatctaaagtattccgtgtcgccatcatgagaaactaggagataggggctgcattgacatggagattccgctagagagaaagctttgtgaagtgatgaacagaaccagaagcagccaccatcgacgagattttctgnnnnnnnnnnnnnnnnnnnnnnnnnnnnnnagacaacaccgtttggaaacagaaccggatgcagcattatggaaagggaaaaatgactgctacaggaaacagtttagctctagagagacatggtcgcaaattcgcttacctaaagctgagaggaatggacacaaagtgatttggttttctggggctaccccaaggtacacatttatctcatgggttatgaaaaatagagtggcgacaggggaacgaatggtgaattggaaactgaatgtagatacaagctgtgtgttttgaaacaccctgtagaaacgcgggaacatttattcttccaatgccctttctctaggatgtatgggagaacactggtcgtggtatcttgttacacatgttctcagacaagtggctagaagtgatgaaggaaataca

SEQ ID NO: 165925 - DNA, 1214 bp, Arabidopsis thaliana landsberg
tttaacccaatattacatggtccgctcgcattcgtttaatgttgaatgcaagaacgtattgaatttaaaactcaactaggcatttttgttgttttcgggttagttcgggttaaaatcgaaataaaaccgactttttagatcattttagcttggtttgaaaattttggttccatttggatttgagtttggttgaaaatgcaaattataatataaatatttaaattaattatatatttagtagttaactttagaaatattttgattaatatggttagattaccaatggttggctttggtttgatttcatcctttattaaacttgggttttctgcaaaacaatcattcaaatcaatcttgtttgcaagtttaccttccaagtatgaattatgcaagtcaatcctataatctcaaaagtcatccgcaataccgtcctcccgtgtagtgatgacgtggatgacgtggtactcgataactctttttaaaaacataagggttttgaaaacttaatatagttatagagaaattgggtttgagttattttggtttgatttggttgttgtgtccaccgtaacaataatcaaaattgttttatattatctttttgatcaattattggacatagactagcaccagaacatccacttcctacagcgtacgaagactcatggactgcgctaaagaatatccaagccataaacgagccgtggatcaacgactacgccgacttggacagtttattcctagtgggagatagcgcgggagctaatatctcgcaccacctcgcatttcaagccaaacaatctgaccaaaccgtgaaaatcaaaggcattggaatgatccacccatatttttggggaacacaacctatcggagcagagatcaaagacgaagcgaggaaacaaatggtggacggatggtgggaattcgtgtgcccatccgagaaaggatccgatgacccgtggattaatccgtttgcggacgggtcaccggatcttggagggttagggtgtgagagagtgatgattactgtggcggagaaagatatattgaatgagagagggaagatgtattacgaaagattggtgaagagtgagtggaaaggaaaggttgagattatgcagacgaaagagaaagatcatgtttttcatattttcgagccagattgtgatgaagctatggagatggtacgatgcttggctctctttataaaccaa

SEQ ID NO: 165926 - DNA, 1015 bp, Arabidopsis thaliana landsberg
  unsure (1)..(1015): unsure at all n locations
ttctttattacacaggcctcaatccaagacattctatataagcatattgcagaagaggcggttctaattgttgcattgagtttatcgctatgacgtagggaaattctaatttaggggaggcctcagagtttgcactaacttcataatcggctcttgacgttgttgagtgtaattgaacaagaatgtgtaggcagaattgtcgcgcgaaatcctcaccggaggaagtgatttcaactgatgagaatctcttgatatattgtaaacctgttcgactatataacatctttcaccttcgctctctaggcaacgtatgatttgccttcctctctcatcatattagctcagtaatctttcatctcctgtgtagatcacccactaatagtttgagtttgctaagctgattatggtctgattcatggcgagtgtgtgcttcttttgtctcctaaatttgaacttgttgtttgttgttgcagccatcgtttcttccaagatgcttgagctacaacattggagcaaagcgcaaaaganagtatgttttcttcttgaatgtagctgctacagtgatatgttatttatcttacttctaatatggaagctgatgacctattttatctttgttgagtagatatggacataatgaatggtttcttctttgttcatgctataaacttacattttataaaattgtgttttggttaggtcaagatctactgggatggtagttttcaactataaggattgtaataacacattacagaaaactgaaggttagtctttttctgttcgtcgacaaaattcgatgtcaatgtctatgtttctctagatgatttgttatttactatttttttctgtattgtcatgcagttagggaggattgttcttgtccattttgctctatgctatgtggtagcttcaaggtgggcaactattacaacccggtcctcttccggggcctttcatatctaacactgtaaaatgctactgctgtttcatgctgtatactttccctgtgtgg

SEQ ID NO: 165927 - DNA, 453 bp, Arabidopsis thaliana landsberg
aatcgcatcggattgctcgatctagagaagcattttgctttctatggagcttatcacagcaatcccattaacattataatccacactctcttcgtatggccaaacgtcttcgctactctccttttcctctactctacgccaccgattttagatcactctcaattagggttcctcaagtcgctgacatttgatggtgttttgcgtttggacattagttttaccctcactgtgacttatgctgtcttttacatctgtttggataagaaatctggtgttttagcagctctgttatgtttctcttgttggattggctctagcttcctcgcagcttgattaggacattccttgactttaaaggtaagccctctgttctaattactggaaaagattatggctttatgcttctacatgcatttgaattttgaagctcagtttcttcatgcttttgacttg

SEQ ID NO: 165928 - DNA, 1107 bp, Arabidopsis thaliana landsberg
atggtaggaagaagctatagcttagaaacgcgtggatttgagtccaccaaagatcttagaatagctctttatgaaatgaaagaagatgtgcagagacttgaggaagagttggatgctgagagagaagctactgctacatcagcaagtgaagccatgtccgtgatacttaggctacaaggcgagaaagcgttgcttgctatggaagctagccagtacaagagaatggttgaggagagaatgtctcatgttgagttgtcaatggagcttttggaggatttgaattaccagaaagaagttgaaatcaagaatcttgagtgtgaattacatgcttatagatgtaagcttatgagtttgggatggagtggacttgatgatgaggattgtatgagattttgcgatagatctcaaacaccgtctcctgaaccgattgaggccgttcttgtggagaagggtgttatagagcagagcttggattcaagaagagatcaggagaagaatttagatttgaattgggaaaagatcaagaaggtggatgtgcagttgaaagagcttacggattttcgagattctgtaagagatcaatacaagactttgaagcaggagacaagttctgtttctaaaactaagaatggagaaaagggtttgtataaacctgattttttggtgaaaaagatgtccaagaaatcatcaaaacagaaaagagacaaaagcatcaagagagatcaagcacgaggaagttgttctgcaaatgatgcagagtatcaagccgagttacagcggttgagagagcgagtagagcgactagagcaggagagatgcaacaaagagccagctcaaactagtggagtaagtcaagaaaatatgaatctgcagagaaaatcagaagaagagttaagttctatgcaatctgcaatgtttaattatgactcagctattgtttctgttcaagaggtatggtaaaatcaacttctttcactaaatttcagatagttcttaagtactaacaaatcttggcatgtacattgaaacaggcaatgctttacttctggctatgagacacactttcgtccagagttgacggctctagagcgagttatgatatcaaca

SEQ ID NO: 165929 - DNA, 536 bp, Arabidopsis thaliana landsberg
aacatggattctgtattacccaataagaacccaattatttatccgaaaagaacacggcgttctcgtactgatcaaagcagtaccgatgagttttcagtagaaccaattgatcagctcgagatttttgatatccttaatttttgttattcattactaagacaatgaatttctcgtagttatgtttatattgttattggatcatcttttttcttttttcccttaacagtctacaaatcgtataagagatatcaaagatccagagcatcctgaactttctttggaagatctcaatgttcttactgaagaatcagttgaagttgatgatcacaagagttacgttatgtaaaaagaaaaaacaaatgttgtgattaatagctttttctctttactccaatctattaagttgtgctatctttttacagaattacattcactccaactcttcctcattgtcacttgccaaccaatattggtctttgcatcttagtcaaacttgtgcaaagcattacctgctagattcaaggtattgtgatgtc

SEQ ID NO: 165930 - DNA, 427 bp, Arabidopsis thaliana landsberg
tgcgttcgtcgcgacggcggcgtccgtggcggcgggcatcgccggctggctgctcggcttctatgcctatgaaagcatcgccaagccgatcctcgccttctacggcaagctggatacgttcgagcagttgaaatcccatgtcggggaggagcagctcaacctgctgctcgtcacttccggccttgcgcacctgccgccgatcaaggtggtgacgatccttgccggcgtcgcgcatgtgaagctctggcatttcgtggtgtccgccgtcattgcccggggcctgcgcttctatctcctggccttcctgctgaagcgttacggcgtgacgatccaggccttcatcgaaaagcgtctggggctcattctcggcgccgtcgccgtcgtcctcatcggactctacgtggcctggcgcctgctggcgggctga

SEQ ID NO: 165931 - DNA, 850 bp, Arabidopsis thaliana landsberg
  unsure (1)..(850): unsure at all n locations
agtatatcactgcgacggtntactgttatgtatctcgaaagactacactagggtcgtggtttggaatccgtataggagccaactttgtaggctcaaacccagtagtcctgaccatagaatggactggtatatctgtgctataggatacgagaagcgtannnnnnnnnnnnnnnnnnnnnnnnnnnnnnnnnnnnnnnnnnnnnnnnnnnaatttgttgagtacgaaatatacgagttaaagtctaattcatggagggttctcgatgtcacttccgactgggaagtagagttttatgcacgaggtgtctctctcaagggaaatacttattggtttgctacagacaagtttccagaaatcagcactaatcttatacatagtgtttatttcttgctctgttttaattttacatcggagagatttgggccgcgtcttcctttgccgttttaccctatggatgtagatactgtgagtctttctagtgttagagaagagcaacttgctgtgttatttcagcgtaaggacaacttacatatggagatttgggttacgactaacattgaacctaaagaggtgatgtggagcaagttgttcttagcagtggatatgcaaccactcactgattttaagtttggaattgcagatgcgagtttcatcattgacgaagagaagaaagttgttgtagtctttgctaaagacaaagatgtaatgtatcccactcgcaacacagcttacatcattggagaggatggatattacaaagaagtggatctcggaaaaactactgataaaattcgagatccacttgtgtgctcgtatgttccaagctcagcgcaaatcaagcaaggaggc

SEQ ID NO: 165932 - DNA, 1609 bp, Arabidopsis thaliana landsberg
tcaaaccgtagtagtactgtcttgttcgacaaatacaacatcggaagacttctcggaaccggtaacttcgccaaagtgtatcacggaacagagatctccaccggcgatgacgtggcaatcaaagtcatcaaaaaagaccacgttttcaaacgtcgtggcatgatggagcaaatcgaacgagagatcgccgtcatgcgtctcctccgtcatccaaacgtggtcgagctccgcgaagtaatggctacaaagaagaagattttcttcgtcatggagtacgtcaacggcggagagcttttcgaaatgatcgatagagatgggaagctcccggaggatctagccagaaagtatttccaacaattgatatccgcggtggatttttgccacagccgcggtgttttccaccgcgatattaaacccgagaatctgttgcttgacggagaaggtgatcttaaggtaacggatttcggactttccgcattgatgatgccagaagggctaggtggcaggcgtggtagcagcgatgatcttttacatacgcggtgcgggacaccggcttacgtggcgccggaggttttacggaataaaggatacgacggagctatggctgatatttggtcgtgcgggattgttttgtatgcactccttgctggcttcttgccgtttatcgacgaaaacgtcatgacattgtacacgtaagtatttcttgaccaggttttggcccaaaccgtatttgtttttgttatttatttgacgaatagtgagatacaaaaaaatattgaactaaaagccaaagtagtccattttgagttgggtttctagatgcatctcaattttacatcacatacttatatatgttaaaaagaaataataatcatttttggttaaataaaatattatttgaaagagacagtttaacttgtaccaatagatacaaaacttggatataagatatactatttgaaagtttacacacacaaaaagaaaagatatatagtatttgaattatttgttcacgtaattcaaattttaataattactcaaaattatacaatattttccaagatattgaaactattatcaatttgtgaatattcgggtggtattttaggtacattaatctgatatcaaattcgataaatgttggtcgatcgtatatttcattatagttctatattatcaaaatttcacgtcccgtattttactagataatttataaaactcccgccaataataacggtctcaaatagtgctcttcttacaaattcaaatattagtattgttgaatgtgaatgtgaattgatcaaattctcattgttgtttcttgtttgattgaacctttcgaaataaacaggaagatcttcaaggcggaatgcgagttcccaccgtggttttccttagaatccaaggaactactctcaagattgcttgtgccggatcctgaacaaagaatttcaatgtcagagatcaaaatgattccatggttccgaaagaactttacaccatcagtagccttttcgatagacgaaacgatcccatctccaccggagccaccaacaaagaaaaagaagagagacctaaacgagaaagaagacgacggagcttcaccaag

SEQ ID NO: 165933 - DNA, 1007 bp, Arabidopsis thaliana landsberg
accatatcgtcaaagatatatgtgtcgatgaaggtgtgcctgttcaggagaagttcttatttggtgagaaggattctgtcaagtctagctcaacagaggatttggtgaaagcagacaaaacaaatgtgaatccatcagaaactaagtctgcggaagacagcatcagtaaggttgatgattctgagttttgtaacgatcataagacagacagagatgttgaagaatcttcaggagaagattttgctgatgctgaaggtacttctagcaattacaatcaagagcatttgattgtgacagaggaagtcaaggcttcaccaacacatgggctaagtccctctgaaattgaacctgatgagaattcaaaggacgaagtggctatatcacaggataatgactcaaaggaatgtttaacattgggagatattctatcaagggaagatgaacaaaaatctctcaaccaagacaacattagcagcgatagtcatgaagaacaatctccttctcagcttcaggcaatacataacactatcaaatgacgtttcaggtttttctaaattgaaagtttctaactttctaatgtgtgactgcaggataaggaaaaaagaagcttagaaaccacagctatcgaaacagagcttgagaaaacagaggagccaaaacaaggagaggagaagctttcctctgtttctacaacgacctctcaagaaccaaacaaaacttgcaacgaacctgaaaagcctgaaactgagaatcatcatcagcaaaactgtttagtggaaaactcttacgaagacgataaattttcttcaagcagatttggagagacgagtttctctgcagcagattcagtttcaatatcaggtcatataacatgcgctgtccccctcggtgagtttggcacacctgtaggttcgcttatgttccagcgccacatcctgaaaatatgcagcgttttccacctccatgggctttgcagtagttagtacttccttgagctcctttctcac

SEQ ID NO: 165934 - DNA, 375 bp, Arabidopsis thaliana landsberg; identical to SEQ ID NO: 67850
  unsure (1)..(375): unsure at all n locations

SEQ ID NO: 165935 - DNA, 1007 bp, Arabidopsis thaliana landsberg
agagagtggcctagaatcaatgacaagctaaggcgtgggtacagacctacatcatgaagtacgagaatggtgtcaggttttgttacatatctgttgggaatacagttaaaatctccgagtattacgcacagttcctagtccttgccatggaaaacattgtgcggacggttttagcagccggactcggtggtcgtatcaaggtataatcattactcatatatatcgattaggtattttcataagatgaatattcttttgagcattaatcaagcgtttattttaagttcaacatttgcgaacttattttattaaaaataggagatattcaatgttttagtgtaaatttagttaagaacttaattgcgttttactctcttttttatataacaaaaattgtaagtttcaactctgttttattataattgtgcggaatttaacaggtatccacatcggtagatatgggagtgcttggagaatcttatccaccatcgaaaggttcgtttaggggagacgttatggtgataatggaaccaatcatacgtttcttggtaagcaagaactctcctttactcttaaacctctacacttacttcagctacgcgggcaatataggccaaatccggctcgattacgctctcttcacggctccttcaggaatcgtttcggaccctcctagatcttatcaaaacctatttgatgcgatgctcgatgcgatgtactcagctctagagaaattcggtggcgcatcattggaaatagttgtggcggagactggatggccaacgggaggaggagtggatacaaatatagagaatgcgagaatctataacaataatttgattaagcatgtgaagaatgggacaccgaagagaccagggaaagaaatcgagacatatttatttgccatttatgacgagaatcaaaagccgactcctccttatgttgagaagttttggggattgttctatcccaacaagcagcctaagtatgatattaactttaattga

SEQ ID NO: 165936 - DNA, 3747 bp, Arabidopsis thaliana landsberg
acaaaactcccaagagtcaacagaagatgaaaaaacctctgaagactatagagtgatcccaggagaagggtatgagaatgagaaagtaaaagagcttaaaaagatgtctaggaagcaagaagaaactatagagaggctagctcactctgttggggaacttaggggtaggctgaatcagatgcagaagtaagctcaacctaagcgggattaacactatcccgagaaacaagttcacttcaagatggtcttgagagacagattaccctccagaagagaaagaagcctattttgaagaaaggggaattgctattctgctgcagacctctccagggaggacgctgagtatgatgatgatatcagagaggactatgcagaccctctctatcattcattttcttcttgataagtgtgaggagtcaagctagagactttaaacaaactcacttgggaggaagtcccatgattatccgtgtaaataatttttactttcttgttatttttgatttgttttcgttatgtttgtggttctcaggaaaaaaggaataacaagaaggtagagtaaaaattcaaaacttttactctactgatggtctagagatcgagtacattggtcgtgtttgagtgatgcttaaaaacctaaaaaaattttaatcatcattttactcgaccaacagaagctacaaagtcttccagggagtctttcaagtttacagaggattgcgggatttcctggagtttttctagtgaacagagaatacagagaaggaacaagaagacatcctgggacccgccgctgacgcccatgttctctatgcaacagaccaaaggacaggaaatctctcctcatctcttctcctccactcgacgtcaacgccatcactcgggctgcattcctcttaactcgacctcatcacctcgttttctcctccacaaccccataaactcgacccatcactctcattcatcaccaccaacaaaccagactccaaaccactcgaccccatacctcttgaatcaacgctcctttatctcctttactcgacctcgtcacctcctcctcaccacctcataaactcgacttcatttctcccacttctctcccataaaacagtcgacctacaaacccatctcctccccacaaccttcactcgatcgccgcttctcaccgcctatccatcatcgctgcctgctcactctctccaaggaaacaactcgagctctccatttcactcactcgacctctccaccatcaaccaaccaaattgattctcctccattacagcttcactcgaccgccgaacatttatcacctttaagctcctcatctctccatcgtttccaacgccgctgctctcatcccacgaaagctcgtcatctcctttcactcaacaacggtttactcgattcagcaaccatacacttgattcctcatcaccttctccgtccaagcatcactactcgaccttgcctaatcactcgacctcaccatctatcttcgtctctcatttgctcaacaaacagtcgtttctcctctccaaggaatacactcgacctcaacacagctttctctagctcataactccactcgacttcacgccaaaagcacctccgtttctccaccaccgattcaacaactcgaatcaccgctcctctacctccactcggccttccgaaaacactcaaccgcaagttcaccaaaccggaaaaaaaaaaaaaaaatttggtacactcgaccggtttactctgttggtttgtgtttttggttttgttggaactaacgtattaacgtttatttttgagttacatttgttttcatgtttcatcatgagtaactatagtggagaatcatctatggaccctgattacaacgtggatgaagctgagtcctggtccgctagaccgagagagcaacatgtttaccagagtttcagggatgaactcgaacgctctacagaccgacataatcagagaagagctgaaatcgccagaggaaagagggcgatgtcaagtaggtatgagctgattgatgaggatatcgagactgagtatgagccagagtcatggcgcagggagacaaagctgctgaacaaacccgacgaggttacagtggaggagtatattagattcttcgagatgaatgacttctggggaacaaggtatccgtgttatgagactttagcccagctggggttactggaggacgtgcagcatttgttcgagaagtgtcatctagagacacccatgtcttacccttaccttgcctataaggaggagacaatcgagtttctttccacgctgcaagtggagatgtatgaagcactcacagactttgagttggataccatgggattaggcttcttgacgttctcagtgaatgaacagcggtatcagctttcgatcaagaagttagaaggactgtttggtttccctagtggaaagggaaccaaacccagatttgacagagaggagcttaaggatttatgggccactatagggaacaatctaccgctaaactcggcgtggtccaagagcaaccaaatccgaagtcctgtgatccgctacttccagcgatcggtcgccaacgttttttactccagggagtctacaggcaccgtgtctaacacggacatggagatgatagattatgcgtttacagggattctccgccggacaaaggggaagaatgttttgagaggcgatctcaacaacgcaccaccagtaatgcctctgttgatccatctgtgtggatacaggaagtgggcgttgacgaacgggaagaagaaggtgagaggagcactatgcgtgggtggcgttgtgacgccaattctgcaagcttgtggagtaccgctcaaggaaccagggttggcaccgaggatgatggacttggatcatttgcgccgatgtgagttcttggagtttgacatggctggcgactttcaccgctacaggttcgagcattcatcgattaaaatcgccaacattcttctcccctgcattgacgctactaggattctcgagggcaggaacattgacttcaagcctgcgcttgaagaactttatttcgagggtagtccgccaactgaggagatcagtcataccgaaggagctacaacagaagatattgatgagacggatgatatagatgaggcggagtttgacacgagcatgtatcatttcagtgagcatatacctcctgcaagggaaagcaggagtttgagcgaagctcacaaaaacaatagcaagctgcagaagtggtgcatgaaacaggacaagttactcgccaagtgcctcagggctatcaagtttatgaagaacaagctcggctgctcctcttccactacagctattccgcagggacatctccctcaggacatgccttcgaggagatatgacgcgcccgagccaagtcagcgcaggcctgagcctagagagcaggagattccgcatgtccctgcgaggcattcatcattcgagcctcgtgaatctgggaggaagaggaggaccacactcactcgatctagcagtaggagcggacgacttctgcagtctcgtagtttacgcgaccgcggtgctggccgcaacagaaggagagaggtcgagtttcctcatagcggtgctggccgcagcagaagaagagagatcgagtatcctcagagcggtgctggccgccacagacctgatgaggtcgagtacccacctgctggagctgatactgaacaaggtggttcgtctatggcctgggagcaa

SEQ ID NO: 165937 - DNA, 2153 bp, Arabidopsis thaliana landsberg
cttgtttcatctcacattgaaaccaccggagagagagataatggcggaggggcaatccccggagaactcaccgccagctcctcctcctccttctcctccgtcacctccctcttccaacgatcaacaaacaacatctcctcctccttccgacaatcaagaaacaacatctcctcctcctccatcttcatctgacatagctcctccacctcaacaacaacaagaatcaccacctcctccttcggcagataactcctccgatggttcttcctcgtcgtctccaccaccaccgtctgactcatcctcacaatcacaatctccacctcctccttcaacgtccccgccacagcagagtgacaacaatggcaacaaaggaaacaacaatgaaaacaacaaaggtaatgatggaagcagcggcgatggaggaaacaagaacatatctcatactcctccaccaccttctaagacttcggaccctagctctcactcgcaaccaagatcgctggcgccgcctacaagcaacagtggctcaaattcgtcaagtaatgatggtctgaacattggtgctgttataggacttgtggctgcagctggaattttattcattgtcatgatcttgttatgtgtctgttgttttcggaagaagaagaagaaatcaaagcttgatcagatgccgcactacggaagcaatgcttaccccgcaggaaaaagtatgtacatataaaaaccatgaaccctaaattttgtttcttgttgcccaagaaatagacaaatcactatctcatctaactatctacaaaaccttgaaccctaactaaaccccggcccgtaccatttcgtaagctttagtttcacctaattcttctaccctagtttcttcttagctatgaaaattgtaaatttttgtcacttgtttccgattctttctttttttcccatcacatctcatctaagcctttgtcatacttctatttttgtttgttttttagctgggggtgatcaatactacaaccaaaatgctgctacacaacaacaacaacattacaaccaaaatgatcacattgtgaatctgcctccacctcctggatcagtgggaacaaactgggtgaattcaccgccaccaccacctccaggaaattggcagccaatgccgtcgccaccagcaccagtgtcaggaggcgcaaatgtgatccaaagcgacgaaatgggctcaaatttctcatcaggtccatacgctccatctctaccaccacctcacccttcagtggctctgggattcaacaatagcacattcacttatgaggagctagcatccgcaactcaaggtttcttaaaagaccggttgttgggacaaggcggtttcggatatgttcacaaaggaatcttgccaaatggtaaggagatagcggtgaagagccttaaagccggaagcgggcaaggcgagagagagttccaggcagaggttgagatcatcagccgcgttcatcatcgacatctcgtgtctcttgtcggatactgcagtaatgcgggaggacagaggttgttggtctatgagtttctccctaatgacacacttgagttccaccttcatggtaattaatgatgagttttcttgtgttcctgggaaggattatgacctattaaaaaactaacacaaaattttcacaaaaaaaatcaattgaattatagggaaaagtgggactgtgatggattggccaaccagactcaagattgccttaggatcagcaaaaggtcttgcttatctacatgaagattgtgagtgatttatctcatttcatcttttcactttaactctaaataaatccaaagatatttacatgtttgtacctgaaaattgtggttaggtcatccaaaaatcatccatagagacattaaagcttcaaacattctccttgaccataacttcgaagccaaggtatatactttagtgacctaaaaaattctgtttcttctactctttacttggaattacaattttctctcttgacaatattttgtttttaaattaatctccaggttgcagattttggtttggccaagctctctcaagacaacaatacacatgtatcgactcgtgttatgggaacattcggatacttagctcctgaatatgcatcgagtgggaaactaaccga

SEQ ID NO: 165938 - DNA, 488 bp, Arabidopsis thaliana landsberg
aggtggcatgttgtctcccgccatcttgaggtcatcaaacgcgtaaaacaatgcgtcttcatggcatcaatcgggacgtgttcgaccggtttactgccaaaaccccaagctggtactacgaggtagtggcccccggctttaaatacaatctgactgacattgcctcggccatgggcattcaccagcttaaaaaggccatggcatttcagcagcgcaggcaagccattgcacagatttatcaagacgagctggctgacttgccagtggtgttgccgcaaacagcgggtgcgggcgggttgcattcctggcacctttacgtgctcaggttgtccgacgaatgcaagctaagtcgggacgagtttgtcgaaaaatttgtatgcccaggccatcgggtgcagcgtgcattacatcccgctgcatttgcacccttagagagcaaaacgcagacggcctgtcagaaatacaaccccggtcagtctaaaggcata

SEQ ID NO: 165939 - DNA, 1829 bp, Arabidopsis thaliana landsberg
atgtgggattactttacactagaagatgagaatgatggaaaaatagcatattgtaagaaatgcttgaagccctacccgatattgccaactactggaacatcaaatctgattcgtcatcataggaaatgctcaatgggtttagatgttggaagaaagacaacgaagatagatcataaagttgtcagagaaaagtttagtcgagtgattattcgacatgatcttccttttctttgtgtcgaatatgaagagcttagagatttcattagttatatgaatccagattataagtgctatactaggaatactgctgcagctgatgtggttaagacttgggaaaaggaaaaacagattctaaaatctgagttagaaaggattcctagtaggatttgtttgacttctgattgttggacttcacttggtggagatggttatattgttttaactgcacattacgtggatacaagatggatattgaatagcaaaatcttatcgttttgtgacatgcttcctccgcatactggtgatgctttagctagtaagatccatgaatgtttgaaagagtggggaatagaaaagaaggtgtttacccttactttggataatgctacagcaaataatagtatgcaagaagtattgatagatcgtcttaatttggataataatttgatgtgcaaaggggaattctttcatgtgcgttgttgtgcacatgtcttaaaccgtattgtccaaaacggtttagatgtgattagcgatgcattgtctaagataagagagactgttaaatatgtcaaagggtcgacatctaggcgattagcacttgcagaatgtgtagaagggaaaggggaagtgcttctatcattagatgtgcaaactcgatggaattcaacatatttgatgcttcacaaagctttgaagtatcaacgtgcactaaataggtttaagatagttgataaaaactataagaactgtccctcgagtgaagaatggaagagagcaaagactattcatgagatcttgatgccattttacaagatcactaatctcatgtctgggagaagctattcaacttcaaatttatatcttggtcatgttaggaagattcagtgtttgttggaagttcatcaatacaacgaagataaagtagtccgagagatgatttttaagatgagactgaaatttgataaatactggaaagagtatagtgttattcttgcaatgggggctgttttggatccgagaatgaaattcaaacttctaaagcgatgttatgatgagcttgatccaacgacttcacaagaaaaaatagatttcctcgagactaagattacagagctttttggagaatatagaaaagcatttcctttgactcccgtcgttagttctacaagagcaggttctcgtgtttcagaacgaggaagtgacaacttggacgtgttagatgtaagtacttaactttgacattttctattattgccttattagtttatctaattacgtattcatcgttcctgttggtagctagtataattgagtgggttgatgaaaatgagtatagttagtaaatcgaagatttcattttgaacttcactcatatctgaatcaatagatctgcactttaaatttgtttgtttaacatcttcctttgactatgtagtagctctttattttgttgtatttgtcttgtttgtcccagggtgatcctctttatgttaaagttaacaaattgtcgtccacaaagactcaacttccttatgactactactacctgaattactgtaagccccctaagatcttgaacaatgctgagaatttaggggaggttatcagag

SEQ ID NO: 165940 - DNA, 1343 bp, Arabidopsis thaliana landsberg
  unsure (1)..(1343): unsure at all n locations
taagatgatccaactgtatgctgagaaattagnnnnnnnnnnnnnnnnnnnnnnnnnnntaatactggagagctatgggatagaatacttcattgatgaacatttgaactcaacgtattaccgtatgcgattgatgaagtatatagcacggcctgataatgatataactgctgctgttggtgctaatgtggataatggtgctaacgataatgccgatggtgatgctaatgtcaacgatgatggtgctagtattggtgttaaagttaatgtcgatgttggtgatgatgttaatgacaatgatagtgttaatattggtgttggtgttgatattaacgttgagaccaatgttaatggtgatcttgatgctgaagctaatggtgatgctactgcttgggtcgttggtgctgttagtgggaatgctagcgttggtgccaaagaaggtattaatcttaatgtttaattatactattagataaaaaaaaatattaaaaaaaaaaaaaaagttatactatgagtgatgataatattggtgttaatgttcattctaattatgttaatgatattgttactaatactaatattatttttactgtaattgatgcatggtgttgaagctaatgttgatgcggagttgggcttacctagtcatactgataaaagccttagtggaataatttatcagcatcaaattgatggtttggaggtgaagaccaaagaggggaagtggatcagagttaaaccagctcctaataccgtcattgttattgcgggagatgctctatgtgtaagttctaatttttctttacgtaatttggcaagtgaaaatattaacattctttctttgtcaaggttcaattctagctagtattatatagctgagggtctttggctgtttgtatatgacatatgttgatctataacttatagtatttagataaggattgtcagataactttaattttagaatacaacatagtcaagatttaatgacctaaatattttactctacatgtttttggtaaaaaaacaaaagaagaagagtaattttcatattcctagtgatgttgttgttgtggcaggcacttatgaatggtagaatcccttcaccgtatcaccgagtaagggtaacagagagaaagaagacgagatacgcagcagcattgttttcgtatccaaaagaaggttatatcatagattcaccaaaagaacttgtggacgagaagcatccacgtgccttcaaaccctttgattttgtcgacctttttaacttctatcacacagaagctggtcgtagagctccatctactctccaagctttttgtggcgtctctgctgggaaataa

SEQ ID NO: 165941 - DNA, 482 bp, Arabidopsis thaliana landsberg
atggcccttgcaaatgtctgcaagaaccctgaattgggtctcggtatgcccgaaggcgccaccgaccgtctgctcagcacggctcgacgtcgcgtccgcggacagtgttgaatcggagcggcggttgcgctgcaatgggcgccttgggcgctatcgacagcagcacatcgcatttccgatgccagacaagactttgtagtgtaaaccattgtggccgccgatggcgaagccggcccttttcgacaagacaaacggagattcccgtgagcgaacacatcacccatgccaccgatggtgacttccagacccaggtccttgaatcggacacccccgtgctggtggacttttgggccacctggtgcggtccatgcaaggccatgtctcccgtgctggacgaagtggccgccgattacgccggccgtctgaaaatcgtcaaggtcgacgtcgaccagtgccagaacggtcatgaactattccatccg

SEQ ID NO: 165942 - DNA, 1231 bp, Arabidopsis thaliana landsberg
tttaactttgtttttccagtctacgcctgtttatctctcggagatggctccagcgaagatccgaggagcacttaacatcgggtttcaaatggctataaccatcgggattttgattgcaaacttaatcaactacggaacatctcaaatggctaagaacggatggagagtatcattgggtttagccgctgtaccggcagttattatggttattggatcttttgtcttgcccgatacaccaaactcgatgctcgagagaggcaagtacgaacaagcgagagagatgttgcaaaagattcgtggagctgataacgtagatgaggagtttcaagatctgtgtgatgcttgtgaggctgctaagaaagtggataatccatggaagaacattttccaacaggcaaaatacagacccgctcttgttttctgttctgcgattcctttcttccaacagattactggtatcaatgttatcatgttctacgcccccgttctctttaagactctcggttttgcggatgatgcctcgctcatctcagcggttattacgggtgcggtcaatgttgtctctacccttgtctccatctatgcggttgacaggtacggaagaaggattctcttccttgaaggaggcatccaaatgattgtttcccaggtaaaaatgctagttccgagtttgcgtatacatgtggaaaaatgaaacgttttcagttcataatgtatataaatgatgattgcgtaccttacatatattgtttgatgggtcattttgcagatcgttgttggtaccttgattggtatgaagtttggaaccacgggatcagggaccttaacacctgcaacagcagattggatcctagctttcatatgtttgtatgttgcaggatttgcatggtcatggggtccattaggatggttagtaccaagtgagatctgtccattggaaatcagaccagcgggacaagccatcaacgtctctgtcaacatgttcttcactttcctcattggacagtttttcctcacgatgctttgccacatgaagtttggtctcttctacttctttggaggaatggttgcagtcatgaccgtcttcatctacttcttgttgccggagacaaaaggggttccaattgaagaaatgggaagagtatggaagcaacatccgttctggaaacgttacatgccagatgatgctgttattggaggaggtgaagaaaactacgtcaaggaggtttga

SEQ ID NO: 165943 - DNA, 658 bp, Arabidopsis thaliana landsberg
atgggtgcttctgcttcggttcccgagagatccgtccatcaattcactgtaaaggtattctcttttcgctcatactagaggaggaggttgcatcggcgctgtgatatttgtttattccttatcgttgttgttgctgttgtttcctgggaattaggatagctccggcaaggacctgaatatgagcatttaccaagggaaagtcctcctcatcgtcaatgttgcttccaaatggttcgtctcttttgttcttttgctattttcttattcacctctaatccttagttttgtgcgcaaacagcggtttcaccgaaacaaactatacacagctcaccgaactttaccggaaatacaaggaccaaggtcattgattatattacggccttttttgttatgcagttgcaagctcatctcctttgttggttttaccatttcatgctctctcgttttcagattttgagatcttggcattcccttgcaaccagtttctataccaggagcccggcacaagtcaagaggctcatgaatttgcctgcgaacgctttaaggccgaataccctgttttccaaaaggtacgtagggatcaagactcatggaacaagtttattatcttattatgttaggctgctgtgacttgtggtatgttcgtttataacaagaa

SEQ ID NO: 165944 - DNA, 3491 bp, Arabidopsis thaliana landsberg
atgcagatggcacagtttctttcattggttcgaggtgattcgattgagtctcctcgtgagattacctcgcccagtaacctcatcagcgagtccggttcgaatgggtggcttatccgcttttttgattcttccttcttctgtgagtggattgcagtcagttatttgtacaagcaccagcattcgggtgtgagagattacttatgcaataggatgtatacgcttcctttatccggtatcgagagttatttgttccagatatgctacttgatggtgcacaaaccaagtccctcacttgataagtttgtgatagatatctgtgcaaagtcacttaagatagcattgaaagtgcattggtttttgttggcggaacttgaggattctgatgataatgaaggtattagtaggattcaagagaagtgccaaattgcagctactctggtgggtgagtggtcgcctcttatgcggccacataacgagccttcaactccagggagcaaggtccttaataagtttttgtcatcaaaacagaagctcttctctttgactttatctccacccacccagaagtctttactattctcacctacatcggggagcaacttgcaggatgatggtagtcagttatctgcggacgacaataagatttttaagagactaatcccaagtcctaaagttagagatgctttattgtttaggaagtcagctgacaaagaagacgaggaatgtgaaaaggatggatttttcaagagactcttgagggacagcagaggtgaggatgatgaacaaaggtcaaactcagagggtttctttaagcgacttttgaaagacaataagtcagaagaggaggagatatcaaacaattccgaggggttctttaagaggctaaggagtagtaaaggagatgaagaggaattgacatcgagttcagatggattctttaagagattgttacgagataataaaggagatgaagaggaattgggtgccaactcggagggtttcttcaagaagttattgcgggatagtaaaaatgaagacgaggagccaaatgcaaacacagaagggttcttcaagaaactttttcatgagagcaagaatgaggatgataaagtttctaacgcagtagatgatgaggaaaaagatgggtttcttaagaaacttttcaaagaaaagtttgatgagaaaagaaatggtaacgagaggaatgagacagatgaaaccgtgtatactgacgaaacatctggtgaagataacggaagggagggatttttcaaaaaattgtttaaagagaagtttgaagacaaaccaaacattggcaaagccgatgatgggaatgaaagcgaggatgacgaatcttcagaattctcactgttcagaagattgttccgtagacatccagaagacgtaaaaactactttaccaagtgaaaactgcagcaatggcggttttgttgaaagcagtcctgggacagaaaactttttccgcaaattgttcagagatcgtgacagatctgttaaagattctgaactttttggctcaaagaaatataaggaggtttgtccccatataactttatctcaggttttatttgtaatgcttagagccttagacactcttttctttctctttcaaccatatcccctgattacttcatctgttaaggtttctttctaggatattatatgagatattagctttatgtattagactatcgaaaagttgtgctcgtgttgcttggtttaccctcatacattaatacataggatggtagtgtatgatggcacgtaagccaagagcgctactgctctcaggtcatgttaaatttctctcacttcagtatattttagtaggcggaaaaagttagtatgcctgccattcattatatttgctggatttgctcaggctgccattaatttgctgacatttgcagaagtgtccaggttcacccaaaccgcagaataatactccatctaaaaagccccctctaccaaacaatactgcagcacagttcaggaaagggtcttaccacgagtctttagagtttgtacatgcattatgtgaaacgtcatatgatttggtagacatttttcccattgaagatcggaagaccgctcttcgtgaggttttctttaaatccctacctttctatattgatatttaaaacgtagatattagcattatcctttatttaactaagatttcatgtttcttttgtttggtgttagtctattgcagagatcaattcccatttagctcaggctgaaactactggaggtattttcttaaatatcttagaatttgcttgttcagttttgtctcacacatgagtgaaccatgtgcccccaatacatttggcaccacccttttgcattggagtcattttccaacggctattttttactctgttcatgtttctattgcggtaactgattcagtatcagatattgattatactttcaatataatttcaggaatctgttttccaatggggagaggagtttatcgtgttgttaatattcctgaagacgagtatgttcttttgaattctagggaaaaggtgccttatatgatatgtgtggaagttttgaaagcagaaacaccctggtaaatagaaaactcaaaaattacgattaatctactgcttttcgttttagaatttactttcttaccttctaagtatactttaaagggtttcttggtaacctctctcattgttcttattgtcttttgaaactttgtagtggtgctaaaaccacatctacttcccttaagctttctaaaggaggcattccactggcaaacggggatgcattcttgcacaagccacctccatgggcttatccgctatctactgctcaggaggtttaccgtaacagtgcagaccgaatgtcattatcaactgttgaagcaattgatcaagcaatgactcataagtctgaggtaaaacttgtgaatgcatgtctctcggtggagacgcatagtaattcaaataccaaatcagtaagcagtggtgtgactggtgtcctgaggactggtttggaaagtgatcttgagtgggtcaggctggtgctgacggctgatccaggtcttagaatggaaagtattactgatccgaaaaccccacgtcgaaaggaacatcgtcgtgtttcaagtatagttgcctacgaggaagtaagggtgagtgtttcttgatagataaattgtaaaaggcaagtcctgttttttttctctagtattccatttctccattgagtcactgaaaaacgctgactctcagtgagtagcgtttcagcatcacttagtatgtgagtatgtgactcctaacatactaaacagatcattcacctaaacagtcatcttaatttggataagctaaatcaactgtaaagtgcctgtgtcctgcttgatgtcattattcctacatcaactcccttgttcaggctgctgcagcgaagggagaggcacctccaggtcttcctctcagatcctct

SEQ ID NO: 165945 - DNA, 1268 bp, Arabidopsis thaliana landsberg
tggctaatacccaaactaacgacatgagaatcaacattgataccctctccgacctaaccgattatgcctcaggttttaagaaaatctctctgtttttatctgaaacatctccaaaaattttgttttcttcatcatttgtgattatttttttgtgtttgcagttgccacaaaaatcgatccaagaggaacaggctcaaaatctggcattttaggttaggacattatggattattatttaaaatccttcttttttatgaagactatgatgtaaacaatgtcttctggttttggttagttaatgggaaagtgaatagccctaaaccgggtggtggcgcacggagtttcacgttcaaggagttagcagccgccacgaagaatttccgggaggggaatattataggaaaaggaggctttgggagtgtctacaagggacgtttagattcaggacaagtaagaaatgctctgttttcactcaaaagtcaaaacgttttcagaatgttgtaaaaagatttgatgggaattgaatttgagcaggtggtggcgatcaagcaattaaatccagatggacatcaaggaaatcaagaattcatagttgaagtctgtatgcttagcgtcttccatcatccaaatctagtaactttaatcggttactgtacttctggtgctcagagacttcttgtttatgaatacatgccaatgggtagcttagaagatcatctttttggtaagtgtgtgtttcctaatcaccccaaaatcaaagagtttgtattaataaaccgctctcattcttgttgttgtttgaaacagatcttgagcctgatcagactccactaagctggtatactcggatgaaaatcgcggttggtgcagctcgtgggatagagtatctccactgtaaaataagcccgtctgtgatttaccgtgatttgaaatccgcaaacattttgttagataaagaatttagcgtcaagctctctgattttggactcgctaaggttggtcctgtggggaaccggacacatgtgtcgactcgagtcatgggtacttacggatactgtgctccagaatacgcaatgagcggaagattgactataaaatcggatatctatagctttggtgtagtgttgcttgagcttatttctggcaggaaggccattgatttgagtaaaccaaacggagagcagtaccttgttgcttgggtaagtaagattaacaattgtaaccagattaaaccggaacttaatctctcgtttaatttaaccgtgttt

SEQ ID NO: 165946 - DNA, 1373 bp, Arabidopsis thaliana landsberg
  unsure (1)..(1373): unsure at all n locations
aaaatctggagactgtgcttgtcttgattacatgcttgagcactaagacccgttttaaacattgagaggactagatttgttgttacactgtaaatcctttgatattctttccttttacccaatcaatgtcaggatggctcaaaggaggggaaagttttccttcagaaacctgacgaaaagtcaactaggtggtgttgtctttggctgcactaagaataccatcaaagaatgtatgtcgaaacagttgtttagtgagtcttcttgaatagcttattcttttcccatgcttgtttttgcttctgctgaatgtagctgtttgtttgctgtctactttgattctttgcttgctcattgtcgtatgctgttgcatttttttgtttctaaactctatttcgcaatgtttgtatgtatatgcttcttgaatccgctgatggttttgacaggtttaccctctaaccactatccatacgtgcagaagattgatattggtttgccattgtttcttttcaactattctgatcgtacacttcatggcatttttgaggctgctggttgtggtcagctcaatattgacccttatggctggacctctgatggttctgagagaacctcatatcctgcacaggtaccagagtgacatttgatcactttcatgaatatgtgtttctatgagttcattggattacatatggttttcaggaggcattatcccttgccaaccttttccataagcagtataaatttcatgaaataagcagtggtcttttacggtttcgcaggttccaatcagtgttaggttacagtgtgaaccactttccgaggaaaaattcaaacctgcaattgcagataattactacagttctcaccatttttggtttgagcttgatcatttccaaacaaggaagttgacatgtctgctaacatcttttgctgtgaaacctaaaccacccatgaatacaccaaacacaagacagatctttcgcttgatttcatcaagtgaaaagaaagagaacagtgatgaggttaagccttctgagaatgaaccagtgggtagcttggaagtgtcactcagttctggcggagaatctgactcctctgctgctgcttatcatcctggtttctctgagaaccatccagacgtacagaaccccaaacaaatagataaggatcatgttcttgaggaactcaaggatcttgtctttagtcatgatgagcatgcagacagcagnnnnnnnnnnnnnnnnnnnnnnnnnnnnattcccacgtgcaataacttgagagacatagatacactttaacagtaatcatgttcacaggggaatctcgacggcagctgtcatgtatcctctcctcttccacattcaataagccag

SEQ ID NO: 165947 - DNA, 454 bp, Arabidopsis thaliana landsberg
  unsure (1)..(454): unsure at all n locations
agaatgggatcgaaggggagaccgcatagaatgaataacannnnnnnnnnnnnnnnnnnnnntacttttctgatcgggctgactgcggcgctgggcgccgtgggcgtggtcggagcggcggtgccattcgtgaagtcctgggagccgagcgcaagagcccgcaatgctggcgctcccatcaagatcgacatcagcaagctggagcctgggcagcgtgtcgtcgacacctggcgcggccagccgacgtgggtgatccatcgcaccgatgcgatgattaccgatctgtccaagctggacggcatcctcgtggaccctcactccgaggtggccacccagcagcctccgtacgcccagaacgagtggcgatccatcaagaagccttannnnnnnnnnnnnnnnnnctgcacgcatctgggctgttcccctgaatacaaggagaaacccacggtccgcc

SEQ ID NO: 165948 - DNA, 643 bp, Arabidopsis thaliana landsberg
atggcggattcctatccctttcctgataacatccacgtttcaagctatgttactataaaattcaaagactacaactatctcctttggaaaacacaatttgagagtctcttgtcctgtcagaaattaatcggctttgttaatggtggaatctcaccaccaccacgtactctcaacgtcgtcacaggagacacctccgtcgatgtcgcaaaccctcagtatgaaagttggttctgcactgatcagctcatccgttcatggctttttggcacgctatcagaagaagttctcgggtatgtccacaatctccaaacctctagagatatttggatctccttagcagaaaacttcaataagagcagtgttgctcgtgagttcacgctccgccgtactctgcaactcttgtcaaaaaaagacaaaactttatcagcgtattgtcgtgagtttattgctgtgtgtgatgctttaagttctataggcaagcctgtggatgaatcaatgaagatctttggttttcttaatggtctgggaagagagtatgatcctatcactactgttatacaaagctctctgagtaatatttctccaccaaccttcagagatgtgatttccgaggttgaagggtttgatgtaagctccagtccct

SEQ ID NO: 165949 - DNA, 2083 bp, Arabidopsis thaliana landsberg
gaaaaaataaagctttgagtatctccaaggttaccattacagagacaaaaggggtatttaagcttagtttctctgtttatgtgtatgtagtgcttttaaatcggggtttaaggtttataaaagtggtgtttctggtaacagttaaaactttttgaggggatattacagagttcaggaaataaaaaatatagaaatttgtgttttgtgtttaaatggaacaagagcagaacgcaaggaagattatgttggtgggtttggatttggtgttgtagaaaattcgcataaaaacgttatggtgctacctcatcatcactattatccatcatattcatcaccttcctcttcttctatgtgtaactgttctgctggtgtaagcgatcccatgttctctgtttctagcaatcaggcttacacttcttctcacagtggtatgttcacacccgccggttctggttctgctgctgtgactgtagcagatccttttttctccttgagctcttcaggtttcaagttctcacctttttgttgacttctgagctatgaaaaaattgaattttgttgttatgtgttggttttgatgtgattttggtggataaaatccaggggaaatgagaagaagtatgaacgaagatgctggtgcagctttcagcgaagctcaatggcatgagcttgagaggcagaggaatatatacaagtacatgatggcttctgttcctgttcctccagagcttctcacaccctttcccaagaaccaccaatcaaacactaacccggatggtaagatctccctagcctctcacttaaacgtttcccgtttttgtcaatttgtcttggtttcatgtgttcttgatctcttgttatcatgtttgatgcaactaaaagccattatgatggtattagaatgtcaagttttttaccagtgttacctcttagtggatacatataggagtggaatgtttagtatttatgctgattacaagaatctgccgttgtctatgtggatgacagtaacctgtggcagtggtgacaggaggctcattgcagctggggattgcttcaagcgctagcaataacacggctgatctggaaccatggaggtgcaagagaacagatgggaagaaatggcggtgctcaagagacgccgttcctgatcagaaatactgtgaaagacacatcaacagaggccgtcatcgttcaagaaagcctgtggaagtccaatctggccaaaaccaaaccgccgctgctgcatccaaagcggttactacaccacaacagcctgttgtcgctggtaatactaacagaagcaatgcccgtgcatcaagcaaccgcagcctcgccattggaagtcaatatatcaatccttctacagaatctttacctaacaacaggtgaaaacagatttttaatactctgcatattcattgttagttcatatctcacttactgactcttgcaaaacagaggagtttcgatatatccttccaccgtcaacttacaacccaaggaatctccggttattcatcagaaacacagaaacaacaacaacccttttgagtttggacacatatcctctgattcgttactcaacccgaataccgcaaagacctatggatcatcgttcttggatttcagcagcaaccaagagaagcattcagggaatcacaatcacaattcttggcctgaagagctgacatcagattggacacagctctcaatgtcaattccaatagcatcatcatccccttcctccacacacaacaacaacaatgctcaagaaaaaacaacactctcgcctctcaggctatcccgcgagcttgacctatcgatccaaaccgatgaaacaacaatcgagcctactgtgaaaaaggtgaatacttggataccaatctcatggggaaactccttaggaggtcctctaggtgaagtactaaacagtacaacgaatagtccaacatttggatcttctcctacaggggttttgcaaaagtccacattttgttcactctctaacaacagctccgtgagcagccccattgcagagaacaacagacacaatggcgattactttcattacacaacctga

SEQ ID NO: 165950 - DNA, 579 bp, Arabidopsis thaliana landsberg; identical to SEQ ID NO: 74722
  unsure (1)..(579): unsure at all n locations

SEQ ID NO: 165951 - DNA, 527 bp, Arabidopsis thaliana landsberg
  unsure (1)..(527): unsure at all n locations
gtacggcatcaccgcgccgatcgacgtgcacctaatgatcgagccggtcgacgccatcgtgccggcgtttgccgaggccggcgccacgcgcatcagctttcatcccaaagcggtcaagcatgtcgatcgcaccatccagttgatccgttcgcacggctgcctgccggggctggtattcaatccggccacgccactggactggctcgattacgagctggacaacctcgatctggtgctgctgatgtcggtcaatccaggcttcggcgggcaaagcttcatcccgtccacgctggacaagctgcgccgcgcgcgccagctgatcgacgcgagcgggcgcgacgtgcgcctggaagtcgatggcggcgtcaaggcggacaacatcggcgccatcgccgtggccggcgccgacaccttcgtggccggctcggccatcttcaaggccgctgattacgcggctgaaataaacgctantacgcgcggcagttgcgtattgatgaggctgtttgcccgtgtcgtgtgttctgcga

SEQ ID NO: 165952 - DNA, 1319 bp, Arabidopsis thaliana landsberg
atgggtgttaatgtaattacgataaatatcgtttatatagttgatgtgaagtcttcctcttcccaccaaaatcactcaacacagtcgagagaagatgaagatgatcctgatgacgacgatgcaaaacgctttctggattctcttggttttttccatctcaatggcttcttgctccacgattccatcgcttgtaggtaaataatctggtgattctgttatacttttcccgagaaaaaattgattctttttctctcattttccttcactttctcgttcgttttccaggtccacaaatcggaatcaactacggagaatacagctccaatcttgaagatagtagtaatcttcgattccattgtgtgattcacgagaacatcgaatctttttaactctcaatgacttttttttgtttgtttttccaggtccagtgatcggaatcaactatggtcgttacggctcaaacctaccaccaccggaagcaataccatcgctagtcaactctctctccatcaaacatgtcaaaacctttgacttggatccaagaatcaccaaatctttcgccaacactggaatcactctctccctctgtatccccaacgacaagatcccatctctagccaccaatctctccgaagctgaatcaatcatcagaaacttcatcttaccttaccacaagaacacaatcatcacagcaatctccgtcggaaacgaagtctccttactcccgcaattctccaaccacctagtctcagctatggtcaacgttcacaaagcaatcaagagatacagattacacaagaagatcaaagtctccacaacgcattctctcgcgattctttccagaagattccctccttcgactgctgttttccatcaatcgatcggtgattcggttttggaaccactcataaggtttctacaaagaacaaattcaccgctcatggtgaacgtttacccttatttcgcttacgcatcagaccctagccacgtgtcactggaatacgcaacgttccgttcgacttcaccggtagtgaccgacggaaaataccaatacacaaatatattcgatgcaacgttggatgctttcaacgtggcattagagaagatcaaccacggaagcgtgaaggtctacgtagcggagaccggttggcctactagagggaatgatccatacacaagcgtggagaacgctcgtgcttataaccaggggttgcttaagaaactaaccacaggtaagggtacgcccaggcggcccaatcctccagtgataactttaaacttcgaaatgttaaatgaagatttgaaacaaggagcggttg

SEQ ID NO: 165953 - DNA, 2197 bp, Arabidopsis thaliana landsberg
atgattttgagcgtaagtattatggagttcaattccccccccccccaaacagtttactttgcaacgtttttgcgactaaatatagactttttttttaatcaataatatataaagtctcgatttcttgtttttatcgtttcttcttcttctctttcaatctctttacagttctgcggttaaatgctctcacctccctcctcttcttcaactcgatttcttgtttttattgtgtagatctagggtttctagatttagattctcttccctatttcaatccaaccccttcgctttctaatttcaccatttctagatctagggtttcttcattcgttatggctgctagtggtaagggaaaatcaggtagagatagaggtagaggtagaggtcgaggtcgcgaatcgtcaactgaagtccgagtcttccagggtaaaaatccagtgttaggttcgagttgtcacagagcctcttctcactcgtcgaaccctaatttggcgacacattctgctacacaataccataggagccgatcttcatagtatctgccggctattgtaccaaagacgacgccaccccaaatgacactaaccccgactaattcttgttaacccttgatctctggttctcaacaaccgcctcccgttcatcgcaatctgcatcctactcgtcaacgtcaggctcctacgagcgaccaacaacctcctactcgtcaacaaaaggctcctgctcggcaacatcaatcttcgggtcttcaacaacatcctcgtcaaacggagcaacaaaaccctaataatcatgaagaggaagatggggtagaagattgggaagaagatggggaagaagacaaggaagaagaagaagaccctaattcccccgaagaagaagaccctaatgtcgactatcaagatctgttggattctttactagcccttccaggtcgacaacatcttccacttctgtctgaaaagcctatccctggggtcgagactctctggtaatctctataattctctccttctagaaacagaagaagattatgaaatggtgataaagctaagtatggtctggattctttgtgttggactgcactatttgttttgtgttggctctagtgcaatgattttgctttagtgttggctctagcgcaatgatttgggctgcagtttttgtttggtcttaatgtctttgttttgtgttggctcacctaaagtcgatttggtctgaagtctgtgcttggtctttttgtatttgttaaacaatgtctcacctaaagtcgatttggtctgcggtcaacagttttggtctgcttgtctttgttttgtgttggcaagtcgatttggtctgcagtctttgtttggtctgcttgtaatgttaagtgttggctcacctaaagtcgttttaaaatagtctttgttctggtctgtagtctttgttttgatttgcagtctctcttttggtctacgagtttttgatttgtgttcttgttttaaaaccatttcatttttgctaattctctgttggatgcagcaactaaagccgattatgtttatatttgcaatgtcttggtggtttacctacagtgacataggcttaatactctgtcatacttttttacaggtttaaccggcacaaaggaaagctgtctaaagtaatttctggaatagtttggaggaagtttgatgggcattatttcagttggaaggttactccaatagctactcagagagatacttcagaaattttgcggtaatgtcaactattacttatcattctgttattgtttactttgactgactcttagtatctttgctaacctacctgcttgttatgtagcaaaagtatattgggatcaaggcgttactaagctcgtcaaagaaggtttcttggttatagccaagacaaggatgaaaaggattgtcagtcaagcaaagaagagtggtgatcaaccaccgtggattggtgatacactttggaaacagatgttggtgcattggaacactgaagatgctcaactgaaaagtgaaacagcttcaaactgtacaaactaagatcggggaggtcttggggtgcacaaacacttagccggtcagaaatcttttgtgcaagttcatcaagaaatggtaagagttgtctttccatccaaatagttcacttaacagctttcatattattaccttcacataagctgtctttttctgtt

SEQ ID NO: 165954 - DNA, 330 bp, Arabidopsis thaliana landsberg
gatcgacaccgcgaagcgccgctggacacccgcatccgcgccggcggcatggtctaaaaaggttcggtgcagcgctcggccgatgcgctggacgtgcgcttcttggtcaccgacttcaacaagtcggtgccgattacctaccgtggcatcctccccgacctgttccgcgaagggcagggcatcgtcgccctcggcaagctcaacgccgacggcgtggtagtggccgatgaagtactggccaagcatgacgagaagtacatgccgcccgaggtcaccaaggccctgaaggaaagcggccaggccgccactggcggggaggcaaggccatga

SEQ ID NO: 165955 - DNA, 3848 bp, Arabidopsis thaliana landsberg
atggttctcttcttctccactcgttttctcttcttctccatcttcttcccttgcctcatctctatcactctctaccaactcgactcattcgagccagcttcacttcccgcggactcactcatcacctctcccacttcaatcccgccacttctcaacgacagatttctcaccggagctgagtttatcggcgtcggtcttctcaataaccccgaggatatcgcctaccataaggactctaatctcatctatactggttgtgttgatggatgggtgaaacgagttagtgttcacgactcagctaatgactcaatcgtagaggattgggtcaataccggtggtagacctctcggtatcgcttttggacttcacggcgaagtcattgtcgccgacgcaaacaaggtttagacgattctttattttttgaaatcgaattttgaaaatcttatcttaggtttgatattgttggtgtgtgtagggattgttgagtataagcgatggcgggaagaagacggaattgttgacggatgaagcagacggtgttagatttaagctgacggatgcagttaccgttgctgataacggcgttttgtatttcacagatgcttcttcgaaatacgatttctatcaatttatctttgatttcttggaaggcaaaccacacggtcgtgtcatgagctttgatcctaccacacgtgccacacgtgttcttctcaaagacctctacttcgctaatggcatatcaatgtcccctgatcaaacacatttcgtcttctgcgaaaccatcatgtatgtgcattacatttgttatgtttctaactcaaaaccaattggtaattagtttttatttatagattttgtatattactttaggagaagatgcagtaagtattatattagtgaggagcgtgttgaggtatttattcagggcttaccaggttatccagataacattcggtacgacggagatggacattactggattgcattgatttcggtatttatactataattgaaatcttttcattaaagtttatgatgagattattatatcatctttaatcttttatttgatcattgtgttgtgaaaacaggaagtaacaacgtcatggaaactctcgatgaaataccttttcttgaggaaactcatatacatggcggctaagtatggcgtggaactactatctataaagaatgcagccgttttgcaagtggatttggatgggaatcctatcgcaatgtaccatgatcatccattctctcacataacaagcggagtcaagattgggaaccatctctattttgggagcctcttgcattcctacattactagactcgatcttttaaagtatcccgcacaaaagaagctttaaacatcaagtttaggagtattcactgtcacaaaatgtaaagtcttcgtccctggcacatcatcatgtccttttgtcttcgtccctggcacatcatgtacggttgttgtaaggtcgagttttggtgttaaggtgttgttagtttataatctttgtgaatatggttagcttcttggtgcattgcaaggttaggtgaggtgaatagaggtggcgaataggttttagtggtttcacttttcgttgagctagtgtattagtccatgtttgctcgttcgttttgcgttagttttcggagaagctataagcttctatctggaggttttgtggacggtgttgttctcggaaaactaaagtatagcagaagattgcaaaatacttcgatggtttattgatatgaattgcatgcctttaaatagccatgactacaaagactacgtcgttcacaactaaacaatgagaaacttgcggaagtaagctaaagactaggaccactataacaactactactcgactcttaaagaccatgagtttattcaaacatgagaacaacttaacgacttattcaaaacccaacagacggagagtaatgcttgtgacaactcagatgaggattccagtacttcggtattgcggcaacagcgtacttttccgagcttcgcggattcggtgtttctcctcctaacttggtcttgatcactcagccgcgatcatttgtacttagagttatagtgttgttctttaattttctgtagattgcttctctctccttctattcttctttgtcaaaaataaaaatggtataaaacttcatcttttacccaaaaaaaaaaatgtaaagtcgtgtacagtgaatattactctgttttcaactccagaaaacataattgggcctattgggaatataattaaagcccacgagattcgactagcgagagttgttgttggttacgtaatttagcgcactacggaacaaagaagaccaaatttatacgagtcaacactcaacagcgatttgatctgcgatttgatctgcgatttgatcatcaacaacaatcactccaaattttgtctgctcaccatttttccacaaagccaattctcttgtatccaatgcctatgttctactcctctcgttttctcttcttcttcaccatcgtccccttactcgtctctatcgctctctaccaactcgacacatttgacccagctccggttccttccgaggcatacgcctcctctactacttcaatcccgccgcttatcagcgacaaatatctcaccggagctgagtttattggcgtcggtcttctcgataaacccgaagatatcgcctatcatcaagactctaatctcatatatactggctgcatagatggatgggtgaaacgagtcagtgtccacgactcagctaatgactcagtcgttgaggattgggtcaataccggtggtagaccgctcggaatcgctttcggagtccacggcgaagtcattgtggcagacgcatacaaggtttggattcgtgaactttttagaaatcgaattttgaaaatctcgatcttaggttgattagtgtgtgtgtcggtagggactgttgaacataagtggtgacgggaagaagacggaattattgacggatcaagcggaaggcgttaaatttaagctgactgatgtagtcgccgttgcagataacggcgttttgtatttcactgatgcttcttacaagtacactctgcatcaagtcaagtttgacattttggaaggtaaaccacatggccgtctcatgagctttgatcccaccacacgtgttacacgtgtacttctcaaagacctttacttcgctaatggcgtctccatgtctcctgatcaaacgcatctcatcttctgtgaaactcccatgtaagtcccctgactctgttggattttactaatatccgactcataccagttagcaatgtgttaattcatcgatatactatatctaggagacgatgcagcaagtattacattaatgaagagcgtgtagaggtgtttattcaaggcttaccaggttatccagataacattcggtacgacggagatggccattactggattgctatggtttcggtatgtaaaccagttgaaatattttctttaaggtttatgatgatgagcttttgtatagttttgctcatagtgttgtgaaaacagggagcatcaacgttgtggaggctctcgatgaaataccctttcttgaggaaaatcacagccatagcggctaagtatggcgtggaacttatgttcatgaagaatgcaggtgttctgcaggtggatttggatgggaatcccatcgcttactaccatgatcagagactctctcacattaccaccggtatcaagattgggaactatctctattgtggaaatatcttgcattcgtacattatccgactcgatctcctgaagtatcctgcacagaagaagaagctttgaaacatcaaa

SEQ ID NO: 165956 - DNA, 1100 bp, Arabidopsis thaliana landsberg
cgccaacaacaaacacaacctctaagacaagggtgaagaagatgagtgacctccaagcaaacaaagatgagacgactgtggatagacagtcttcctcgtcggtggatcttgatgggccatctccgctgagaaagatgatatcggtggcttctattgctgccggtattcagtttggttgggctcttcaactgtctctgcttactccatacgtgcagcttcttggagtcccacacacaaatggtcatctttcatttggctttgcggtcctgtctccggcttgcttgtccagccatcagtcggttacttcagcgaccgatgcacgtcaagattcggacgtcgtcgacctttcatcgccactggtgccttgcttgttgcccttgctgttatactaattggatttgcggctgacttcggccacaccatgggagataaactcgacgaagctgtcaagataagagccgttggtttcttcgttgtcggtttctggatccttgacgtggctaacaacactcttcaaggaccttgccgtgcttttcttggtgatttagcagccggagatgctaagaaaactcgaactgccaacgcgattttctctttcttcatggccgttggaaacgttttgggatacgctgcgggatcgtacactaacctccacaagattttccctttcacagtgactaaagcatgcgacatctattgtgcaaatctcaagagctgtttcattatttccatcactctcctcatagtcctcacaatcatagctctttggtacgtggaagacaagcaatggtcgcctaatgcagattccgacaatgagaaaactcccttctttggcgagatctttggagctttcaaggtgatgaaacgtccaatgtggatgcttctagccgtcacggccttgaactggatcgcatggtttccttttcttttatacgataccgattggatgggtcgtgaagtgtatggtggagactcagcaggagatgacaaaatgaagaaactatacaaccacggaatccaagttggttcgttggggttgatgcttaactctatcgttcttggagtcatgtcccttgttattggagtgattagtaagaaaa

SEQ ID NO: 165957 - DNA, 1167 bp, Arabidopsis thaliana landsberg
ggaacctggtcccgctgaagctaaacagtgttcgtgttgattggttagctgcttttgacatattcttaccaatgcttaaaacccgagttcgggactcagttaggttatgtgttgataagtatttttttagtgctttacctgcgcttgaggaattagtcttggttagtgttaactggggaggtaaggatgtcaacgtatcaaatgcaagcctcaaaatcctaacagtaaattacaacatttgtttaggcactttttcggttgatacacctagtcttgtttacttctgtttcactgagtatgttgctatagactaccctgtagttataatgcaaaacttatttgaggctagaatcagccttttggtaactcaagatcaaatcgagcgagcaagagcgccaaatatcgattgggtggaggatgatgttgttctccgactagttaatatggagaagctcataaaaggcatacgtaatgttcagtatatgtacttgtctccgaatactctgaaggtcagttagcgttaaagtcatgttttgagacatgtaatggcaaaaagtctaatagtgttttgtcttgttttcaggttctttctctgtgttgtgaatcgatgccagtgttcaacaatctcaaatcgttaactcttaaaagtcacaagagtcgaggatgccaagcaatgccagttcttctaaggaactgtccacatctagaaactctagtccttgaggtatagtaacaagtcatttgccaaacgtgtacagacaagttcttactttgaactgaataccttaattgtctcctttcttatgctttcagggtctattgcaccatgtcacagataaatgtgggaatgcttgtgactgtgtttcccgagaagtcaaaggtcggtcactcacatcttgtccagtaaaagtgttagagattaaagggtttcaaggaacaaccaaagagatgcacgtgatgaagcatttcttggactattttctgtgtctgaaggcgatgaacatctatgttgaagagaatgatcctacagagctcagattccctgaagtgtctaaatgtatcatgcagatgatggaagaatacaacaagttatcgagttgcaacgtcgaactccttgtgactgattacttctctgagaagtggactgcaaaaggaagaattctctga

SEQ ID NO: 165958 - DNA, 2078 bp, Arabidopsis thaliana landsberg
atgtcggctagagctcatcctgtggacgatgacggagagatttccccggtggaaagatcttccccgcggcaagcaaatacaccgtatgtccacaaagtcgaagttcctcctaagcaaaaccttttcaatgagttcatgtacacttttaaagaaactttcttccacgatgatcctctaaggcatttcaaggaccagtcaaaatccaaaaagctcatgctcggtatccagtccgtctttccggttatcgagtggggaagaaaatataatcttaagttgtttcgcggcgatcttattgccggtttaaccatagccagtctctgcattcctcaggttagaaaaaaggttcaattacttctgccacaagttacttatgtaagaaagcataaactgatatgtattcaaatggtttcaggatattggatatgcaaagctcgcgagtcttgaccctaagtatggtctatgtaagttaatatcaatatcctaattaagcctcatttacgtttttattgtatgttttctttgaaaatgatacaacaattcttattattggtgtttttttttgtttcaaattcttgaatagattcaagttttgttcctccgttggtgtacgcatgtatgggaagctcaaaggatatagcgattggacccgttgcagtggtttcactcctattaggtactctgcttcgtgctgagatcgaccccaacacaaaccctaatgaatatctccgcttagccttcacctccacgttctttgccggtgtcactcaagcagcactcggattcttcaggtaacatactaaatactaattccaacctcacaaataaactatgcatcaagtttagagattcttgtttatctaaaacttcttaactttggtttcagattgggtttcttgatcgatttcttgtcccacgcggcggtggtaggtttcatgggcggagcagccatcaccattgcgctgcaacagctcaaaggcttcctaggaatcaataagttcacaaagaaaaccgatatcatcgcggttctttcttccgtaatcagctcagcccatcacggagtaaagagtctttcaatcactctgtttttagtatctttcactctttatgtatcttcaccgtttgatatcaaatgcttgcagtggaattggcagacaatactcattagtgcatcgttcttgatcttccttctcatctccaagttcatcgtaattcaccaaactatcgattgcaatctctcgtgatttctatttccttgttcttatatgatcttataaaaacaggggaagaaaaacaagaaactgttttggattccagcgattgctccgttagtatctgtcatcatttcaaccttcttcgtctacataacccgagccgacaagaaaggagttcagatagtaagcataaccttataggcttaaatatataaaccctaaagttacttgcgatgtaagttattttactttgccttgtcttaattttcttctcctcaggtgaaacatcttgacaaaggtctgaacccttcttctttgcgtctaatatatttctcgggcgattaccttctcaagggcttccgcataggcgttgtctcaggcatggttgccttgacggtacttacttacataaaccctaaaatttatgttttactattgaattttgatttaatatgtaaacgtaaatgcaagcacaaatctttgtaacaggaagctgtagcgataggaagaacatttgcagcaatgaaagactaccaaatcgatggtaacaaagagatggtagcattaggagcaatgaacgtaatcggttcaatgacctcttgctatgtatccaccggttctttctcaagatccgccgtcaactttatggccggatgtcaaacggcagtctccaacatcatcatgtccattgtcgtcctcttaacgcttctcttcctcactcctcttttcaaatacacacccaacgcaattcttgcagcgatcatcatcaacgctgtgattcctttggttgacgttaatgctaccattttgatcttcaagatcgataagctcgattttgttgcttgtatggggctttttttggtgtcg

SEQ ID NO: 165959 - DNA, 1088 bp, Arabidopsis thaliana landsberg
agaggaagccaaaaccataatggagttgttaatgtgttcgggtcaggccgagtcaggtggttcttcttccaccgagtcttcttcactcagtggtggactcaggtttggtcagaagatctacttcgaggatggatccggatccagaagcaagaaccgggtcaataccgttcgtaagtcgtctaccacggcgaggtgccaagtggaaggttgtagaatggatctaagcaatgttaaagcttattactcgagacacaaagtttgttgcattcactctaaatcatctaaagtcattgtctctggtcttcatcaaaggttttgtcaacaatgtagcaggtttcccccttttttcttcttccttttatttactcattttgccatttccggtgatcggaatagttctaagggaaccatagctttacgcttttttcaggttttatgttccttttgagctttttgagttttggctcttaacgtcattgaagagtcttatcaaaacttaaactttacagctagttattatgtggtcttgtctcttgtcttatgcattatttaggttgcttttctttgaagctttcttttctttatatcaaatcaggtttcaccagctttctgagtttgacttggagaaaagaagttgtcgcagaagactcgcttgtcataacgaacgacgaagaaaaccacaacccacaacggctcttttcacttctcattactctcgaatcgctccatctctttacggttagatcccaatatacacagcccttttcagctcaatgagtctcaaaaacaagttattgaatttcctgtgtgtcaggaaaccccaatgctgcaatgattaaaagcgttttgggagatcctactgcgtggtcaaccgcaagatcagtgatgcagcggcctggaccgtggcagattaatccagttagggaaacccatccacacatgaatgttttatcacatggaagctcaagctctactacatgtccagagatgataaacaacaatagcacagattcaagctgtgctctctctcttgtgtcaaactcatacccaattcatcagcagcaacttcagacaccaacatatacatg

SEQ ID NO: 165960 - DNA, 1108 bp, Arabidopsis thaliana landsberg; identical to SEQ ID NO: 10343

SEQ ID NO: 165961 - DNA, 2288 bp, Arabidopsis thaliana landsberg
  unsure (1)..(2288): unsure at all n locations
ctccatcgggtcattgtaatggaacatgaattcgacccgacccaggcccattaagtctcactgtgcatctcctgcttcgttgcgaaaacccccacacactccattgtcactcgtaaactcgccgccgtggagagagaagagagaatggaggatatcgaggatttgttggccggaggagtcggtgtgcaccaccgggattccgattacccttgaatgcagtcgggattaatccgaagacgaataagagcaaacgtattagctcgaaaccggatcaaattactgcttcgaatcgtgactcgcttgctccaccatcgatgaagattccaggaactcaggtcactctcctctctcgatttcattttctcatttgcttcggtttctgtatctatcaacgtttttgcgtgcacttacatttcgtcttgatgatttttcgcagacgatatacatcaagacgtttggatgttctcataatcaggcgagtcattttatgaatcttaagtgctttgattctgattttgtagttcttagtgttttggtgttaatagatttctaaatgcctcatatacacttacaatgtttgttactctagtgattgagatgaaatcttttagctaatcgtatctggtcttgtctcgttgcttggttattgttcagagtgatagtgagtatatggctggtcagctttctgcatttggctatgcgttgacagaagtcccggaggaagctgatttatggctcattaacacgtaagcttcagcctcgtattctgtttacccgatgcaatggctatgtgtttttgctgttgagatatagttcacttggtcacggtctaatattgtagatttatagtttatggcgcagcattttgctcgatatagctttactttgtgtttactctatatgtgcggttgatgcagctgtactgtgaagtcccctagccagtctgcgatgtctactttgataacgaggggtagaagtgggaaaaagcctcttgtgattgcaggatgtgttcctcagggcagtcgtgatcttaaagaactggaaggcgttagtgtagttggagtccaacagattgatcgtgttgttgagattgttgaagaaactcttaagggtcatgaagtacggttgctgactcggaagactttgcctgcgcttgatctcccaaaggtgggtaaaaagagtttaaacttttgattgttttgactttaatgctgagtatggctattcctagtaccaaacaagtagaagccaaaatcttgatttcagagacagttctttgatcctataaattttgcttagtctttcattacacaatttcttgctcgatttcatttgggttcgattaatggggactaataagtcattattttccactgcaggtgcggaggaacaattttatcgaaattctccccattaatgttggctgtttgggtgcctgtacttactgcaagaccaagcatgcccgtggtcatttaggaagttacacagttgatagtcttgtaagcagattcagcttcacagcgaagagtttttttcaatttgtatccagcttttgccccctttttttttttttctgcctattgagattcctaaattgcaggtggagcgggtgagaactgtaatctctgaaggagtcaaggagatttggttaagcagcgaggacactggagcatatggttccttttcaaacctttagttaaagacataattttgtatttccttttcattgggctaatgcccccaaaatgttgcaggtcgtgacataggagctaatcttccaatactgcttaatgctatcgttaaggaacttccttctgatcaaagcacaatgctaaggattgggatgactaatccctccctctattttaaagcatccgaaagaaatagcggcagtgttacgtcacccatgtgtcttttcctttctttatgnccctgngcaatctggtggggattctgtgttgacggtgagtcatgagtccagagttgtttacgactgccaaattcttttctagtcttacctgaatatattttgcaggccatgaacagggaatatacagcaagtgaattcaagactggggtagacaccttaacagaacttgggccaggaatgcaaattgctactgatataatatgccgttttcctggttagtgctggataaacatggaagtctgtattggtggtcttttattttcttcgaattaacatattcctcttcatttaagtgttgagacataaaaaacatcataccgccatgcaaaattactttaatcgcatgtattaattggat

SEQ ID NO: 165962 - DNA, 959 bp, Arabidopsis thaliana landsberg; identical to SEQ ID NO: 13218

SEQ ID NO: 165963 - DNA, 1487 bp, Arabidopsis thaliana landsberg
aagcataacatcttcaaaaaaccacttcttcaaagcttaaatttctcatggtttttactacacacaacaacaattactcgagtttattcactcttttaaagttttggcttattgttctagagaatttttttacctggatttgtccactataaggcaaatctcctatacaagtagcaaatacgtgaagcctcgaggatcaaaatcatttagatctagagatttgtttctcttgttttggcgagtgaaattgtagtaacatatttcttccaatgggaatggagatgttatggtgaaccaccttatttgtgttgacaaatgaaaagaacaaaacatgtatatatagaagaattcttgaatcatatttagacatgtatagtataagaaataaaattttggttggacaatttttttgaacttcaactactcttcacggatattttagaagaacgatacatatgatcatctattactgtcggttaatttgactttctcatggtccgtaaacgatgggatttttattaagaaacaaaaactagaaaaaaagaatcattacttgaaaaatgtagctttcatttgcatccacatagatatattattctacatgttggtaaacaaaattgtacaaccaaaagaaatagtagagaggacatggaaataaaggaaaaaaggatttggtcacacagctgtaattagcaaagcataacagaaaacctcacaatgagacaaactcgccacgtctcccccaaaatcgtaacgtgtctccctcacactccttcacggtttccatttttttttgtattaatgtataaatttaccaaaactacaaatcctaattaacaaactaatctcaattcttaattactttatacagaagacaacaaaagagaatcccaaaatggcaagtttatctactgcagctttcctccgcaacaatgcactcaatgcaggtgcaactcctagagttcttctccccgtcacgacaaaacacttccacgtacgtaaagattctttctttttctgattatttttatcacatttttaattaattaacgttattcgtaagttcttgcaattattaatcaaagacgagtacgaggatggagaattccgtttgtgatgaatccaacaactaatgcacaagaaaaagtcgtcattatcaatctcccaagaatatattaggtaaaattagtaaacagaaatgtcacttgtgcaaccaaatattgaaaatacggttttgaactgaaaaaaattggaccggacgtgtagttggcgaagaaggcggatgaaggagcgaagacgatctttgacgctaccggaaatttgaaggataagacaagaatgcagcagaagaaacgttggataaagtgaagtaaaggacatgatggagaagatcaaagacatggtgatcggaaaatccgaggaaaccatagaccatcaaatccactgtcaagagtgtcgaacgaaacatgaatataaatcgtatttca

SEQ ID NO: 165964 - DNA, 1613 bp, Arabidopsis thaliana landsberg
atcatcaaatccgagatgaattggtaagtcttctctctgtttactcctttgcaactttaatctgatgtttctctacttttctatgacttgtttttttttttcattacaggaagagcaattaggcaaaactgtcagtattggtgacgttttcatcaaaacacatacaaaacctgatgggacgtatgttgatcgaaaggcggagaagattgcagagttatattagaagaatttgcaactgaggcagtctgagctcgaggctgaagcttctgctgtttcagatggcacttcgcgggcacgggagctcacagctgaggaatgtacaaccatatttcttgaggtaacgttttatgttcccaatttagtgttttcgagttatctttttcattctctaatctcagcttttatcatactttgtagtccactgagagggattcgagaggcgttccttatggagtaggaagcctcaaagagtctcttgtcaatggcaagcggaagcaagtaggtgactcaacttcttttgtggctttgcaagaacaattactcgaagctcaacgcaagatagaagagcaggcctcttacaatcagaggcgtgaatatgagattgctttgcgtgaagctgagaaatccctagctgctgatgagaagaagaagaagattgagcacttgtccttagtgtaggtcccaaggcggaggccgaggatcaagaggttggggcaggtcctccttccaaggttcgactcggtctcaggaagtgagacagtcgtccaattctggtggggggtctgcgggaagtaggcctttccactggtcttacactcacgactgtgatcatcctatcgttgaggacgaggctgggttggcgaacctgctacgccacatcaaagggaagaacagccagattcccggagtgaagaacatggccgaggctgcggcttttgctgacatgatggcgaaggagggccaggtaacaatcgataactgcctccttcaaattccattcttatgccagttctaatctccgttttgcctttggcaggcgatagctgccacgaacaagcaggttgctctctatgagcaacgtctgagcaaggttccctcggcgagcgagctcaaagaagggaagaccctcatccaggagctaacaacgagtgtgaaggctggtcaagagcttgaggtttcgttccatgtatgcctctgttatgacttgtttgtatatattttatcgatgatacggtgattctgaagttattatggtttcaggcggagatcgagatgttgaaaatggagctgtccactttgaaagatctcgagaaaggttatgctgagaaaatcgggctcatggagatggaaatttggggattgtagggtaacaagcagatggcgagaaaccagattcatcacttggcgcagaggagggaggagctctccaaaagggtgatggacctgagttcgactgcgtaaggagcgaagaagatggttcacgatgctaaggttggactggccaccgcatattcgaggttgctggctgcgatcacccaaaagtgggtcgccaagaaggagaacacaaagctggaaggtcaagcagccgaggtggagtcgaacctggctttgtc

SEQ ID NO: 165965 - DNA, 1390 bp, Arabidopsis thaliana landsberg
ggccacattgggcccatcaacgtcgtatcattgcacctaagtttttcctcgacaaagtcaagggaatggtgggattggtggtggaatcagcgatgccaatgctgagtaaatgggaagagatgatgaaaagagaaggagaaatggtgtgtgacataattgtagacgaagacctaagagctgcctctgctgacgttatctctagagcttgctttgggagctctttctccaaaggcaaagagatcttctctaagcttagatgtcttcaaaaggccatcactcacaacaacatcctcttcagcctcaatggcttcacgtaagtgaattcaaaagtcatttctatctctatatatattttattaaggcagtgtcatgtaatggtgttaaattttgtggttgcaagtgatgttgtgttcgggactaagaagcatgggaacgggaagattgatgagctagagagacacattgagtctttgatatgggaaaccgttaaagaaagagaaagggaatgtgtgggagatcacaagaaggatctaatgcagttgatactagaaggggccaggagtagttgtgatggcaacttggagaacaagacacaatcttacaaaagtttcgtggtggacaattgcaagagcatctattttgccgggcatgagaccagtgcggttgctgtctcttggtgtcttatgctcctcgctctcaacccttcttggcaaactcgtatccgcgatgaagtctttcttcattgcaagaacggtatacctgacgcagactctatttccaacctcaaaacggtaatttacaagttacaaccttgcctctcatgtcaagttccttaaactctcttaaaccaaaaaaaaaaatgttccttggactccaagtatgactattttcataacctaacatcacttgaataaaaatataggtgacaatggttatccaggaaacgttgaggctatacccaccagcagcattcgtgtcgagagaagcccttgaggacacaaaactcggaaacctcgtggtgccaaagggagtgtgcatctggacgttgatccctacattgcacagagaccctgagatatggggagctgacgcaaatgaattcaatccagaaagatttagcgaaggagtctctaaagcctgcaaacaccctcagtcattcgtcccatttggcttagggacaaggttgtgtttaggaaagaattttggtatgatggagctcaaggttcttgtctcacttattgtgtcgaggtttagctttactctctctcccacagatcaacactctccggtgtttagaatgcttgtagagcctcaacatggtgtcgtcattagagatgtaagacaacaagatatgtcgtcagcttatggctttagtttcaatcctgtgtaa

SEQ ID NO: 165966 - DNA, 876 bp, Arabidopsis thaliana landsberg
gaccttcattgttcaaagacggaaagggttgtggggcttgttacagggtgggtatatatatataacaatatcagttcattgaatatgatatttgtaatgtagaactatatactaaccatgtttatatgttatagcttaaatgcgaccatccgttgtgcacgaaaaagccgatcaaggtgatgatatcggatgagtgtcccggctgcacgaaggagtctgtccattttgatcttagcggtaaggcctttggtgcattggccaaacgtggcaagggtgatcaattacgcaaccttggagaactaaaagttagttacaaacggtacgtatagtcaaaacccgatttggttcggttaggtcggtttttttggatagaaaatattcacaaatatgaatagtcattttaaactaatgttatattaatttactagagttaatttgaaatataatattttagtgacttattttgttcgataaccaataaattctaataaacttacattgatgttggattgtaaaaccatatactaaattctactcagtatcatacatatatttagtgcatgttgcaaacacccgaagactatgatcgctatccatgtcgacgccggagcaaatccttactacatgtcattcgcggttaagtttgcaaacggtgatgggaacttcgcctgcattgaggtccaaccggccggaggacagtatatgaaaatggaggaaatgagatccgctgtttggagactaagccctggtgttcctttgaaaggtccgttcaacatcaggcttacctccgccgtgtccggtaagaagatcattgcgaaaggcgttatcccggaaaagtggagtcctggtgctatttaccattctaaggttaacttc

SEQ ID NO: 165967 - DNA, 466 bp, Arabidopsis thaliana landsberg
atggtcaacccaactatttccgacgatttactcgctaagatagctaagaaaatagcagacaaatgctggtgggaccttcagccactactacgatcaggcaatcgtggaagagacattttcagcttgtgcggcgatcccgatgacattcaagctagaggtgaccattatccatccggagtcgaggaagaaggccgtcatcgaccattttgcttaaggtgtcttgctgctgacaatcccacaatagtgtattacgaggttatgcgtgttctaacgcatcaacgtgacatccagggagccattaatcttttgcgtcgtcatgctccagcacaagcggatgcaacacttgcttccggtatactattcataattgacggaaattacatctgggcgttatgtttcttcagctattcgcaaaccatcattatccattgggcacggaagagactcgggattcgtgtagcagttc

SEQ ID NO: 165968 - DNA, 493 bp, Arabidopsis thaliana landsberg; identical to SEQ ID NO: 69960

SEQ ID NO: 165969 - DNA, 2681 bp, Arabidopsis thaliana landsberg
ataaaaggttgtactctctggaggatgtgaatccagttttaactcctttaccgcctgaggggttcactattctatcacaaagtgctctcacggagctgaatcgacctttcacgcctgctgagattgaagaatcagtacgaagtatagggaaatttaaggccccaggccccgacggctatcaacccgttttctaccagcagaattgagagactgtggagtcgtcagtgataaggttcgctttagacttctttgagacgggaatcctaccggagagtatgaatgatgctttggtagtccttatcgccaaggtagcgaagccggagctagtaactcaatttagaccaataagcctatgtaatgtccttttcaagactattactaaagctttggttataagattgaagggagtaatgcctctgcttattggaccagctcaatcaagttttataccggggaggttgagtacggataatattttgattgttcaagaggtagttcattccatgaggaggaagaagggagtcaaaggttggatgctgctcaaattggatctagagaaagcctatgacagaattcggtgggattttctagaagatactcttagagcagctcgactgccggttaagtggatagagtggatcatgaaatgcgtgaccggtccttcgatgactgtgttatggaatggagaacaaacagaggcatttcagccctctagaggccttcgtcaaggggatcccttgtctccatatctgtttgtgctttgtcttgagagactttgtcacttaattgagttatcaacaagacacaaagagtggaaaccgattagtatttcgagaggaggaccgaaactctctcacatatgttttgctgatgatcttattttgtttgcggaggcttcaattagtcagataaggattatgagaagagtgttggagaaattctgtgttgcctccggtcagaaggtaaacttagagaagtctaagatcttcttttcgggtaatgttgaccgtgatttggctaaggagattagcgacgaaagcggtattaaagcaacctgtgatttgggaaagtatcttggaatgcctatcttgcacaagagaattaataaggatacttttggtgaagttgttgagagagtctcttctagattatccggctggaaggggtgtatgttgagtttagcaggaagggtcaccttgtccaaatcggtcctctcttctattccagttcactcgatgagtactatttctctccctacgtccacgttaaataggttggataagattactcgctctttcatttggggaagtacaagtgagaagaagaagcaacacttgatagcgtgaaaaagaatttgtctgcctaagcgggaaggtggtctaggtatgaggcctgcagctctaatgaataaagctttgttggctaaggtcaggtggagaattctgaaggatcgcactagtctttggacacaagttctccgggccaaatataaagtaagagacacaaatgatatgtcatggacggctgtaaaaggtaactggtcatcaacttggaggagtgtgggttcgggactgagagaagtggtgataccggggttgagttgggttctagaagatggcagaaccatcaagttttggaaagataaatggttgagcaatgggctgttgattgacgatgatgtgactactattccagaagagatggcagatttgaaggttcgggacctgtcggttgagggagccgggtgggatatgagccgtattgaaccatttctatcaacacgggacagactgcgactcctctccatggtagtagatacagtgacgggagcgtccgatagagcctcatggggtccaagccaggatgggagattcagtgtgaagtcggccgcgtagtttttacagtggaatcattccccgagaccaaatgtagagtctttgtttgggaagatttggaagtgtgtagtcccagagcgggtcagagtatttatgtggctaatagtgagtcaagtgattatgacaaattcagagagattccggcgacacttgtgtgattctaatgcctgtcaggtatgtaaaggtggagagaagactattctccatgttttacgggattgtcctgctatgtcggggatctggaacagtttggttgcgcggaataacagagcacaattttttagccaatccctactcgaatggatttacgccaatgtgagtgacgggaagctgaaggacgacgtgccttggttaacggtgtttgggatggcagcgtggtggggatggaagtggagatgtgggaatgtttttggggtgacagggaagtgtagagaccgggtgcgttttgtgaaggatattgcaagggaggtctatcaagcacatgctccggtgttgggaggtactgaagcaattaccagagtagagagactgattgcttgggaaccgccacctgcagattgggttaagctcaacacggacggtgcttcacgaggcaacccagggttagcagcagcggtggggagtcctgagagatagagagggacgctggattcagggcttcgcgctgaacatcggggtatgttcagctccacttgcggagttatggggggcttattacgggctctgtattgcgtgggagagacggatacgcagttagaattagaggtggactctagatagtagtgg

SEQ ID NO: 165970 - DNA, 1480 bp, Arabidopsis thaliana landsberg
ctggccggtgagaaaatggaggtccaaagcagcagcaacaatggtggtcactcttctttctccagtctccgcgtctacctcaactctctttccgcgacgccttctcgcttatcccgccgcgctatttccgtctccacctcttccgacgagatgagtcgcgtccgcgccgtctccggcgaacagatgcgccgtactctccggtggtacgatctcattggactcggaatcgggggaatggtcggcgccggtgtctttgtcaccaccggccgtgctagtcgtctcgacgccggtccttcaattgtcgtctcttacgccatcgccgggctctgcgctctcctctccgctttctgttacaccgaattcgccgtccatctcccggtcgccggcggtgccttcagctacatccgtatcacattcggttagtctcccgcgaaaatcatcactactcctccgatctgttcacggttttctgaaattttaatttcaaaatcaaaaaccgtaactgatttcttttctgttacatttccgttcaggtgaatttccagcatttttcaccggagcaaatcttgtaatggattacgtaatgtcaaacgcggccgtttcgagaagcttcaccgcttatttaggaacagctttcgggatctcaacttccaagtggcgattcgtcgtctccggtttaccgaaaggattcaacgagattgatccagtcgcagttctcgtcgtcctcgtaatcacagtcatcatctgttgcagtacaagagagagttccaaagtgaacatgataatgactgcatttcacatcgcattcatattcttcgtgatcgtgatgggattcataaaaggagattcaaagaatctatcctcaccggcgaatccagagcacccctcgggattttttccgttcggcgcggcgggagttttcaacggagctgccatggtttacttaagctacataggatacgacgccgtttcaaccatggcggaagaagttgaaaatccggtcaaagatatccccgtcggtgtttccggctccgtcgcaatcgtcaccgttctttactgtctcatggcagtctctatgtcaatgcttctgccatacgatctggtccgtacttcaaatttattattttcttattgtatatttccgttttcataaagacggcacgtagtctgagtctaaagctgaaaaacggcggggcatgtgttgttgtaacgcagatagatccggaggcgccgttttccgcggcgttcagaggatcaaacggctgggaatgggtgacgagagtggtggggataggagcaagctttgggatattaacatcacttttggtggcaatgttaggtcaggctcgctacatgtgtgtcatcggacggtcaagagtggtccccatttggttcgctaagattcatcccaaaacatctactccagtcaacgcctccacttttcttggtacgtttctttgtcttcattcattcatcaaaa

SEQ ID NO: 165971 - DNA, 888 bp, Arabidopsis thaliana landsberg
cattgatactgatgctacattgttgtggagactgcccttaaacccccgcctttattgtgttcgaattttcccaagtttttatttcgaggaggagaagaaagtcgtcctgtgttgtaatgttaatgatgataagatcagcaagaacatggtatacattatcggagaggacgatggatatatagaaatccctttcgtacaacctttaaacatacaaagagttctacttaacagtaatagaaaatggcattcaattattttcagttatgttccgagtttggttcaaatccagtaatggtcctctgttattttttttcttaagtatctgtttatgaacaatgtagagctttttttttttgtaaccaaaaattgttttttttttttttgaattttttgattataaagggttttaactttataattaagatactgaatcagtaagagccaacaatggcgatgttgggtaatgttcttcatctctctccaatggtgttagccaccacgacgactacgaaaccatctcttctaaaccagagcaagtgtaccaaagccacgccatcgtcgttaaagaattgcaaaaccatagacgaactcaaaatgtttcatcgttcgctcacgaagcaaggacttgataatgatgtctccactataactaagcttgtagcacggagttgtgaattgggtactcgtgaaagtttgagctttgctaaagaagtgtttgagaacagtgaatcgtatggaacttgtttcatgtacaattctttgattcgaggatatgcatcttctgggttatgcaacgaagctatattgttatttcttcgaatgatgaattctgggatttctccagataagtacacgtttccttttggattgagtgcgtgtgcgaaaagc

SEQ ID NO: 165972 - DNA, 1757 bp, Arabidopsis thaliana landsberg
aaatctgagatgaatccaaaaagatgtgcagcttgcaagtatctgagaagaagatgtccaaaagattgcgtattctcaccatatttccctccaaacgatcctcaaaaatttgcatgtgtccacagaatctatggtgctggaaacgtttccaaaatgcttcaggtatacacatctttgtgtatcttcttctaatatcctatttaagatcacactttatgcatatatataagtaagtgtattcatggttggattttggtgatctttttgacagcaacttcctgatcagacaagagctgaagcagtggaatctttgtgctttgaagcaaaatgcagagtagatgaccctgtttatggttgtgttggcattattcatttacttaaaactcagattcagaaaactcagaatgaattagccaaaactcaagctgagattgctgtttctcaaaccaaacttagccaaacccaaaattctgattttatgtaatatctctcagtttcatcaataaaatctcctctgcattttcgtttccgattgcttctacttataagatagtgatcttctttaactttaactatatcagactcataatcaagaggccattagctatactaaaaaagtgtttcataaaacacaaatgtaaacaagttcgaatcgagtttattattatcacaaatccataactaaagggtgacaattatacagtcttgagtctcttggccgatattttgagaatcataatgtaaaaagataaatgaatctgtttacaaaatacatgacactattacaaatcgaatttactattttccctgcttaagctcccattccttttacaagtacatgacattacactacttttgaaggagcttttcttgtatagttacaaagatgatcaatgaatctgtttaatagacgaaaatatatatgtcaagagacactgaaccttcaaaatcggcctgtatcccacttggtgaacataatttgatgttggctcggagtttcgttcgtttcattcattccatccgtgtattcattaccaaatgaagaattgaagtctggatcagaatccatggattcaaccaagtttgaagctttctccacctcgagggcttgctccaacaattggatcatacaagcattatgttctcgaataggtgagataccgtaaacttggatcatccgagtaaagtacctcaaaccatcctttacatttccagtattcgcacaagcggataagacaccaacgaaagtgatagcatctggttctacgcttgcttcttcttccatctcttcaaacagagacaaagcctcttcaccacatccatgtacccctaagctagtgatcatcgagttccaagtcgctaaactcttaccctgcatcacatcaaatactttccttgcgtcctgcaagcttccacatttgctatacatatcgatcaaagcggttccaaggaaacaatcaagcacaaaaccgtttttatgagcatagtcatgaacccatcttcccatagacaagcttcctaactgagtagaagcttgcaacaaattaacaatcgtaaactcattaggcttgacatcatcaacctgcattctcctaaaaagctgaaacgcctcgtcgggtctacggttcttgacgtaagccgtaatcattgcagtccatgaaacaacgtttctcattggcatttgattgaatacaatctctgcagaatctaactgagaattggagacaagaccataaagcatagtagtccatgaaaca

SEQ ID NO: 165973 - DNA, 2293 bp, Arabidopsis thaliana landsberg; identical to SEQ ID NO: 15628

SEQ ID NO: 165974 - DNA, 1904 bp, Arabidopsis thaliana landsberg
  unsure (1)..(1904): unsure at all n locations
tgttggcggatttcgtggctgaatgggtcgatacccaactaccaacgactccgatccaaccggagctctggaccatgtttttcgacgggtcgctgatgaagacgggggccggtgcgggcctgctcttcatctcgcccctcggaaagcacttgcgctacgtgctgcgcctccacttcccggcgtccaacaatgtggccgagtacgaagctctggtcaacggattgcggatcgccatcgagctaggggtcagacgcctcgacgcccgcggtgattcgcagctcgtcatcgaccaagtcgtgaagaactcccactgccgcgacccaaagatggaggcctactgcgacgaggttcggcgcctggaagacaagttcttcgggctcgagctcaaccacatcgctcggcgctacaacgaaaccgcagacgagctggcgaagatagcctcggggcgaacgacagtcccccggacgtcttctcccgggatctgcatcaaccctccgtcaagatcaacgacacgcccgagcccgatggcaacctcggtccagcccgaggtaccctcggctcagcccgaggcgtcctcggttcagcccgaggtaccctcggcccccgagggtgaggcactgcacgtcgaggaggagcagaacgggccacgcctgatcgaaattggcagaccccatacctgcaatatctccgccaaggagagctacccctcgaccaagccgaggctcggcgggtacgcgacgcgccaagtcgttcgtcttgttgggcgatgaggaggagctctaccaccgcacgccctcgggcatcctccagcgatgcatctccatcgccgaaggtcaggaactcctacaagaaatacactcgggggcttgcggccatcatgcagcgcctcgagcccttgtcgggaatgctttccgacaaggcttctactagccagcggcnngtgtgacgccactagaattgtccgcacctgcgaagggtgccaattctatgcgaagcagacccacctgctcgctcaggctctacagacgatacccatcacctggccctttgctgtatggggtctgacctcgtcggtcccttgcagaaggcacctgggggtacacgcacctgctggtcgccatcgacaaattctccaagtggatcgaagtccgacccttaaccagcatcgagttcgagcaggcggtggtgttcttcacaaacatcatccatcgctttggggtcccgaactccatcatcaccgacaatggcacgcagttcactgagaagaagttcctggacttctgtgaagaccaccacatccgtgtggactgggtcgtcgtagctcacccaatgacaaacggacaggtagagcgcgccaacggtatgattttgcagggactaaaatcgaggatctacaacgacctcaacaagttcggcaggcgatggatgaaggaactcccctcggtggtctggagtctgaggacaacgccgagccgagccgagccacgggcttcacaccgttctttctagtctatggggccgaggccatcttgcccacagacttagaatacggttccccgaggacgagggcgtacgacaaccaaagcaatcaaacaaaccgagaagactcactggacaagctggaagaggcttgggacatggccttactacactcggtgcagtatcagcagtccctgcgacgctaccacgcccgaggggttcggtcccgagacctccaggtgggcgacttggtgcttcggctgcgacaagacgcccgagggcggcacaagctcatgcctccctgggaagggccatttgtcatcgccaaggttatgaagcctgggacatacaagctggccaacagtcaaggcgaggtctacagcaacgcttggaacatccgacagctacgtcgtttctacccttaa

SEQ ID NO: 165975 - DNA, 1386 bp, Arabidopsis thaliana landsberg
gtaccctttgttatagatcaccccaaaaggcatccccatcccctcaccttttttcccaaacaatctttcttaccttgccatgtttgtagcctcatcaaaaaattcattccaacctatatttgtattcgatgcgccttcgtagtccatcaagattgtatttatttcccgtatgtcataaaaatatctcgccaccaccatcgtatctcttatacctcctctctttcatccggaaaatggtcttgtggagtctgtcgtcaagaggttgacaacgactatggtgcctactcttgcaacaagtgtgatgactattttgttcattcaagatgcgcgttgcggagagacatatgggatgggatagaactcgagggagtacctgaagaacttgagatagttgttgagccatttataacaatatctgatggaataatactccatttttctcatggtcatcatctgaaactcgataccagtaaagcttacgatgaaaacaagctttgtcaagcgtgcacccttccgatctacgagggtggctattattcaggtgtggatgagtgtgacttcatcctccacgaagcatgtgcaaatgcaccttgcaagaaatatcatgcgttgaatccttatccactcacactaaaggttgtcactaatgaatatcatgacaacaaaggacgttttcgttgtgatgcttgtcagcgtgaaagttgtggtttcgtctatgtggacgatttcagaggatgttatgctgatacaaaagattataaatttaaaatagatatacgatgtgcctcggtttctgaaccatttgaatatctaggtcatgagcatcccttatatctagctttgaatccagaagaagagaagtcagcaatatgtcacatatgccaagaaagtgaagatgagtcgtctaattgtaaaaagctaaattgcattgaatgtgattttgtgatatgcttcaagtgtgctaccttaccatacaaggcaaggtatcaacatgacaaacatttcctcaagttttatgaagcgaaagaggcaaatgatcattcagagtggtgtgatgtatgcgaaagaagaatagcagatttgagaaagaaagggttctattcatgcgacgactgttgcaccactcttcatattgattgtttgcttggggaagacatgtatatgaagcctggtgaaacagaatatgactacctctcctttggcgtgtactcattcgaagatcgaaattacaattggatagatgttagggctcttcttaacagttccctctcccgcccaatttgcgttcaatgcatgtcccgttgcccattcccaatatttttcaagttgaaaggtaacgccagaatatcctgttctgtgtattgtcttgggtttgcccggttatga

SEQ ID NO: 165976 - DNA, 2856 bp, Arabidopsis thaliana landsberg
agattgttactttgattgtatcacaagtggtggaggcaattgtcctggttgcaaagagccttatagggatatcaacgatgatccagagactgaggaagaagacgaagaagatgaggcgaaaccacttcctcagatgggtgaatcaaagcttgacaagaggctttcggttgtgaagtcgtttaaagcgcagaatcaagctggagattttgatcatactcggtggttgtttgagactaaaggtacttatgggtatgggaacgctgtttggcctaaagatgggtatggaatcgggtcgggtggtggtggaaacgggtatgaaacgccacctgagtttggggagagaagcaagaggcctcttactaggaaagtcagtgtctctgctgcaattatcagtccttacaggtaaagaacttttgctttagctgtttcttgatttagtatgtttttcttagaggcttactgaattaggatcatggaatagatttactatgtcgtgaatgtgctaatgtgttttgttttttcttgtgtgtgacgaaacagattactcattgcactgcgtctggtggctcttggtttgttcctgacatggagggttcgccacccaaaccgagaagcaatgtggttgtggggaatgtcaacgacctgtgagctttggtttgccttgtcttggcttttggatcagcttccaaaactctgtccggttaacagattaactgatttaggtgttcttaaagaacgctttgagtctccaaacctcaggaaccccaaaggaagatctgatcttccgggtatcgatgtgtttgtctcaactgcagaccctgagaaagaaccacctctggtcacagccaacaccattctctcgatccttgctgttgattaccctgtggagaaacttgcttgctacttgtcagacgatggtggtgcaattctcacctttgaagctatggctgaagctgttcgttttgctgaggtttcatttccgctttctctccctctgtatcttaactagtctattagatggtggcaaaaatgtaaatggttttgaattttgtatgcagtattgggtgccattttgcagaaaacatgatatagagccacggaacccggatagttactttagcattaaaaaggacccaacaaaaaacaagaaaaggcaagatttcgtcaaagatcgtcgttggatcaagcgtgagtatgacgaattcaaggtcaggatcaatggtcttccagaacaaatcaagaaaagagctgaacagttcaacatgagagaagagctcaaggagaagcgaattgcccgagagaaaaatgggggtgtattgccgccagatggggttgaggtggtaaaagcaacgtggatggctgatggtacgcattggccagggacatggtttgaacctaaacctgatcattcaaaaggagatcacgccggaattctacaggtatgaaccatcaacttcattgatttcaaataaaaccatgaaaacttgacataatgttttgtagatcatgagcaaagtgcctgatcttgaaccggtgatgggcggaccgaatgaaggcgcgctagatttcacagggattgatattcgtgtacctatgtttgcttatgtctcgcgtgagaaacgtccaggttttgaccacaacaagaaagccggcgctatgaatggtatggttagagcttcagccatattatccaatggcgcgtttatcctcaatctggactgtgatcactacatctacaactccaaagctatcaaagaaggaatgtgtttcatgatggaccgaggcggtgacaggatctgttatattcagtttccacaacggttcgaaggaatcgacccatcagatcgatatgcaaatcacaataccgtcttcttcgacggtgagttgttacattgaattgcacagcaaaattgtaatgcttatgttacaagccaccataacttaaacattattccggttctgaaacaggtaacatgagagcattagatgggttacaaggtcctgtctatgttggaacagggtgtatgttccgaaggtatgctctctatggattcaacccacctcgagccaatgagtactcaggcgtgtttggtcaggaaaaggctccagctatgcatgtccggactcagtcccaagcatcccaaacgtcccaagcgtctgatttagagtctgatacacagcctcttaatgatgatccagatcttggtctgcccaaaaagtttggtaattcgaccatgttcacagacactattccagttgcagagtaccaaggacggcctctagcagatcacatgtcggttaaaaacggaagaccacctggtgctttgctcctgccacgacctccccttgatgctccaacagtggctgaagccatcgctgtcatttcttgctggtaacgttttgaaaaaagagatatgctctgttagtataaatggatatgtagttaaaaatgttgagtttatttggcctttcaggtatgaagacaatactgaatggggagatagaatcggatggatttacgggtcggtcacggaagacgtggtgacaggttatcgtatgcataaccgtggttggcggtccgtttactgcatcacaaaacgtgatgctttccgtggcacagctccaatcaatctcactgatcgtctccatcaagttctccgttgggccacaggctctgtagaaatctttttctccaagaacaatgccatgttcgccaccagaaggctcaagtttctccagcgagtcgcctacctcaatgtcggggactacccttcactttcaatcttttggtcgcctattgctttctccctgctctctgactcttcagcggaaaattcatcgtccagagcctcgata

SEQ ID NO: 165977 - DNA, 1831 bp, Arabidopsis thaliana landsberg
cttggagatgagtcatttgtggagactgtggttaatgattttcctgatatttttgttgaaccaacagagttacctccatttcgagcacaacatgaccataaagtttaactgatggaaggttctaatccagtaaatcagagaccctaccgttatgctatacatcagaagaatgagattgataagattgtggaagagatgctgtctagtggaacaattcaggtcagttcaagtccttacgcatcaccagtggttttagttaagaagaaggatggatcatggagactgtgtgtggactatcgtgagctgaatggtatgaccgtgaaagataggttccccattccattgattgaggatttaatggatgaattgggaggttctgtggtgttttttaagattgatttaagagcagggtatcatcaggtgcgtatggatccggatgacattcataagactgcttttaaaacccacagtggtcattacgagtatttagtgatgccatttggtctcactaatgcaccagccacgtttcagagtctcatgaactccattttcaaaccattcctgaggaagtttgtcttggttttctttgatgatattctgatttatagtagatctacagaggaacacaagaggcacttggaggctgtctttgctttaatgagagaacataaattatttgctaagatgagcaagtgtgcatttgttgttcctaaggtcgaatacctgggtcatttcataagtggagaaggaattgctactgatcctgccaagattagagcagttcaggaatggccgagtccagctaatcttaaacaacttagagggttcttgggattaacgggctattacaggaggtttgtgaagaattatggtgctattgcagggccattgcatgcattaacaaaaactgattcttttgtgtggtatgcggaagctcaagttgcttttcaaactctgatggatgcgatgtgtaacacgccagttttagccttacctctctttgataaatagtttattgttgagactgatgcgtgtggtcaaggcattggggcagtgttaatgcaagaagggcatccattggcgtttatcagcagacaattgaaagggaagcagttgcacttatccatttacgaaaaggaacttcttgcagtaatctttgctgtgagaaagtggaggcactatttgatttcaaatcacttaactatcaaaactgatcaacgtagtctgaagtacctgctggagcagcgtcttaatactcctattcaacagcagtggttacctaagctactagaatttgactatgaaatccaatataaacaaggtaaggagaatttggctgctgacgctttgtccagagtagaagggtcggagattctacacatggctctctcagttattgaatgtgacttactcaaggatattcaggcaggttatgatgcatatgttgaagttcagagtatcatttctgcactgaaactgaatggtgatgctaagaaccactatagttggggtcagggtgttttgtgaaggaaaaacaagattgtggttccgatgaacaatgcaataaggaactcgattttacaatggttgcattgctctggtatgggaggacattctggtcgggaagtaacacaccaacgtgtcaaggggctgttttattggaagggtatggtgaaagacattcaagcttttattcggagctgtggcacttgtcaacaatgtaagagcgacaatgcatcttctccgggtttgctgcagcctttacctattccagagaggatttggtgtgatgtttccatggatttcattgatggttcgccactgccaaatg

SEQ ID NO: 165978 - DNA, 2141 bp, Arabidopsis thaliana landsberg
  unsure (1)..(2141): unsure at all n locations
agcatcagttctatgccaacttgaagaaatgctcctttggacaaaccgaagtgtcctatctgttacatattatatctaaggatggggttgcagctgatccagctaagattgcaaccatggttaactggcctttgcccaagtccatcacagagctgcgcgggtttctggggctcacaggatattaccgtcgctttgtcaggaactatggacagactgctaggccactcactgagctgttgaagaagaacgcgtttgggtgttggagtgcagcagcaacagacgcgtttcaagccctgaaaagcattgtcacaagcctaccagtactagcactgccagactttacgaaggagttcaccattgaaactgatgcatctggagttggaattggtgctgttctatctcaggagaggaggcccatagcttttcttagtcaagcattctcttctcaaggccgcatcaaatttgtctatgagagggaattattggctatagttaaggctgtgtcaaagtggaagcactatctaacaaacaaggagttcatcataaaaactgatcagagaagcctgaggcatttgctnnnnnnnnnnnnnnnnnnnnnnnnnnnnnaaaggtgggctgcgaagctgttgggcttgaactatcgcatagagtacaaaccgggagtagaaaacaaagtggctgatgcactctctagaagaccacatgaaggtgagttgcttatgttgacacttgaggcgcctaacttcctggacaaagaggaggtattgaagcaagttaaggctgatgctgagctgggacagattctggagagacttgagaaaggagaaaaggctccagagggatatatgctgagaaacggactgctattgaaggacggacgtgtagctttacccgctggttcttctcttataactcaagttttggaaaggtttcacaacagtgccatagggggtcatgaaggagcccttaagacttatcagaggttgctgaaggaagtctattggcgtggaatgagacaggatgatgtgaagtacattacacggtgtcaggtttgtcaagagaacaagtactctactctctctccagcaggactgctagcacctttgcctattccaaaacagatatggagtgacatcagtctggattttgtggaaggtttacctaagtctaaagggttcaattccatcttggttgttgtggaccgcctcagtaagtacagtcactttattgggttaaaacatccttttactgcaaggacagtggctgaatctttcatcagggaggtagtgagactccatgggtttcccgaaactatggtttcagatcgagatagagtgtttctgagtcatttctggtctgagttgtttaagctgcagggtgcgtccttacacaaaagcacagcgtatcatccccagactgacgggcaaacagaggttgttaaccgatgcttggagacctatctgcgatgtttcacgagtaggagaccagcttcatgggcacaatggctgccatgggcagagtactggttcaacacttcctatcactcatcaactaaacacactcctttcatggctgtctatggtagggaacctccgaagctgctgcgatatggagacacaccaaccgccaacgctcatgtggaggagctactccgtgacagagacagtttgttagtggagttgagagagaatttggaagtggcacagctgaatatgcagaaatcagccaatgctcatcgacgtgatgttgagtatcaagtgggagactgggtctatttgaaattgaggccataccgccagcagtcattggttcaaagaagaaatgagaagcttgctcagaggtattttggtccttatcagattcaggaacgcataggtcgtgttgcctacagactggccttacctgcctatagcagcatctaccccactttccatgtgtcccaactcaagaaggctgtgccaactgcttacacggcacaaccgctaccaccaatactcacaccctccttggaatgggccacagaaccggagtctatcactgatgttcgccgcagcagggaacacaccaacgaggctgaagtgttggtgaagtggcaaggattacctgagacagaatcaacttgggaacgtctttcaagcttg

SEQ ID NO: 165979 - DNA, 1770 bp, Arabidopsis thaliana landsberg; identical to SEQ ID NO: 2468
  unsure (1)..(1770): unsure at all n locations

SEQ ID NO: 165980 - DNA, 1126 bp, Arabidopsis thaliana landsberg
atggtgaactttgttgaggtacaaaaaccattgttgtacggtctgatgaaaatggctggcgtcgttccttacactttagagatcgaaccagggacgaagatcaacttttgggtccctaaggaaaccctaaagaagaattccggtaccggaaaaccaacgaaacccgataaacctaaaaagcctgtcgtcttgttaatccatggtttcgctggcgaaggaatcgtgacgtggcagttccaagtcggtgcattatccaagaaatactcggtctacataccagacctcctctttttcggtggatcctacaccgacaactcggatcgatcaccagcgtttcaagcccactgtttagtcaagtctcttcgtatcctcggtatcgaaaagtttactcttgtagggtttagttacggtggcatggttgctttcaagatcgccgaggagtaccctgagatggttcaagccatggtggtttcaggtgattactatattttggatgactcaatattttgcgagtggttaaaacatgctacaatgttttgcgagttttggtgtgtcggttttcctaaaaccatggtcttggaaattactcccataccgcgagttcaagatcacatttaacactcctcttttcgtatatcaataatagtaattacaagataccgtaaattattctaaaagtctattttttttttatatttatacattgtaatttcattattaaaacttacatacaataagaacaattttttctttatcaggttcgatactcgcgatgactgatacgatcagtgagtctaatttgaaccagttagggtttaagtcgtcggcggatcttttgttaccaacttcggttaaagggctcaagactctcttcacccttgctgttcataaacccatgtggttcccgaaacggctcttcaaggatttcattgaggtatatacctactcaaactctgccactggctctctatagtataatttttcttaaaaacatatttagcaactttattaagtatccatatggtcaaatatggacacgaaattgatcccggagctcgataaagagcttgtcataactagattacaaattccagtaataataatttaaaaataaatagtaaatatg

SEQ ID NO: 165981 - DNA, 550 bp, Arabidopsis thaliana landsberg
catcatcaaagtggagtgctcaatgcaatttcagcagtatggagtaggacttcataaacttggacagagtaaattctgcatatattgctatggtcccaaagattgatggggccgatcaggtgaaagatttcagacctatcagtttagtgcacaactttgctaaactggtaactaagatcctggccaataggcttgctagcaaattgaacgatctggtatctccaaatcagagtgctttcatcaaaggaagattcattcaagacaactttatgctagttcagcaaacttcgagatttttgcatcagcaaaatagggcatgtcttcttttcaagctagacatcactaaagcgttttgcatcatcaaaggaagatccctggacgtcggatctgcgcagagcaggccgtgcgcagggacgacaactgcgacgacgggcggatctgcgcgaatccgcgattggcgcagggacggcaggtggatggggcgcggcggacggcggatccggcggacggtcagggacggcaggtcgacggggcgtggcagacggtggat

SEQ ID NO: 165982 - DNA, 1704 bp, Arabidopsis thaliana landsberg
gatggtgatgttactctctttatcagtgattggtatactatgagccataaggtttttacatatagccttgggcctttctttattgttttctgtcctgtctcttttgctatgcttgttttaacatctgaaacacttctgtggaatcagaagctgaggaaggatgttgagagtaagaacggccttcgacctccggatggtattgtcatcaatggatttggaccttttgcttctaatggtagtccttttgggaccataaacgttgaaccaggtatctgataataacatctctttttgttgaatcttcactttgtttatagtttgaatcttctctcgtctctgaaaacattcatatcttcatatttactaggacgaacatatcgttttcgtgttcacaatagtggcattgcaaccagcttgaatttcagaatacagaatcataacctgcttcttgttgagacagaagggtcatacacaattcagcagaattatacgaatatggatattcatgtgggtcaatctttctcatttctggtcactatggatcagtctggtagtaacgactactacattgttgccagcccaaggtttgctacatccgtcaaagctagtggagtcgctgtcttgcgctactctaattcccaaggatccgcttcaggtccactccctgatcctcctattgagttggacacatttttctcaatgaaccaagcacgatccttaaggttgttaacgactatgtatagttatgttttcatattaggaaatatcttggccagaatggtattttgtatgaagcataatcctcttttgtatttctattgaaaattgcaatttttagttgttgctgatgggaaaatgatgtttggtaggttgaatttgtcatctggagctgcccgtccaaacccgcagggatctttcaaatatggccagattacagtaactgatgtgtatgtgattgtcaaccgaccaccagagatgatagagggacgattgcgtgcaactcttaatggtatatcatacttacctccttcaacacccctaaagcttgctcagcaatacaacatctcaggggtatacaagttggatttcccaaaaagacctatgaataggcatcccagggttgatacctctgtcataaacggcacgttcaagggattcgtggaaatcatatttcagaatagtgacaccactgttaagagctatcacttggatggttatgcattttttgttgttgggtaaggttccattagttatattagatccatttacatgagaagatgttgaaagataatgggcaatgtgattgtaaagttaaagaatgatgtttgtcttgaaggatggactttggtctgtggacagaaaatagcagaagcacatacaacaagggggatgcagttgctcgatctactacgcaggtgttatgacttaacacctgaaaccgaaatgttacatgtgtttctatgtggttttaaacggctaatttgtttacaggtgttttctggtgcatggacggccgtattggtttctttggacaatgctggcatgtggaacctttcaatagacaatctcgcctcatggtatcttggccaagaactatacttgagtgtggttaatacagagattgacattgactcatctgagaattccgttcctaaaaactttatatattgtgggcgggttctaaccatttacaaaaataagttt

SEQ ID NO: 165983 - DNA, 1047 bp, Arabidopsis thaliana landsberg
ttccattttatccgtcttagccggcgttttcgctcggctttgtggcggtcgccacttatctcacggcggagaccacgacatcgaaggttgggtcgagagaaagtgtcgtagctgcatcgatgccggcattcctgccgtatccgctgctcctccacctccaccgccgccaccgccagcaacggcggaagagcagagtaagccagcagccgaggagcaaaccaagaagtgaagtaaaaaaaagggtaaaactacattcttcgttttagctttaacactatgtaatatcattaattttgaaaacatgttcctttttttgttatgtaccttagtctacggacattgatttcggaatttcctcagatgttttatgattatttatgtctttcaaaagaaagaacaaaagcaaagttctttgtcaacttttaactttaaataaatccgttgagattaaagagcaacggcattaaccaaaaaaaacaccaagatttactttatccttatagcaacaaaataagaggaacattcacgtaaaaagtaaatcatttaatacaatggacttttggtaaagtaggccaaaacataagagcaccctaaatgggggttttaaacaagtttcttaacaaagaataaaaaatttatatgatttaaatattacataagtctcttaaatttgatgaaacttaggcaaattgtctcttagttaagagataattggtcttggtttcaccaaatttaagagacctataattaaaaatattatttatctatacttacactttaattttgtttaagagacttaggcttagagactaccattgaggatgctcttaaacaaccatttttaacatctggatgtactagttgtttgtaatactgttctttccttataagaaataaagaatacaccatttgaaacctgaaagatggccaagcttgaggcctattaaccactccaactagaaccacgtcctccacaacacagacaactctgtggctaaccatactctccaccgcccagacaacgcaaagaaaatgggcttccaattt

SEQ ID NO: 165984 - DNA, 376 bp, Arabidopsis thaliana landsberg
  unsure (1)..(376): unsure at all n locations
gttgcgggcccgccagctgtcgccgctgaaggagccacgcgcttattttagcagcatcgcccgtggcctgatgggcgagcagttccgccgccgtgcgctggaacgggcctannnnnnnnnnnnnnnnnnnnnnnnnnnnnnnnnnnnnnnnnnnnnnnnnnnnnnnnnnnnnnnnnnngataccctggcgcgcctcgaccgtgccctgcaccaactgaaaccgcgtgcccgccaggcattcctgctggcccagctcgacggtttgagcatcgtacagatcgccctgcgcctgggtgtatcgcgggccaccgtcgaacgcgacctggccaaggccctgggcgtctgctaccggttgcgctatgccgacgcctgacag

SEQ ID NO: 165985 - DNA, 2933 bp, Arabidopsis thaliana landsberg
ttacaggaattcaatgtgaacctgttaatagggaacttcgacgaaaggggaaagattctgtaaaagaaccatacttttgggcaagtgaaggagtatatactcttggtgatctagaagattgattgttttcaaaacctaaggaaggtgaacctgctgttgaagatgaagaaaagctgtgtcttgctgcagtattgttgacttaaggaattctattcacaccatttgtaaaagagaagatacctttgttaagattgcaacatgctttcgattttgagatgtacatagcccaaccgtggggtaaagaagcattcaatgttccatcaaattcacttctgagaatgaacgagaaaacttgggcaaaagagaaatatgatctgagagaatttggactcgcgctaaccatatgggtgttgagcgcagttccagcatttggtgcagcatatggagttaaagataacgaattccaatctgaatatccattgatattgaagtggaaaagcactactactccagagtttttcaagatcgtaaaccttgtaaatgatgtttctgaggtaagcttttgtctatttacagaattctttaaatggttttgagatttgaagttctgctttctcaagatttgtaatgttattgtatcttcgcagattgaggtgaatacaattattggaaacccagaagacttcaagtctttagttcctgatttccacacagacgacatagaattccaaaaggttttggaacttgttaagatggcctacagattgaagaaaactgaatggaatacaagatgcgttgatgtttgtgctgcccttgaagaagtaggtcaaaacaaaattaataacaaaatatctgatagcgagaagcttgacaggattttgacaatccttgaagatcttaacaagagagtcgagctgattgagaggattttggacattagaatggaggaaaagaataatcagagatctgaggaagatgaagaaagaaaacaagaagatgaaggagtagaaagacaaccagaggtaattgtaaatgtttctttaaaagctatttgaaaggaaatgttttacaatgtattttaaaggttaaatacgtagtaaacctttacaatgtactcttttttttcgcaggctgaagaagaaggaggactagaaagaaaagcagaggtaattgaaaatctttacaagctattttaaaggtctactaattatattaatgattgacttattgtttttatttttgttacaaaatgacaatgaatcatttgaagattcaatccgagagccaaacacacagtatgggagctatccgggtgatgatgaaaacacccaacgtgatgttggtgatgaattagctgaagaatcatcaaaagtacagtaatttatatctctaaaagtcttacaaaaatgattagtatcctttttataattttacattctgttatcttttcaaggataagtctcctactccacgatcctctacaccaaatttcaatattttgtctgaagaaagtctggatgttcaaaaggataagaagagagttagcagaggaagaaatgaggttagcatttaaaaaaatttgtattatctaaccaagtgtttataatatttttttcaaatctttaaaagtttatctttcatgcaacttcagaacaagagagttaaaccaagtgttcatgctgaggataatcttaaaacaagaaaacaggttagtatttgcaacagtactgtttttaaaatttgtcaattgtcttgttatgatatttacaagggattttaaaaatacttttaattggtgttttttactattctaggtgccgagaaagaggcagaaacaagttgatagtgctgatgttgatgttccaacaaggaaagaggttagtatctaatttattatgattttgaaaattttgtttataaggtattttaaacatctgttttttttattctttttgataggcacagagtaagaaaaggaaaattattggcaatgatggtgataacgctgataatgatggcgacaatgatgattttcagcccgctccgcaaagaaagagtaagcggggtacggttccttccattcatacccaagcacatttcacagctgagaagaagaagcatccaattttgcatccatttgcgaaagttgatgccacaagacttgagaaattggctgaatggaagaagtcaaggaaaaacaagtgagttttgttagtaagatagtgagttttttttaataatggaagaagcatcattgttgactgttttgttgttgtaggccactatcaatcgcgggaaatattgtagatacaaagtggtttacaatcctagagacgccagggaaagcaataacagcaacggtatgtctaaaaatccttgtaaaattggtaacccatgaattatatatagtttttaaagcatcattaagttatttacaaagggattttaaaaagggttacatggtttataaacaattttaaaagattagaaagtggtaaagaatgatttacaaggtattttaaaaaggatttacatgacttgcaatcgtttttaacggattagaaagtggtaaggattgatttacaagggattttaaaagctattaaaaagggtttaattgattaacaatcgttttagaagcagaacttagtggcatagaatgatttacaagggattttaaaagcttttaaaagtgtttaacttgatttacaatcgttaaaaagcataagtatgtggcgtagaatgatttacaaggtatttcaaaaagggtttgcattttttacaatcgtttttaaaggggttttctaatatgataatttttatttttgttgtgtttagcatgttgatgcagctttggagttgatgaaaacgaggaaaaaaagcaatccagaattattcaaaaacaaattagttgtatttgttggagcgtcttt

SEQ ID NO: 165986 - DNA, 998 bp, Arabidopsis thaliana landsberg
  unsure (1)..(998): unsure at all n locations
atggaaactagaggaacatttgattccattccagatgatctcgttgtggagatagcattgagattgtcttcaaagtcaatcgctcggtgtcgttgcgtgtcgaagctatgggcgtccatactttaccgtcaagatttcaccgagttgttcataacgaagtcatccgctcgtccacgtcttttatttgcggtcttaaaagcaagtggtttgatattctactcttcgcctcagtctcagaatccgtcccttgaagtagattttcataatcatatgaagttccatgaagacatgaacctatacatgtgtagctatgtctctggtttgttccatatccctgtccataatatttggacctcaaaggcttcagtttgtgtgatatttaaccctatcacaggacgctatgttagcttacctgaacaaatggctacaaaacgtcaagaagctttttagggtttgatccgattggcaagcaacataaggttttgtgcatgaacaagagactcaataaagaatgggttcattatattctgacattaggaactgaaaatttgaagtggaggaagatgatatgtcccttaacccatgaaccttattatggtagagccttatccatcaatggggttttgtattactttgctaggacatcgtgttttctagtagtttcctttaatgttaggtctgagaaattcaagtttcttgatnnnnnnnnnnnnnnnnnnnnnnnnnnnnnnnnnnnnnnnnnnnngggtaaattaggtgtgactaaattggagtgtgatgctggttatggacatccccgcgagttgtgtgtgtgggttctagaggatgttgagaaccaggaatggtcacagtatatctactccttgccgaagattaaggtcaatcggattagaaacgataatatcttcgttgttgggatgattgctacaggtgaaattgttttctcggggtactatacatcaacatctgaaccgtttatgttttctacttcaatcccg

SEQ ID NO: 165987 - DNA, 1797 bp, Arabidopsis thaliana landsberg; identical to SEQ ID NO: 27880

SEQ ID NO: 165988 - DNA, 1128 bp, Arabidopsis thaliana landsberg
ctaatgtctagaattgttccaattactgcagggatgaatctttctggtttggaagatattgtttagaaagaattcatgaataaagatttgacattaggaacccctaggtttagttatttaccgttcatttcatggattacacgacgggaagaagacacctccgatattgattactagtgaagttggtttgaagttcttcattgagatgtttgggaggaacaagggtttaaacttgtttgttactttcagcggaatgattgaaataggaaatccttgttagaaaattgttagagaagaagaagttgctggttcatctgaaatgaagagtaagaaaagagcaatttcctcatcatgtgaaggacttgcaagaagtgatgatgacttttgatgggaagcaccaactgctggttccaaagccccaaagattctgacaactcaggatgagacggtgttatagcgaaagttgaagtacaagaagccatgtataacagacgcgatgaacaattactagcagtggcagcgagaggaaaagtagaactagtcccagtagtgatgaataggaagatttattttgggatagtgaggaagaggtcgaagatggagaaaatgtagatgaagttgctccaacaggttttgataccgaattttggggtcactttttggatgatgagttagctggttctaatgcacctgagatcatgtgtagtccacgagtggctagaactcaagaagataaagattgcaatgatggcagaggtagtagtactgactccgaaaccatgccaaatggaggacagagaaatcgagagacaaggaaaattgatgatattgaagatgaggagtttgatattcctccgctttttgatgatattgaatatgaaagggacgaaatcccgaatcttgatattgaagatgatgagaaggtatctacaaaggaagggtatgtgcaagtaaacaagatttccaaataagcttagctatccatgctatcaaggagttattttactttaagcagtctcgtaccaagcgacattactttgtgatcacttgtgctgatgaaaactgtcagtggagaataatgtcacatgagatgaagacgtgtggttactaccagataaggaaggctga

SEQ ID NO: 165989 - DNA, 1130 bp, Arabidopsis thaliana landsberg
  unsure (1)..(1130): unsure at all n locations
tacaacttatcatccatcaccatatatagagaatatgagcaaaacggaagcaatcagcttgaccaaaaggggaatgttgccgccaagtagttgcaatagcctaatggaccgctctgagtcccttaagagggacagtgtgatgggcaatggtgcagccaaagtgagaggaagcttggagcgcaagaaatcaaagagttttaaggaaggagatggttattcttcgtggctcataacggaggctcctgggagtatagccgccgtgaggagagagcaagtggcggcacaacaagcactaaggaaactaaagattgctcattacggtagatccaaatcaaccattaatttcacttcttccaaagtcgtccctcttcttaaccctaaccctaaccctcatcctcagagatgcagcttcctcacccccacttctggtataaacctatttctctctttattacttgtttgttttccggttaatgttagttaatttcacttatgaactgattttattaagtttcaccctcttaatttccattttggtattgtttgaatcagcttaaaccccttgtatattattttaagttttttttgtacgtaactttaggttccatcttataaaatacttggattcctaactgatttgtttggttacctttagatcctatttacgtggcctaccatgatgaagaatggggagttccagttcatgatgacaagtgcgtgacataattaatacttctttccaaatgaaaacgtcattgtacattagttcattttgttcaaaattaaattagttatgttaaattttcaggacgttgttcgaactgctgaccctaagcggcgcacaagtaggctccgattggnnnnnnnnnnnnnnnnnnnnnnnngactataggaaggcctttatggagtttgaggcggaagtggttgccaaactcaccgagaaagagatgaatgcaataagcatcgaatacaagatagagatgagcaaagtgagaggtgttgtggaaaacgctaataagatcgtagagatcaagaaagcgtttgtgtcattagagaaatacctttggggatttgtgaaccacanaccaatctccacgaactacaagctttgacacaagattccggtcaag

SEQ ID NO: 165990 - DNA, 1619 bp, Arabidopsis thaliana landsberg
gaaagtacattaaaaactcaccagttgtataatgatctctgcttcacaccccaagtaagcttctcctcttctcaagtagtgtctctagtttaaaaactttcgaaaagaagaacatttgcctatgtgtgttgatgttttgattcttagttatcaatatttctctttctgttaagaatctaaatggaaacttaaagattgtgtgaaaggcttagaccttgaaaccggctttgaaattggtaatgttgtatttttggaatccctttgttgtattttcttacttaagctcatttgctctgttcaggctataagtggtgatttgcatttgaaaaagatgaatctcgattttgatgactctaagcgtatgcattatggagtgacaaaacaagaaagggttaagatgctccaacgtttcataaagcgtgtggatggtaaattggctttgtgtaagaatgttcctttgaacagattctccatcaagtgtaaagatgacgttggacctgctcctgtcattggttggataaccaatgtgttgaaacgtcgtgtatcagaacttgcactagacatctcttcatgttgggattggcctatgtctacagcgattgatgggtgcaatacaatggttcaggaattttgggagtcttgttctgtatctagcacaagcctcaagagaccaacgtttcgttttaatcaaatgttctctcacaatcacaagagtgtgtcgtttgtactcccaatctcttgtacttggaatattcgtgatgtcagtactgtcaggtatcttaaagcgaattttgattcgcttgttgaagctcgtcttgatcttcaaatgacacatgatcagatccataaggccaaattttcagcggatgatccaatccagcatgaggggttggttggtaatgcaactgtttttttcattgcaatttgtaatgttaggtccctttacttatcttacaacactcttgaggtcagtagtctccaacttcgtactcatcttcttctttttttccttcggatttaaaaggtgatactctgtttcaggtactctgtttctgctgtgagccactgccggttttcaacaacctgattcagctaaccgttaagactgatcgtcttgtgggatgggaatcattgacggctctactcaagaacagtccaaacctagaaacccttgtctttgaagtactaactatattctttgctgatacattattcaaacagagagaagccgatattgaaatgtgtttcctttatgtttcagggacttctccacagatatgatatgaaatgtcaaagcagtgacgagtgcctgtgcaaaccttgggaggaggagaacattcccacttgtctatcattaagtcctgtgaaggtcttaaagataatgaagtttggagatatcgatgaagatgaggacatggacaaaatgatggatcaagtcgagtacttccttgagacaatgcctaatcttgaacaactcataattcactacgaaatatcaattgacgaagatgtggaggaagtattaagccaatttcagatggttcctagagaacgtttaaccgagtgcagaattcaagtaatctctgacaatcttgtcttgtcctctatttaaagcatgt

SEQ ID NO: 165991 - DNA, 512 bp, Arabidopsis thaliana landsberg
ctaaaccgcccttattgactgaccaggccggggctcatccgtttgagtcccgcgcccgcatgggaaagcacgccgtcatggccgatccggtcgagaccccttctgaactacctgtcgctgaagccggtcaagctgtgaccggccatgagaccctgcctggcggaaccgaagccgagcaccaagggggtctgccccagttcgagttccaatactggggcggccagatcgtctggctgctgctcatcttcgcggtcctctacatcctgatcgccaaggtgttcacaccgcgccttcggggtgtgttggacacccgcaccgagacgatcacctccgccgtcgcggaagcccgtcgcgtgcaggaagaagccgacgcccaggcggccgacgcagcccgggatttggccgaagcccgctcccaggcgctgaagatcgccagcgattctcgctccaggcccaggccgcggcgagcgcccgcttcgcggaagaagacgctcagctggccgagaagtcgg

SEQ ID NO: 165992 - DNA, 1007 bp, Arabidopsis thaliana landsberg
  unsure (1)..(1007): unsure at all n locations
gtttgcttttaaacttgcaagagaggcaattgtttctcaaaccagtagggcctcagagatttttggtgaaacttgtgtcatttgtctggaagaaaccaaggccgatcgcatgttcgtaatggataaatgtcttcaccgtcattgctatccttgtgttaatcagttagtagaagtgaaactgcgaaacggaactgtgcctacatgtcttgactatgaatgtaagttaaagctaagtcttgaaaactgtttcaaggttttgaaacctaaggtgattgagctatggaaacacatgatgnnnnnnnnnnnnnnnnnnnnnnnnnnnagaatctattgcccatatataaactgttcaacattgatgtccaaaaccgagatttctcggtctaataaatccaatgactgtgcatgtatcaaatgttctggactcgtttgcattgattgtaaagtaccatcgcattctgatttatcgtgtgctgagtacaagaaacttcaccctgaccctgtacttgatgacttgacgctaaagcttctagcaaacgatcaaaaatggcgccaatgtgtcaagtgtcgacacttgattgagcttaaccaagggtgcaaccacatgacttgcaggtacatataatacatatttaactcaattaagacataactagagacaaaacgtttatgttttattgtaatgtcgttgtggcctttgtagatgtgggtatcaattttgctacaaatgtggagttgaatggaagaagggtcaagtgacttgtcctactggttgtccacgtactggccaaggttatttttatgatggtgaatgaagatgattgggatgatttgtatgctcatggtggactggtcgtatatgctgaatatccatagttgttatgaaacactcttttctcaattctttgtatcttatgaggtctagagatcaacaaaaatacttcttttttttttttaatagtactacttttccgataacattacttttccctatcgtttttgttact

SEQ ID NO: 165993 - DNA, 7191 bp, Arabidopsis thaliana landsberg
aagagaaacatcaatatagagacacctaaactggaattaggtaatgaggtaaataccgtagacgcccaatagatacagatccacaagttccacaagttattgtttaagcagctttttccatttttctaaagcaggaagcacaagatataaagaacttgcccctatttatagggtgagatacataatggcacacttttttctagtttcatatcaaaagagactcattttatgtttttttataacttttttaaacagttcaattcaaatcaataacaaaatacccttcaactagatattatgtgatagtaggtttttagtcaattatcgtaaaacactatcttgtcgttgtagtattttaggtgtcaatccaatcaggtgtgatgcaagcagatgagatgtgatcagaagtcactaagtcaagccaagcaataacggttttgaggtttctaacagtcataagcaaacatgcagaaaacaaaatttttaacagaattactaaaatcactcgaccacaactgattgatgccagaagcaggatgtgatcgagtaacaggtaggaaatgaaacagctatactcgactgcacagtttgttgccagcgcttcggtgtggtcgagtatgctggtcgagtaacaaacaggaaatgagacaactgtattcgactgcacagtctcttgccagacactgggtgtggtcgagtaagttggtcgagtaattggaaaaacaaagaaacaggcaatgagaacgattaagcgataacgataaaacagagaaatcagatagacgataaattcctaaggatggggtaatcgaatagagtggtatcctagcctattcgaatggttaacttctttacatttactcttaattcatcaatgcagactattcagaatatgatttgtgtttcttttatcatgtctgagtaatcaccttgttgggtttagggagtttcaatagggatttagatggattagtagatcgacaaccccttagggttatttttatggttcttcatcacgattaatcttactactagttttagattgatcacctagaacttgatattagataataggtatgcccaccataggtacttgttatttgacctatcatagatgatcctaagcatttaagaaagaacaggtaggctcatagaaaggctctggtttagatactaggtgaactaatcaaacttgataataatgaatgctttagtataggatttctcggcttttccggtaatcttagctctaagtatagagagttttgcggaacaccaccggttactctaaaatcatagtttgagttcgagaacggttctataataatctagctatttctagatctactatcatctatttcctgagaataccctaagcctaacacctttattatcttgttttcacaactcataatgttattgcttactttttgtttcttttattttctttactattttacttagcttaatttgattagccattagtctcctgcgtgatccgagaactttgtgaattcgatccctaagtgctgcaactgacctctttatttgagagagtggtcttaggattaatttgacttatatcaaatttgccgcagttgccgaagttctctgtgattcaccattagactaggtgtagaatttagactaagtttttatttttctttcttttgtttctcacacgttttctttcttctttttcctatgacagggaaactacaagatggaacgcaacaaacagctggcagatttcaacgacagtgtcgatcgacaccctgttggtgtcgttcaacaccatctgttggtgtagttcgacaccatatgttggtgtcgttgtacaccatctacagaacaaaccagctaccataggcgacttcaacagagctgagcttttctattccaatcgatcagcgatccagctacctcctattgcaagagaagaatttgctattcaccctgcctactataatcttgtttcacgaggaaagtttcgaggtcattttgatgaatcaccactagatcatctagaggtcttcgaagacttagtgtcctcaatcaaagcagatggggtacaagctgattatcatctttgcaaactcttcccacactctctcgctggcagaggaacatcatggctgcgacaactagaacccggttcgctaaccaattggagtgacacgaagaacgcattcatgatccacttccttgatgattcagtgacaaaattactaagggagaagatctcttcgttttctcaagctccaacagaaggtttgaaggtagcttggatcagattcaaatcctatcagagggattgtccacaacatggtttctaggaaagcaaactaatcaacatattctttcgtggaatcgataagcagtatcggttatgttttgatgatgcaagtaatggcaattacatgacaaagactccaactgaagcatcagttcttgtcaacaacgctgtcacaagtctctccacaaaggaaatagactatgatcgaagaaaatttgctgaggcttccgacaatcacagagaggaacaaggatctacacgcattgcttctccacctatcacatcttttatctctgcccccgtccaccctactcagacacacgaatagggtatatgcttgcgcagttttttgagagccaaacaaagctcgtggttgatcttaatggcaagtttgattctctctacacagatcttagtgggaagatcaacaatctgagatctaatttatttgagccttctcctacatcagcatctatcaatgcagtcacactacgcagtggaaagcaactaaacaaatccttcagcgcgaaggtttagctcagaactcatctattccagttgcataaaaagtctcaatgtcaatcgatacattagggtgtcgatcgacaccaattactcttgacgactctcttttgcctttgtcgagtggaatcgataattttacagaggaggagaaacttattcttgatggtgtcaaacgacacccacctcatgtcgatcgacaccaacaccacactgacaagccagtgttgtcgtttgacaaagcaggatcgatgccaaacagtagggtcgaccaacactaacctagtggcgatccacactggactcagactgccctagtatgccttgcatctgcacttgttagtagacaagtctacacaccagaagttgttgtctactacctcgatagtccaagcagaaaattcctgagatgctttgcatgggtatcatggatgagattctacttcagttgcctccggttgttatagagaagttgtcaccccctcttcagagtgctatgatacgagatgatgctccagagaagcaggatgacaagacaaagacagtggttgtcttggaacaggtcagtgacatagtcccatgtaggattatagagaagccatccaccatcgatggtcagccatactctgtggagacctctatagacacagtggttgtctctgaacaggtacttcgcaacagcaagcgtccacatgaagcaagctctggattcgttgctgagaatcgatttgcagagatggtgtcgaccgacaccagtacctgtgtcgatcgacaccccaaacgggctgaaccagaactgtgtactaaagctgcttcgcaagttcagatcactgctgctattctaggacctgttgtcacgacaaccactgcgtctctacaactgcatccacctccgaagaggcaacggtactcatatcttcctcttaaacctacagatatcatcaatttgactttaaaatttccaaagactgtttcacggtttagcaagccacgagtttctcgtcgagcgcttgtttggtcttttgatgattgtgcacgtaaaggagtattccacccatacctgagtcccacactactgatgctcctctcttcctagatagacctcatgcgctaactgcttctacgctagcatggatgatgagaggtctttctcttcgatatttactgccaccttttgatccacctgatccccaaactccaccaaagttaagctattgactacaaacaagcgcttagtgggaggcaacccactggtatggttttctttttctttttctttttcttttatttttcgtttttcttttatttttctcgcttactccagatttgaatgccactggggacagtgtcgtttaagtttgggggaggcagttactaactacgtttttctttttgagtcttatgcttactcttctttttcttttttttgactcgttttattgagtcaaaagtttttaggaattatgatctctattccttagattattgtctggttcattaatgctacaggtttgactcaatccgactattggaaaatccagatggcaaaccaacaaacttgaggatatcctagtttccaatacaatccatttaggctggagctaatctcactgctcttccttttacctcatcaaaacggttagtgttcatagaacttgactccttgttcatacatgatgttgagacctacgtgaaaaaaaaaagtattcctctccccttattaaaaaaaaagaagaaagcaagagattgatatgatttttggtagtgtataggggtaggaatgtttcccatgatcccattattatatattattaggaatgatcaattacgaaggttggaaatatgttgaggatgtcaatccactatgcgagttcccctttgtttcctctctaaaaagaataagtttaggggagagaaataataccaaaaaaagtaatataaagaatggtcgatttatcatggtatagtacatgaatgagtctcgaaggttctcgaatattagcttgcttgatgagacccaacaatgaaagcctaatgaatatagtagtgaaacttaggtatagaatctagaatcttgtgtaaagcttgcggagaaatacattttggttaggatttgactagacttgctaggcatatagattttggtactagaattatgatggctgatataacccgattttcacttcttttagctatgattaaggtatagttgttccttttgttatttctagtgtattttctaatctttttcaggtctttacatattttggatgcatttggagattatggaacattcttgagtaaaagagagaaattatgctgcagaagcaatcaggagacaaaacttcacgtaggtgtcgattgacaccacccctggtatcgagcgacaccaatacctgacgacaattcaaaaatgcagaaaattgaagttttgaagatttcaaaatttggctcagaactttcccttatttctaaagaaggcccataacgttttaggtcatatatatataattctaaagttcattatttagacctaagcttggagaggctaatctccttatctcttttgtacttgggagcaaaaccctatggagactcgctagagaagatctttcttactctttcttttgttattttcattattgatttcttattcagactttaatttgtgttccttagatcatgtttgagtagctttcttgttaggtttagggtttctcattaaggatttaaatgatttagtagattgcccccttgctaggttatctgttaggattctttatcttagttgttcttgttcttaatgctagttctagagtagctaactagaacttgattccagataatagatatacccgccataggtatcttttatttgatgagcctgctctataggtgtgtaataagaatcggccgatttactaaggtgactttattgaattcgtttataatgcatgattaagtataagatttctcggcttctctggttattcttagctctaggcatagggagtttcacggaccgcccaccggttattccacaataagagttagagtttatgaacggtttgataacaacctagctatcactagatatactaatcatctgtttcttcagaataccacaagcctgacgcttttattatcttgtttcacaaccatccaatcgattgctattgcttactttttgtttctctttattttcattactgttttacttagcttaattcaaaaccttagtctattgcgtgatccgagagctttgtgcattcgatccctaagtgctgcaaatgacctctttatttgagagagtggtctaggattaatttgatcccatataaaattgggtgccgttacaaagttcttaggaatcaccattaggtttagtttagagattttgtctaaacttttatttttcttttgagacttacacgtttcttgtttttcttttcttctgtgtttcagttgtatgcctagactcataagaagctcaaaagaaaaggacctgatcaatctgtctactgatttgggcaaactagaactcactggtatgtttttatatacaagcgcttaatggaaagtaacccactagtatgttttcatttttcttttctttcacataagtttttcattttatttttctcctcacttcaattttgaatgccactggggacagtgacgtttgagtctaggggaggcgcttactaactatgcttttatttttgagtcttagtatttttcgttgttcttatctttgagtcatttttcttttctaaagaaaaaaacgttattattgagtctagttagttagaaattatgatctgtatttttttagattattgcctggttgattaatgttggaggttcggctaaatacgactaatggaaaatccagaaggtaaaccaactgactagaggatatccacttttccaacataatccatttaagctggagctaatctcactgctctttcttttacctcatcaaaaaggatagtatttacagaacttgactccttctttatacctgataaatgagaccaatgtgaagagaatagtattcctctcccttatatactaaaaaaaatatgaaaagagagaaattgagatgatgtcctatagtgtaaagggctagatatatttcctttgatcccatttattttacattctaaggaatcataaattgcaaaggttggaaatatgcggaggatacctataacaccccccggaagcatcacgatcgttggcgaccgcctggagacgaatctgacctaagattacccaaggctaagcccgaccacaaaagaccgctcctcgcgaccacgagacttagaggctttgcaacctgtactgcgaccgcaagttgggattag

SEQ ID NO: 165994 - DNA, 568 bp, Arabidopsis thaliana landsberg
agatgtacttcatgtttcgacatggagtatagtcgtagtcccattgttgatgatctcagacaactattagctaaggaggagaaataaggttttctggtatgataaggagtatatattgcatgcattggaagtagaggaattgtcccatttgatgaagaggataatttacaataggggacattggatccccagctatgataaaaaaattgcctcacatgacttgtagatttgacatacttttttggggtgacagagtcgaacaacgacgtgaacatgcttaatgagtcaccgttgttcactgaccagctcaagcgtgaagcaccaaatgtaaaatttatggtgaatggtcatgagtgcaaccaagggtactacctcgccgatgacatctaccctcggtgtttgttgtttgtgaagaccattcatcttccatatattctaaatcagtagatgtttgctacataccaagagggcacactgaagggtgtaaagagagcatttggggtgctcaaggctcgattccatattctcaataccctaggttattcctttttcgacacttagttgatca

SEQ ID NO: 165995 - DNA, 1738 bp, Arabidopsis thaliana landsberg
gcttgtgatattagtgcacataagttgttcgataatatgtctcttagaaacaagttcaaagaagtagttttatatttttaactatgtttctgaattgtgcaggtggctgaagcaccatgagttgtcatataatagaatagcgaagatcatatgcatgtcaaaaggaaatctcgactccataaggatcatgatcgagtggctgaagagcattcatgcgaagggtgaattcattgcagttgcgttcttgagatctggggataatatattgcaacgtaaccgtgaggaactaaacgaaattgttgagtatctagagagcaatggtgtgaggagggattggatgggttatgtggttggaagatgtcctgagttgctgtctttcagcatggaagaagtgaaaagccgtgttgatttcttcttgaaaatgggtatgaatcagaatgactttggcactatggtctatgattatccaaagataattggcttcttctcattccaagtgatggagaaaaaggtactgaaagctctttttaatactccagcgttaagattgtcgtttaagttcataattgtgttgcttgtattaaaccagatcaattacctgaaagagtttggccttagcacagaagaagttgggagactattagcctacaagccacacctaatgggatgcagtattgaagaaagatggaagcctctagtcaaatatttctactaccttggaatccccaaagaaggaatgaaaagaatccttgtcgtgaaaccaattctttactgcattgatttggaaaagacgatcgccccaaaggtagttgaacttcgttataacgtatgaactccctataccatacacacagcagattccattaactcagcttctctcttgtgtttttaaaggtaagatttttgcaggagatgggtatccctaatgaagccattggaaacatgttagtaaagtttccttctttacttacaaacagcctctacaagaaaatccgacctgtggttagtaattacttcctctatgaaacaaagatgttccatcgaatgttgttatgttagtgttgttactcataacatatgatgatttcagaagctgcatctgatattgtacaagttgtggttgtacaggtgatttttctcttaaccagagccggagtaacccaaaaggatatcggtaaagttatagcaatggatccagctctccttggatgcagcatagggacgaagctagaacccaacatgagatactatatatcattgggaattcgattttatcaactaggcgaaatgattgctgatttcccgatgctgcttcggtataacgttgataatctgcgcccaaaataccgttacttgcgaagaacaatgatccgtccgcttcaagatctcatagagtttcccaggtaccagaaaaagaattgataaaaataatcccttcaaagtgtagcttttgagtaaccatggcacttgtaacagattttttagctactcactagagcgtcggataatcccaaggcacaccattatggttgagaacagagttaacttcaagctcagatacatgttggcttgtacggatgaagagtttgagaggagagtgagagataaagtggagagaagagagagattcgaagctggcctcgactctgaggattctcaaccgtcggatgagaacatctccgatcaggagattgctttctcagacgaagcggaagaagaagaggatttgacagaatga

SEQ ID NO: 165996 - DNA, 277 bp, Arabidopsis thaliana landsberg
atgaccgagtggctctgcgcggacaacatgggcatctgccgcgatctggccggacggtggcccggctgacaaaccgagtcgtggggagaccgcttcgaggaacagaccgcccggtacggacgggcgctgcgattgcccgagctgaacctgcccgccggcgccgacagcgcccgcgcctggaccagcaaacgggtctaccaaagcttcgccgacagcccggctggccagatcgccaagatcaccgcactgctggacccgttggcgcccgggctggtcg

SEQ ID NO: 165997 - DNA, 619 bp, Arabidopsis thaliana landsberg; identical to SEQ ID NO: 41851
  unsure (1)..(619): unsure at all n locations

SEQ ID NO: 165998 - DNA, 585 bp, Arabidopsis thaliana landsberg
ggcatggagccttcacagggcagagggcctctcctcccattgaggtccagcaatgcaaatgtgcaacatcctcagtcatcaggagaatgcaaatcaagacaactttgagattccacctcactccagtcagaatggctaagatcaaaaactcaggtggcagcatatgctgcataggatgtggaaaaagaagaacacttcccccattgctggtgggattgcaagcttgtcatcccactctggaaatcagtctggcggttcctcagaaaactggacatagtactacctaagggcccagctataccactcctgggcatatacccaaaagatgctccaacatgtaataaggacacatgctccactatgttcatagcagccttactttataatagccagaaactagaaagaacccaaatgtccctcaacagaggaaaggataccgaaaatgtggtacatttacacaatgaagtgctacccagttattaaaaacaatgaaattcacaggcaaaaggatggaattaggaaataccatcctgagcaaggtaacaaaagaacacacatggtatgttcttaatgataagtggatat

SEQ ID NO: 165999 - DNA, 1891 bp, Arabidopsis thaliana landsberg; identical to SEQ ID NO: 28102
  unsure (1)..(1891): unsure at all n locations

SEQ ID NO: 166000 - DNA, 1770 bp, Arabidopsis thaliana landsberg
tcgttatttaaagcaaatatttaccgccatgctttggctctttacagtcagatggttgtgcgtgggatacctgtagatttagttgtatatactgttttgatggatggtctgtttaaggctggggaccttagggaggctgagaaaacatttaagatgcttttggaagataaccaagttccaaatgtggttacatatacggctttggttgatgggttgtgcaaagcgggggatttaagcagtgcagaatttatcataacgcagatgttagagaaaagtgttattccgaatgttgtaacatactctagtatgataaacggctatgtgaagaaagggatgctcgaagaagctgttagtcttttgagaaaaatggaggaccaaaatgttgtgccgaatggttttacttatggtacagtaattgatggcttgtttaaggcagggaaagaagaaatggcaattgaactgagtaaggaaatgaggctgattggggtggaggaaaacaactacatacttgatgctctggtgaaccacttgaagagaattggtaggattaaggaagttaagggattagtcaaagacatggtatctaaaggagtgacgctggatcagattaactacacatctttaattgatgtattcttcaaaggaggagacgaagaagctgctcttgcttgggctgaagaaatgcaagagagagggatgccgtgggatgttgtttcttataatgtcttaatcagtgggatgttaaagtttggcaaagtcggagcagactgggcctacaaaggaatgagagagaagggtatagaaccagatattgctacatttaacataatgatgaattcacaaagaaagcaaggggattcggaaggtatccttaagctttgggataagatgaagagttgtggaataaaaccgagtctgatgagttgcaatattgtggttggaatgctatgcgaaaacggtaaaatggaggaagcaattcacatattgaatcaaatgatgcttatggagatccatcctaacttaacgacataccggatttttcttgacacgtcttcgaaccataaaagagctgatgctatattcaaaacgcatgagacgctattgagttatgggattaaactcagtcggcaagtttataacactcttattgcaactctgtgcaaactaggtatgacgaaaaaggcagctatggttatgggggatatggaagcgagaggctttattcctgatactgtgacgttcaattcccttatgcacgggtactttgtaggcagtcatgtaagaaaagctctttcgacatattctgtgatgatggaagcaggaatatccccaaatgttgcaacctataatactataataagaggtctttctgatgctgggctaataaaggaagtggacaaatggctgagtgagatgaagagtagaggtatgcgccctgacgattttacatacaatgctttaatctctggtcaagctaagatagggaatatgaaaggaagtatgacgatatattgtgagatgattgcggatgggttggtaccgaaaaccagcacttataatgtgcttattagtgaatttgctaacgttgggaagatgcttcaggcgagagagctattgaaagagatgggtaagagaggagtgagccccaatacttcgacttattgtaccatgatatctggtttgtgcaaactttgcactcatccagacgttgagtggaataaaaaagcaatgtacttagcagaggcaaaagggttgctaaaagagatggtt

SEQ ID NO: 166001 - DNA, 1271 bp, Arabidopsis thaliana landsberg
atgacaaaatcagctataacatttccacttatcttcacacttcttaccttcatcgatgtctcgagcagcgcctccattgttttcaacgtcgtgagcttcggggccaaaccagacggagtcaccgattccacagcagcattcctaaaggcatggcaaggggcttgtggctcggcagcatcagccacgggggtggtccccacagggacattttttgttgaaggtaataacgtttggagggccatgcaagagcaaaatcacatttcaagtgaccggaaccgtcgttgctccggaagattacaggacctttggcaattccggttcctggattctcttcaacaaggttaacagattctcactggtcggtgggacttttgacgctcgaggtagtgggttctggtcttgccggaaatctggccagaattgtcctcccggtgttagggtacatatgcttctcctctatctatagttattgtaaataaaaacaacaatctgacattcatacataagcgccaccagaatgcaaaagagcaacaaatagctttaatcattattgattagtaataactaaataagtcaatattttttttttaatagtcaagtaacatatctttattccaatcatttacttacgattaaaaaaaaaaggaattagttgatagttttcaactatattaattcaggcacatttaattttcaatatgatctatccatgccatttttaggaatttattttataagcatataataactattatgataatgatttttggacaaggaaatggattctttggtcaaaataaaatgaaatatttataatcttatttattaatctatggcgtttatatattaattactgtagtcaatatcgttcaactccgcaaaagacgtgatcataagtggagtgaaatcgatgaacagccaggttagccatatgaccctcaacggttgcaccaatgtggccgtccgtaacattaggctggtggctcccggagacagcccaaacactgacggctttaccgttcagttctccactggagtcacattaaccggaagcaccgttcagaccggagacgattgtgttgctatcggtcaggggacccgcaacttcctcatcaccaaacttgcttgtggcccaggtcacggggttaggtatataccaccgtctaattccttagagtaaattatgtaaatatatcattaattgtgaggatcggaatcatgagtttccaacaaaaaaaaaactagcaatattgccttcactcactctggtc

SEQ ID NO: 166002 - DNA, 1562 bp, Arabidopsis thaliana landsberg
gtgtccaagccttgattgatcagttaggacttaaaaacgcggcgaatacggtgatcggagatgaaggacaccgtggaatctctggaggagagcgacggcgagtttcaatcgggatcgatatcatccacgatccgattctgcttttcctcgatgaaccaacttcgggtctggactctacaagtgctctaagtgttattaaggttcttaaacgaatcgctcagagtggaagtatggtgatcatgactcttcatcaacctagttaccgtcttcttcgattgcttgatcgtcttctcttcttgtcccgtggccaaactgtcttcagcggatcgcctgcgatgctaccgcgcttcttcgcagagtttggccatccaattcctgaacatgagaaccgcaccgagttcgctttggatttgatacgtgagctggaaggatcagctggtggaacaagaagtttagttgaattcaacaaagggtttagacagaggaaagcagagccaagaagtcagactggcttgtccttaaaagaagccatcagcgcaagtatctctaaaggcaagctcgtctctggagcgaccacaacaactcatagctctggctcgagccctgtttccactattccaactttcgcaaacccgttttgggtcgaactcgcggttctagccaaacggtccatgactaattctcgcagacagcctgaactattcgggatacgcctaggagctgttttagtcactggattcatcttagccactatgttttggcagctagataactcccctaaaggagtccaagaacgtcttggatgcttcgcttttgcaatgtccacaacgttctacacttgcgcagatgctctccctgttttcctccaagaacgtttcattttcatgagagaaactgcttacaacgcttaccgaagatcctcctatgtactatctcactctcttgttgccctcccttccttgatcatcctctcgcttgcttttgcagcgatcacattttggggtgtgggtttagatggaggtcttatgggtttcctcttctacttcctagtaatcttagcctctttctgggcaggaagctcattcgtcaccttcttatcaggcgttgtcccacacgttatgctcggttacaccattgttgtagccattttagcctatttcttgcttttcagtggattcttcatcaaccgagatcgaatccctggctactggatctggttccattacatttccttagtcaagtatccttatgaggctgtgctcctaaacgaattcggtgacccaacaaagtgtttcgtcagaggagttcagatattcgacaacacacctctggtcgcggtgcctcaggggatgaaagttaggcttctagcaactatgagcaaatcacttggaatgaggatcacaagctctacttgcttgaccacaggatatgacattttgcagcaacaaggcgttacggatctcaccaaatggaattgcttgtgggtcacggtcgcttggggcttcttctttcgaatcttgttctacttttctctgcttttgggtagcaagaacaagaggagg

SEQ ID NO: 166003 - DNA, 947 bp, Arabidopsis thaliana landsberg
ttattaattcaaagagctttagtatcatgcaatgaacttccactgaatgtttgcaggatctgtcatgatacagataactgggatctattagttaagtactcgaagaaattctgcaaagctggagtcaagctcaggaagaccacatttgatgtctggatggaatttgctgccaaaagaggtacattttgtgtagttggtttccttagtcttacttccaacgattctttggtcgatagaggagcttgttacaaccattccgtaatttgaacttgtgaagtggtcttgagatatgtctacgtaaacatcagacaaagatattatcctatcatatcgaaacagatatgccaacataactgttagcaaaacagatcatttttggtagccaatttggtaaaagggaccagaagtatgattttttttatttttcttttatgtaatctcatgaatgacctgaccacaaatcagatttaggctccgttactgttagaacaggaaaaactaaagatgtgagcaagagaattaaatcagagcagaacacaattggacttgtaataaatttgctatacaatttggataattgcttactgtctctgacttattggactcttgctttatcaggagacacagagtcgttatgggatgttgataaactgagatgtgagacttacactcaacacaccctttccggtgcttgtatatgtgcaaaggtaaaacagttctttatgcttcctcatgttatggacaataatcactcctgttcataatttctagaaccaagtttcggattgttcttgaaacgattgctctctctctctctcgcacggttttctgctagaacgtacacctgaagaagctgctgcagtcatccaaattatctgtcacgtgtgagccagaacctgttaaatatctgtttctttttccaggatcaaagaagtttctgagatacc

SEQ ID NO: 166004 - DNA, 579 bp, Arabidopsis thaliana landsberg
aacttctatgcaaaggttcgtaaactgtttatacctcttactctcttgcgtgatcatcaagtaacaattgtttttgtttttttgctgttgagtcaacaattagttaggaaataggaatcaaaaaccgtgttaacttccttttttttggcataactataaccacataaaatccaaaaaaagcttagtttctattttctcctgattcaagcatctttggaggacaagattgatgttgattcatcattaaacacactttaaaaataatataagcttttttttttttttccataaataatataagcttataatgcggggttctctaaaaggactacacaaacaaaagggttgtggctaaactgcgcttgaacagtcagcgactgtgacggcatgtcgagactgactgggcatgcagagatgccatgtactcctaaagaaattctcagccgtcggattggtttcagcgcacacgaggacaaggacagtactcaacttttggttcgttcaccactcgtgggaccctgccttgcttacgatctcgatcgagtggtaatattagcccccacggtgcacgttaacgta

SEQ ID NO: 166005 - DNA, 727 bp, Arabidopsis thaliana landsberg
ataaaaagtatcgtttgctctgctaccatatggaatgtgaatgtgaatactttattagagaggagttgtacaatatattatgtaaactgagagacatagtattctggagacatagctagaccccttcttgttttgtgagattggttctggagaaacaactagtttctggtacgataattggatcaggctattggaccgggcttggaccgcttattcatctaactggtccgattggtccgcaagttgttggtttgccttctcaatcagtggttaaagacgctttaagagggaatacctggtggctctccttatcccgaagcaggaatcctatcatctctctgataaaaaacattttgcctgactgtggaagtatggttgattgtgagcaggatgatgtttacctctggaagcaagatcatcattctccttcaaacattttctcagcggcaaaaacttggctggctttacatccctgtggtgttcctgtctcttggcataagtctgtgtggtttaaggatcgcattccgaaacacgcgttcatatcttgggtggtcacttggaatagacttcacacaagagataggctcagaagctggggtctagggattcccccggactgtgttctttgcaatggccatcatgaatctagggaccatctgttttttgaaaacagttatagtcaagctgtttggggtctttcgcggtctagaatgcacttgacgcctct

SEQ ID NO: 166006 - DNA, 1098 bp, Arabidopsis thaliana landsberg
tcgcgcgtgagatctactcccacgctcgtcactgggtcttgagatcctcttgaacggttcggtaaccatggaggcgaagaaccgatcgtcctcatccaccatctccactatgcaatgtttgcgcttcttgtccttatgtgttttggagataagcttgatgagaagcaaatcaaagaagtggagttcattcaaagactacagctccttagcttgaccaaatttaacatcttcaacatctggcctaagttcaccaaactgattctacgaaagaggtggcaagaatttctccagattcggagacagcagcgggacattttgcttcccctgattcgtgcccggaggaagatcattgaagagagaaagagatcggaggaagaagacaagaaagactatgtgcaatcatatgttgatactctactcgatctagagcttccagaggaaaataggaagttgaacgaggaagatattatgaacttgtgctcggagtttctcacggccgggactgacacgacggccacggcgctgcaatggatcatggccaacctagtgaaatatccagaaatccaggagagattacacgaggagatcaagagcgtggttggggaagaagcaaaggaggtggaggaagaagatgtggagaagatgccgtatctaaaggcagtggtgttagagggactccggagacaccctccaggacactttttactcccacacagtgtcacggaggacactgtgttaggaggatacaaagtaccgaagaacgggacgatcaacttcatggtgccggagatagggagggatccaaaggtgtggcaaataccaatggcgtttaagccagagaggtttatgggagaagaagaagcggtggacataaccggaagcagagggataaagatgatgccgttcggagcgggtagaaggatatgtcccgggattgggctagcgatgctgcacctcgagtattatgtggcgaatatggtgagggaattccaatggaaagaggtcgaaggtcatgaagttgacttgactgagaaggtcgagtttaccgtaatcatgaaacatccgcttaaggctattgctgttcctaggagaagtcac

SEQ ID NO: 166007 - DNA, 406 bp, Arabidopsis thaliana landsberg
gggcagctgtggcaacagttcgaccacaacgtgcagagcaccggcgtgtcgcgcgcaaaatggggcctgatcgtcgcggtgtcgcgcaatccgggcgcgacgcagcgcgcgatcgccgcgatgctgcaggtcaccgaggtcaccgccgggcgcatgatcgaccggctctgcgaggacggcctgctcgaacgccgcgagaagcctgaggaccgccgcggttactgcgtctatctgacgccggccgccaaaccgctgctcgaccgcatcggcgcggcggaggcgatctacgaggcgcaggccttcgtcggtatgaccgacgccgacctcgagcggctcgagcagctgctcgtcatcattgatcacaacatcggcacgacggcgccaagggaggacgaagagtccctgc

SEQ ID NO: 166008 - DNA, 736 bp, Arabidopsis thaliana landsberg
agtgatcttcctgtgatcgcgagagacgacaacctaagtgaagaaacaaaaactctgatctcttcacttcctacataccaagattctcatgagaagctctgcaagtaccaaggatgttggtattaccacaacactctccaagcagtcatcaactaccaaagaaacttccagccgcaagacaccgacattattctcgcgtctttccccaaatccggtacaacttggctcaaggcactctcagtcgcaatcgtggagagatctaaacagccttttgatgatgatcccctcacacatcctttgctatccgataatcctcatagcatagtaccgttctttgagttcgatatgtatctcaaaacctcaacaccggacttaaccaagttctcaacatcatccccgaggctgttttcgactcacatgcctttacacaccttgaaagagggcctcaagggttctccatgcaaggttgtgtatatgtgcaggaacataaaggatgttttgatatcggattggcacttcaggtccaagtatagcaacaatgaagtatctagaagcactcttgagtcaatgttcgagtcattctgtggcggagttagcttctatggtccgttttgggaccatgctctaagctattggagaggcagcttggaaaaccccaagcatgtccttttcatgagatacgaggaaatgaaaacagagccgtgtgtccaggtcaagaggcttgccgagtttttgg

SEQ ID NO: 166009 - DNA, 747 bp, Arabidopsis thaliana landsberg
tgttttgcaaacacaatttgcatgaacaccaaaccaattgtttacatcgttaacttaattattttgttcctttctcttttttttaaaaaaagtgggttgatgaaagaatatggagaaaagatgacgaaactatgtgagaagataatgaaagcaatcctctctagcttcggagacgatcttcatcacaagtattacgaatctgagtttggaaactgtcatggctacttcaggatcaacaactacacaatcccttcagaccaagaagatgatcatcacaacggtgatgagcaagatttgatcgaagggctaggaatgcacactgacatgagttgcatcacgatcgttgaccaagatgacatcggaggtcttcaagtcagaaccagagatgggattggtctgatggatatcaaccctaaagatgaagcactcgttgtcaacgtcggagatctattgcatgcatggaccaatggacggctgagatcgtctcaacacagagttatcttgaaacgacgtggtttcgttggtaatagattctcacttgcttttttttggtgctttgacgatgggaaagtcgtgtttgcccctgatgaagtcgtcggaggttgtgagggtatgagggtatttcgatcatttaaatgtggggattatttgaggtttagagagagtaatgagaaagggaagttcgagaaggttggggacacggtcgaagactttgcacgaattgaagaccgtcgttaattaattttt

SEQ ID NO: 166010 - DNA, 1765 bp, Arabidopsis thaliana landsberg
atggataaaaagtacaagaggaatacttgttggagtattcatggagagataaagaatgagaagaccgtggatgttcaacaccctgaattagaagcttatgtgttaatgtagagaattcagagttcttgaacaagaatggatcagaacaacctgaagtgggtgaacgggaagaagaattccagtttaagaagagattagaggatgcagaaacgcctctgcactcaaactgcgcaaactacaccaaagttgcaacaattatgggtctatatcacattaaagttaagagtgggatataagagaattactatgatcagttgttgaatatggttcatgagatgcttcctgatggtaatgtgcttccaatatccacaactgaggtaaagaaattcttgaaggtctttggttttggttatgatgttattcatgcgtgtaagaatgattgtattctttaccgcaagcagtatgaggatatgactagctgtccatgatgtgatgcttcacgatgggaaattgataagcattctggtgagacaaagaatggaattccatcaaaggtacttaggtatttccccattaaagaaagatttaagaggatatttagatcgaagagaatggctgagaatttacaatggcatttaagcaatgcttctaaagatggaacaatgagacatccggtggactgaaggacgtgggcgcatgtcaatgccaaatggccacaatttgctgctgacccgagaaaccttcggcttggtatatgtacagatgggatgaatctgtttgctatccagaacaccaagtatagcacatggccagtgttcttggtaaactacaatatgcctccaacactgtgtatgaagtcagagaacataatggtaacacttcttattcctggtccaacagcaccgagtaacaatattgatgtttaccttgcttatttgattgatgatctgaatgatttgtggaatgaaggtatccaggtatatgattcattttctcagaagaatttctcacttagagcaatattgttgtggagtatcagtgattatccaggattaggaaccttggcgggttgtaaagtaaaaggaaagcaggcatgtaatgtatgtggaaaggatacaccttctagatggttaaagttcagtcgaaagcacgtctatttgggtaatagaaaacaacttaggctagggcatccttatcggcgacgaagaaattggtttgataacactatggaagaagggactagtagtagaatttaaacaggagctgaaatattagacatgctaagtgatttcaagaacgattttggaaaacctttggttaagaaaaagaaaaaaaactcaggtttctgtgaagatgaggtgcttatccatgatgaatatacagaagattcagaccaattgaggtgaaagaaacagtctattctatttcagctagcttattggaaggtaagtattgtgtcaacatacatttatttaaagtacatagctgtcaaagttgtgttctaactagtttattttctgttttactatataggatatgcatgtgcgtcataacattgatgttatgcatatagaaaataatgtgtgtgacgccatgatttccattttgatgcacaatgctaaatccaaagatggtttgaaagcacgtcaatatttgaaagacatagggattagaagaaacttacagagtaggaaaggcgggaagaaagcatatttacctccagctgcttattggttaacaaaggaagagaagaagattttttgta

SEQ ID NO: 166011 - DNA, 659 bp, Arabidopsis thaliana landsberg
atggctctggtggttaggctggtaaggggagagtggaaacgagatgagtccggatgttatgagcacgtagccgagttggatgggttatgcttggcggtgaagctccgggagcgagacacgttggccaaggtgattgagactattaaggaaagactgaatctacggacggaagatgaggtggaactatcgtatcaatggccgcaatggatgatgggtccagattggcagcgtgcaaaccctatctatattgtcgatgacgaagacatgacgttgtttatggccattcgggccgatctagatgaggttcacttgaaggtcaaatccatacgcagggatagagggacaacgacagtgaattcataccgtagcggcgtagatatcggtagtatgactgcataagcgatatccgataagtactggaatagcgatgagacaagagccgccagggattcagccgtaacaaggatgttattcgataatttacctactactgacgcaagagggtttagaaacaagacaagaatgttgtcggaagccacattggcagacaggggttggaagcatcgtacctagaagcctaacccaaggtcaaatgaaagcaaccgctaaagggaaggaacatgtcatagacaaggagagcataaaaggctttagttaca

SEQ ID NO: 166012 - DNA, 425 bp, Arabidopsis thaliana landsberg
  unsure (1)..(425): unsure at all n locations
nnnnnnnnnnaagaacatcttattgaagaatgccgtaccgacagggctgccttcgggcaggtgtttgattattggtataaacctatattcggctatatcttgcgccgcacggccgactacgacctttcaaaagatattgccgcggaaacttttcttaaagcatttttgaaaatcggcagcttccgctaccggggcatcagcctttccgcctggctctaccgcattgctaccaatgagctgaatcaatattatcgcaacagtaaatacaagccgcagtnnnnnnnnnnnnnnnnnnagaacccgcaaatggaaaaactgctgcaccagccgtgcgatgatgaacgcgaaataatggaaagagagctgcaggcctttgccgactttaacgagatacgcgccaatctgctaagcggacattaatccag

SEQ ID NO: 166013 - DNA, 415 bp, Arabidopsis thaliana landsberg
  unsure (1)..(415): unsure at all n locations
ggcagcgggcgtcgcccccgggcggtggttccaggtttgccgcaacccccccgcgggggtggtcgtcgtcaccgtgcgcgccgcccccgggccggccggcttcgccgcgacctcgctcgcctccctgtccctcgcgccccggctggtctcgttcggcgtgggcgccgccgcgtcgtcctggccgcttgtcgagcaggccggcagcgccgtggtcgccttcctcggcgccggccgggtgctgctcgcaagggccttcgcctcccgcggtttcgtccgtttcgcggcgcccgcccggtggcgcaggctgccggacggcgccccggtgctcgtcggcgtgcccggctgnntgcgccgcggcgttgggcggggctcttttttttttaccacaaacaaacgtggtcggctcggtccggga

SEQ ID NO: 166014 - DNA, 894 bp, Arabidopsis thaliana landsberg; identical to SEQ ID NO: 46518

SEQ ID NO: 166015 - DNA, 2360 bp, Arabidopsis thaliana landsberg
agaggataatcgtcctaaggatattctccttattcttcggaggttttggggagatttcctgatttcgacattatcttcaaagattctcctttatcatttccaaaagtcccataaaagatcctattttaccggaaatgatccttggagaatgaatggtttttacaagtctttgcctcgcgtgtttttcacggctcggtggtcgtttgagaggtggcttcggggcaaacggtatgtaccggctcggggcgcgcttgatgactccattaagctcagttggctgtctcctgagccgatatagatgtttcccgcagcgttctcacgattggctcgggctgtgttcatatgattaacacccgagccattttacaaactctcttcgggacggtcgatcgaataaggtcccgaggtgctttgttctaggctaggggccatttatatgtttaaccatgaggtgattgttattcttagactgtttggctcggtcttgcttgtgggggaatccgaccccaatagttagccccccagctcgttggttaagagttaatgcgacgagcttcatgaatggtgtgaccgagccagctgcttccgcatctaaactgactgatccgtatcttttgagagtaaggcttgttttttcttggtgctacgagattctgttcttgacgggtgttgctatctcgaattcaaaatgttagctgttgacaagttgagctaggaaagctgctaggagacttgttgaagaactccaagctgttgacgagctgttaggccgggcaatagctaggaaggctgccgacgagctgttagctgggcgaactacgagtcagagaaactgcagacggactgtgagctaggaaaagtgcagactaggtgctagctagacgaactgcgagctaggaaagctacagacgaacagggagctaagaaagctgcagacgagctgttagctaggcgaattgcagacgagctgctagctaggaaagctacagacgaactgggagctaaggctgtagacgagctgtcagctaggcgaagtgcagacgagctgctagctagacgaacttcgagctaggaaagctacagacgaactgaggtggttggctcgggtacaaattgcccgagtcaaagctgggttcagtatacttcgttccgagctgatcgtctcggtaccaggttattcgggatagctggatttctaagcacagaccaaagcacataagaaactgtatttagccgaagcaaaagctcggcaccagtgtttatgataactgggttttagtttccgaggcggttgactcggtaccagtgtgtttagagtaactggatttcagtagatttgaatacccacggttgcgacccgatttgattcaatcttttaccagcgtttagaaacgagctggggcaccggtgttaagtataaccgggtttcagaagatagaattcatagcctgctcgaaaaaatattcgagcagattcttatcttgaatatttatatagcacgctgtaaccgaagcggtgtaaatgaaactttggaaataataggccgtcgcccgttaaaatatttcaaagtaaaaagatttagaaatcaaattccaagaaaatttgaagtagaaaaatcgaagttcaaatttaaaccgaaacgagagtttaaaattgaagtgggagtatggatatacggaccccactcccccccctttttgctcggtagacgagtgtttttgcaagtttacgcaaaaaatatagcagagaatgcatatatatgattaagctgtacttgttagattataatagataacacttatcttattggtttggacatagagatgatgatatctacggcatggacgatctgaatctctgagattgtaaacgtcgttgtatgaaaatctacatttaagatgttgttcgttagaggagatctcatctttgcgtagaaagagagaagcaaggatgaatgcttgtgatataagtgaaaatgtcaatcaagcttaattaatatgtaagaaagtaattgaaagacataaaagataattatcaagctttttctctctctctaaagggcgaaaagtggtttccttctcttctagcctccggcgtctccagcggcgccggctcctcctctcgccgggctcggcaggccctcccctcctcatggggaagcaaaagcgcctcaagtcgttctctccttcggggagctcgtctccctcggtctcttccgccgcctctctggtggctatctcctcgccgtctcctccgccttctcctgtcgcaagtgcccctgccgccatctcctccgcggccatctcccccgccgcctctttgtctgcagtttccagatctgcgcctgtcttagatcccag

SEQ ID NO: 166016 - DNA, 422 bp, Arabidopsis thaliana landsberg
ctgattttcaggtagaagctgagaatcagggagaagattttgtggatgcgaaaataacggcagtagtaaagacgaattctgtagctaccgggccggcagaccgcgacaagcatttacggtcagcagattttttcgatgcagcgcaatatcctgaaatgaagtttgtcgctacccgttttagtaaagtaaatgaggaaggcgattatgagctggaaggtaacttgacgattaaagatgtaacgaaaccggtaaagctcggcgtggaatttgggggtacggtacgtgatccctggggaaatgtaagatcggctttcagcatccagggtaagatcaaccgcaaagattggggattgaattataatagcactttggagacaggaggcgtgatggtcagtgaagaggtgcggaaactgtcggaattg

SEQ ID NO: 166017 - DNA, 830 bp, Arabidopsis thaliana landsberg
cgtttttaagtggcaaacccggttcaatctggtctagtttggttcactgccaattttcggttaaacagaattgtaatacttaccgtggatcgatcgatcgataccaattcaattgcatgctcaaatcgcaaagctgcttcccggaccgatcgatcgactacctggatcggtcgatctgttgccattggtcccgacgactcatttctggatcgatcgatccctttctggcggatgtttctgagctagacgtcacgatcggatcgatcgatcccaccctggcggactttttttcagcttcgatgtcacgacaggatcgaccgatctagtgttgggatcgatcgatctaaacctggcgggttcctgcactcaaaaacaatctcacaccaccgtcaaatataaagactctatcgactgttgagccgataagtctaaactccacagcggagcgaaacaaaccaaaatcaaaggaaaataaaagaaagaataaaaagtatgtacaataccatgtgggttgcctcccacgaagcgcttgtttaaggtcgttagcttgaccgtaatgaactgattaggcttggtctggatccgttagagggactgccgtgccctcttcgggagtggaatgagcaaggtatggtttcagcctttgtccattggtagaaaacggttctccattgttatcccaaagtactgctgatctgtttggacgcatttcctttatgacgaaagggcctgaccactttgaacggagttttccaggaaaaatcttgagccttgagttgaataggaataccttatcaccttccgtgaactgcctcaagatgatcttcttg

SEQ ID NO: 166018 - DNA, 268 bp, Arabidopsis thaliana landsberg
gccttaaatatgccaggaaccatggaaagggcgggatgaaggcgtttgtgcataggcagcggccctctgacgagcattagcaaaaatggacgctaaaatagacgtggcaagcctccgctggcactatatagataccaggcgaggggcgctggaatataacttgtgcgcatgacagtaccgacactgccgcttaccgaatacctgaccgcctttctcactagaataagcgtgtcactgtatgatatgtcacgcagtctgatatgcacgt

SEQ ID NO: 166019 - DNA, 952 bp, Arabidopsis thaliana landsberg
cggcgaaaggagagatttttatcgatgaatccgttatggagaatcggattccaagagattagagattggggtgattgcaatttcgaaggcgagaataacattgtgaatggttttagctctattcgtcagaaaccattgttaagcttcgagtcgacgataacaatggatttcagttgtgtcagcgagaaaatttgcgtcaagtttagaaacaacaatatttcacgaaaagtcctctgtttatgcgttaactattgaaaataaccccattactatcatttgagctaatttgaccttctttgcgtcatatgcaaaatcggaacaccaccacattggtttggagggtttgtgagctacaagcctataaactacacgtagcacctccctatgcacgtgtcacatgaatgattttaagggtttgggctgatgtttgagctataactacatatatacatttggtttgattcgtttttcttacattatagtttcatcaaaagccaaagcataattgatggatcaagtactctactcctcttacatcataaaaatccctgtaatatcacgaatatcaccatcacaagctcaacttacgaccaggctcaataacacgacttattttggcttgtcatcgtcgagaggcaattttgggaaggtgtttgcaaaagagtctcgtaaagtgaaactgattagtccggaaggtgaggagcaagagatagaaggaaacgaagattgttgcatacttgagtctgcggagaacgcgggacttgaactgccatactcgtgtaggtcagggacttgtgggacatgttgtggaaagttggtgtcagggaaagtggatcagtcactagggtcctttcttgaggaagagcagattcaaaaaggttacatcctcacgtgtatcgcacttccactagaagattgtgttgtttacactcacaaacaatccgatcttata

SEQ ID NO: 166020 - DNA, 1145 bp, Arabidopsis thaliana landsberg
taccgtcgggatctcggttgggaattgctcacctcagacagaatccgagcagaaagaagacgacttcaatctcgcaccaatcttgccatctcgtcacccccctactgtccaagaatcctttgtatggctgaaatgactgccctgtcttactgtgaagagaaaagacgtgaaagagaaagagccaaccaagagaaggccatgattatatccggaaaggtagtgatgtcgggaaccctggaagacagaaaactccgagctgtggagaaagccaagcagccgtagaccgatgacgggacgaggtcccggatcctaggcggaaaaaagactgaaactcttacttcggagatgaggactcccaacaagaatgcttccagcaaggacccttcgaagcgagatggtgacagaaaaagaaatcagccggaagatgacactcgttcttctgtgcgcacttctcgagctcgaaccgaagagaaatctgctggcgcaagcaaacagaagggtaagaggaaaaaaggttcacatgaccttgtggtcctttcttctcgagagtcgaagacccgcaattcggaatgtcgaaacacaactcctcctccaggtaatcgactctacctctaaatttgcttttactcgattgtgactttaagaaatggctttcacaccatccttctttatcccagctcctccgatgtcttttgctgatacgatcagaacttttgttgcccccggatccgccatcgctcccttcgaagagatgaaagaggtcaaccgggaaaactagcttttccaaggattctgaagaggatgaaatgtgcaaagtctgagctgcagagagtagagcgaacagagagctgttggaggagatcgagaagggggagattcctgacatatccaaagaattagaagtagttagagctgacgaggtcaagtttacgaagaaagctgcagaaccaaaacccccccgacctaatccgatcgagctcacccgtctcctagctgacactccccccgaagcggttgcaaatattgttgttccagatgaagccttggttatcgatgaacaaggctccaacaagaattttgtttcagaatcagggattgcagccatgtttctggtcgatgtggaaaaggtcctttgcaaccccccg

SEQ ID NO: 166021 - DNA, 1917 bp, Arabidopsis thaliana landsberg
aaagggtcatctcactgattactcaaacaatctctctggttaagtcaaagatgacggagacggagacggagacggagctgatgtcactcatctctgaaacaatcgtttgtttcaaggagatggatttggagtcccagccgatgccgctaaggatgctcatatcactcctttctggaacgccattcgtcaactcttcagattgggactgggatgagccggttccggattctatgctcatgccactaatcagggatacatggagtatcaagccgcagccggagctcatatcactcattcagaaaataatatccctcgtcgacaattctccggagctgaaactcaaatcattcattaatcaactaatctttctggacgataatttgtctcaaagacgggattggaattaccctctgaaggtcttgtcactcagtagatatataatcttctctggtcagctcaatggatttggatttgcagcagaaggcggagtcggagctcatgttacttattactcaaaccatatctttctacaactctatggatttggattcccagccggagccgctaaggaagctcatatcatttatcgctaaaaaagcagatctcgactactatgttgatcccttgttggagcaggatttggaggtcttgccactctttggtaaaacattaagtcttgagccagagccagagcttatatcactcatccgtaaaatagtctccctcgtcatctctatggatccaaagtggaagaaacttatttccttatgtcctcaagtagccgtaagattggaaaatggtatattacacgtggatgaagaattcgtgtgggaaaccaatgacaagtggtgttgtttccctttattctggctgaagttcaggtcaccagaacaagatgctacccattttttctgccgaggttgcaacggcaagaaccataacgaaaacaacaaggctccagttgagatcaaacaccctcttcatccaagacattctcttcggcttgctttgttgcgaaagtctaatgaaacgaggcagtgctattgttgtgatgtaagtcttcaagagatattttattattgctcagcttgcgactatgctatgaacatagcttgtgtggagaaacctccggtctattctatagaccattccaaatggcatgagcatactcttgctctgtttccaagacagactccctttgcttgcagcctatgttcgttgacacatacaagctgtcctttctatatatgtcccccttgtgactttgtggctcatcaaaggtgtatcagcttaccgcgtgtcataaggatatctcgccatcctcatcgtatctcttttaaccattcttttggtcaaggagattggtcttgttgtgtttgtcgtagaaagatcgacaatgattacggtggttattcttgcatcaaggaaggttgttcatatgtggctcattcaaaatgtgccacacaaaagaacgtgtgggacggtaaagaacttgagggaatactagaagaagatgaaaaagttgaaccgccgtttgtgaggataagtgatcgaatcatcgagcattttagtcatcaacatcatcatttgagacttgatgagaacacgggtagagattacgacgtgaataagttgtgtcaagcatgcatcatgccaatctattccggtaacttctattcatgtatgcaatgtgattatattctccacgaaaaatgtgcaaatctctctcgcaaaatgcatcatccgatacatccacatatgctcactctcaaagtaggatctcggtgtcttgtggaacagagtgttgatccatgttcagcttgtccttccaagtgcaaagccggtttcttctatgagtgtgaaaaacagagataaagatgaatatcttttcaagctacatgtgcagtgcgcgacaat

SEQ ID NO: 166022 - DNA, 2210 bp, Arabidopsis thaliana landsberg
tcgctgttttccttactaatcattgcttagctggtactcaaactcgtttttcatggctgatgcagctaagttgttcgatacaattcctcaaccagatgttgtttcttgtaacattatgatctctggttataaacaacatcggttgtttgaagaatcgttgagatttttttctaagatgcatttcttgggttttgaggctaatgagataagttatgggtctgtgatttcggcttgtagtgctttacaagctcctctgtttagtgagctggtgtgttgtcatactataaagatgggttatttcttctatgaagttgttgaatcggctttgatagacgtattctctaagaatctaagatttgaggatgcttataaagtgttccgtgactctttatctgctaatgtgtattgttggaacactatcatagcaggggcacttagaaaccaaaattatggtgctgtttttgatcttttccatgaaatgtgtgttgggtttcagaaacctgatagttatacatattccagtgttttggctgcttgtgcttcccttgagaagcttaggtttggaaaagtggttcaagctcgggtgatcaaatgcggagcagaagatgtatttgtttgtactgcaattgttgacttatacgccaaatgtgggcatatggctgaagctatggaagtattctcccgtatccctaaccctagtgttgtatcttggacagtaatgctgtctggttacacaaagagtaatgatgctttctctgctcttgaaattttcaaggaaatgagacactcaggtgttgagatcaacaactgtaccgtaactagtgtaatctctgcttgtggtagaccttctatggtctgtgaagcaagccaggtccatgcttgggtctttaagagtggtttctatcttgattcctcagtggctgccgctttgattagtatgtactcaaagagtggagatattgatctttctgaacaggtttttgaggatctggacgatattcagagacaaaatatagttaatgtgatgatcacttcgttttcgcaaagtaagaagcctggtaaagcaataagactgtttactagaatgcttcaggagggtttgagaaccgatgagtttagtgtatgcagtttgttaagtgtattggattgtttgaatttaggtaagcaggttcacggttacacccttaaaagtgggttggttcttgatctcactgttggaagttctctttttacattgtactctaaatgtggtagtttggaagaatcatataaattattccaggggataccttttaaagacaatgcttgctgggcttccatgatttctggtttcaatgagtacggttatctaagagaagctattggactattcagcgagatgctggatgatgggactagccctgatgagagtactctagctgctgttctaactgtgtgttcttctcatccttctctgccaagaggtaaagaaatacatgggtatacgctaagagcgggaattgacaagggaatggatcttggttctgcactagtaaacatgtattcaaagtgtggctcactaaagttggctagacaggtctacgataggctccctgaactggatccagtgtcatgttcatctttaatttcgggatattcacaacacgggttaatccaggatggcttccttctatttcgtgatatggtcatgtctggttttactatggactcctttgcaatttcatccattcttaaagccgctgctctctctgacgaatcatcgctgggagctcaagttcacgcctacatcacaaaaattggattgtgcacagagccttctgtaggaagctcactactgacaatgtattcgaaatttggaagcattgacgactgctgtaaagcattcagccagatcaatggcccagatttaatagcgtggacagcgctgattgcaagttatgctcaacatggaaaggccaatgaagcgttacaagtgtacaatcttatgaaggaaaaaggattcaagcctgataaagtgacttttgtgggagtcttgtctgcttgtagtcatggtggtttggtcgaagaaagctatttccatctcaactcgatggtaaaagactatggtatcgaaccagagaaccgacattatgtctgcatggtcgatgctttagggaggacaggaagacttagagaagctgagagttttatcaacaatatgcatattaaac

SEQ ID NO: 166023 - DNA, 414 bp, Arabidopsis thaliana landsberg
ttctatttcgcctctttcctcatctgtcgtactctcaatcttctgtttttcttttcttggtctattcagcctctctttttttttttccttctttctatgatgtttatctctcacttcgttttctttgtcttgttattcaattcagcgttttcttttcttttcatccctctttgtttattcttcagtagttggtttcttcactttccattctcatcacacttgttgtattttgttcttctaattgtctcattttattctttttgctctatcatcaccttatcacattcattgtcctcatttttgttccgttttcttctccttcagttctgtatttagtttccaataaattcttttctcttcgcttctctcttcctttcagtttccttctcacaggtttttaggtttccacctttt

SEQ ID NO: 166024 - DNA, 2108 bp, Arabidopsis thaliana landsberg
aaccttctacttctcactgtcatcaacactccatcaaaatcatcacaatgatttttccgaccaacaacaaaacactccatcgaaatcagatcgtttcttcgcctccaacaacgcacacaacattttcttcaccaacctccttcgatgaatccgataaatctaattaaaagattgttgatgcaaggaaatctaaaccctatggagataatgattagggaacccacggattctaattttagataggctttaaatcaattcattctaaatcaaatttaattgttattgttgacgaagcttcacatgaggttagtaacattagatcttgaaagaggattttcaaaggctggtcgattaggccttcaatctgcaattttttctaatcttaaattggagtttggaaatcggatacatggaacttttatggctggattttgggggaagaaaaactgatagattcaaagagacaaagagatgaatgtttaaggtgttcattgaataataggtattacgagtgttcttctttattggtttctgtgtgtttcgaattatgaggtttggatttccatttgtttgtgtgggtgatacatggatttatctgatatggttaactggtttgaaggattgtattgtagcttttctaaaaaagaggattaaacagtctttacaactgaatagaagtacctaaatctataaagcatatgagatatgtctgttcacaaaggcatagacttaattgtgccaatcccataattgatccaaagatctttttccattacaaatcaagatgactcaaaattattgattccatatactatttataagtgataattatttacattagatgttgatattatgcgcagcgatcattccgtactctctagctccaagagaggtatttaccaatctaccatacattctaactatctgtgtgaagagcttaacaaatgtatagtttattctgtatcgtccaaatatttattcagtaaaatatatgtgaattgaaacattttaattatgatgaatgtggggtttatataaccggtgaatcaataggagaagttataacagttttgactatgcaccaaaggaaggctgaaatgggtctccaagcggatgccttcatcgcacttcctggtttgtttgtttttattattctttttcaatctatgtcttttgtaaagaataaaaaagatgtctatatattgatcatgaaggttaataaaattaatttgtttggtgtttttgaacaaacaaaataagtggatatgggacattttaagacgtgttggaagacctcacccggtctcactttgggatttacacttaaccgttattaatttaattcttggggaaccccaaaaaaaaaaaactatcgtttagatatgacttatgagtacacatacgttgagactcgagtcagtaaaaatacgattatctcggcaaaccactaaaaaaaataaaaaatagagatgttgtcatatactatgtattttatggagaaatagagattttcctgatgaacttacacaaataagaagaagcaaatttctttgttggctatatatgtgggcatgtggcatgggttgaagtctatattcacatggaataatgtcttaactcttacctcttgacaacaacaacaaaaaaatgtcttaactcttacctaagattttgtcccaaaaaaaaacactcctacctaagatcaaaaaaagaaagagaatcatagttaaggttgtgaaaactactctaaaatcatatcgtacactaattaatgcatataaaaaagattagattaaaacatgtaatatacacacacgaagactttgtatacataatacatggtaaaaaaaaatgcgaaacctgagaatattaattaagtatataacataatgcgaagttaaaaaatgcaggtgggactattgaacgtggatggattctacgattcactattgacgtttatagataaggcagtggacgaaggcttcgtctcctccaccgctcgccgtatcattgtctcggctccaaacgctcctcaattacttcaacttcttgaggtttttttatttgcctttcattactttttgattattctatttaatactatagac

SEQ ID NO: 166025 - DNA, 1436 bp, Arabidopsis thaliana landsberg
accatgccttacaccctcttaagcccttaactgctagatttccggattattctgatggaaaatgtcgtctttgtggaactaagattgatgataggttgttttatcattgttcttcttgtaacttcaccttggggttgtgttgtattttaaaaccaccacaaccgtctctactgaacttgaaagctcatgatcaccaactcactcttctcccaagactcgattcttttacatgtaatgcttgcgggctgaagggagatcgaagcccttacgtatgttttcaatgtggtttcatgatccatcaagattgtcttggccttccacgcctcataaacatcaatcggcatgatcatcgtatttctagaacttctgttcttggtattgtgaactctgtctgtggagtatgtcgtcaaaaggtggactggacttgtgggggtttttcttgtcaacggtgccccgactatatcgctcattcaaaatgtgctactagagaagatgtgtggaatgggaaggaacttgaaggagtacctgaagaaatagaagatatagagccatatgtggtaatagatgacaacacaatacaacatttcagccacaaagagcattacatgaggctcaatgttaatggccttatgtgtgaggtgaacaagcggtgcaatgcatgcaaccatcccatctctcctcaatccttctatggctgtatggattgcgatttcatcctccaccaaaattgcgctggatttcctagaaggaaatggcatgtgctacacaatgaacggcttgctttagtcactagcgaggttaatattttcgggtgtagtgcttgtcacaaaattttcaatggttttagatacgagcatgaggatacaaaattagatgtcctttgtggttcattttctgagccatttatccatccaagtcatcctcatcatccgttatattgcatttcacctgaggatgatgaagtatgcagtggctgtaacgagaggagctatcatgtgcttagatgcattgaagacaattgtgggtttatcttggattttggttgcgccacttttccacaagtggtaaagcatagaattgaagaccaacctctttctctatgctatggtgaaaaggcaagtggaaaatattggtgtgacatttgtgaaaaggaaaccaatccaaacacatggttctacacatgtaaagatcatcgggcaagtttgcatacatggtgtgtgcttggagactttatggggctcataccaaaaagcacaatagagctatggaacatatcatatgaagtggtgctcaataatagtatttctcgcccaatttgcaggcactgtaagtcgcattgcattccccctattatcttaaagaagattggaacctcagatccatacttttgttctctggactgcatagagagtttcaaaaggctttgtttagcaaag

SEQ ID NO: 166026 - DNA, 1760 bp, Arabidopsis thaliana landsberg
atggcgggaaactacaattatggcggtactggcggtttctatcgagattggatgtacaagagatttgatgaagtgacggggaatttgtcagccgaatacgttgcaggagttgagcaattcatgatattcgctaatagtcagccaatagtacagagtagtcgaggtaaatttcattgtccttgtagtgtatgcaagaatgaaaaacacatcatctcgggtagaagagttagtagtcatttgtttagtcatggatttatgcctgattattatgtttggtataagcatggagaagaaatgaatatggatataggaacgagttacacgaataggacgtattttagtgagaatcatgaagaagtgggtaatattgtagaagatccatatgtggatatggtgaacgatgcatttaattttaacgtggggtatgatgataactatcgtcatgatgatagttatcagaatgtggaagaaccggtccgtaaccattcaaataagttctacgacttgttagaaggtgcaaataatcctttgtacgatggttgtcgtgaagggcagtcgcaattatccttagcatctcgactcatgcacaacaaggcggagtataatatgagtgaaaagttggtggactccgtttgcgaaatgtttacagattttttaccagaaggaaaccaggcaaccacttcacattaccagaccgagaagttaatgcgcaatttaggacttccatatcatacaattgatgtttgtcagaacaattgtatgctattttggaaagaagacgaaaaagaagatcaatgtcgattttgtggcgcgaaaagatggaagcctaaagatgaccgtcgacgaaccaaagtaccatatagtcgtatgtggtatctacctattggagaccggttaaaaagaatgtatcagagccacaagacagctgcagcaatgcgatggcatgctgagcatcaatcaaaggagggagaaatgaatcatccttcagatgcggcagagtggagatattttaaaaagttacatccccggtttgcggaagaacctcgtaacgtttatctcgggttgtgtactgatgggttcaatccgtttggcatgtctcgtaatcattcgttgtggcctgtgatcctgactccatataatttaccccctagtatgtgcatgaatacaaagtacttatttcttacaattttgaatgttgagccaaatcatcctcgagctagtcttgatgtcttcctccaacctcttattgaggagctaaaagagttgtggtctactggagttgatgcgtacgatgtatcattgagtcagaattttaatctaaaagcagtgctactgtggacgattagggactttccggcgtatagcatgttatcaggatggactactcatggtaagttgtcttgtccagtttccatggaaagtacaaagtctatttatctacccaatggacggaagacatgctggtttgattgtcaccgtagatttcttcctcatggtcatccatcccgtaggaatagaaaagactttttgaaaggaagagatgcttctagcgagtatccaccggagtctttaacagaggagcaagtttattacgagcggttggctagtgtaaatccaccaagaacgaaagatgttggtgggaacggtcatgaaaagaagatgcgaggctatgggaaggaacataattgacacaaggaaagcatcttgtgggagttgtcttacaggaaggacctcaatcttcgacataatattgatgtgat

SEQ ID NO: 166027 - DNA, 513 bp, Arabidopsis thaliana landsberg
cgctcactagtgaagtttggcaccgattcgtcccccgcgcgctgtgaccgtgtacccgcatgccaccgtcttcaccgagccatcccatcgccaccactgtgccgccattatcgtcgtcgttgtgtgcctcatcggtgcccaccagcctccgctcctccccttccccaagcgcctataaaagggccgccctgagcccatcatctcctcgcaccggcctcggccactctcctccccctcccctgagcttaatcgagctagcacaccaccaccttcctccgctccggtgagttctccctcccctctctagtagcctaaggtccaattgagttagctcacaaacttcaccacctctccacggacacgaagcaccactttcgccttccacatcacacccagtggccacaccgcgcgaccacaccatcgcggagcctgccacctcctcatggccagtccctcccagagcgccaccagccaaattggcctcgccgccatgttcgcctggctctagccatg

SEQ ID NO: 166028 - DNA, 427 bp, Arabidopsis thaliana landsberg
  unsure (1)..(427): unsure at all n locations
cttaagcaagtcaaaatgaaagaactcttatgaaagccactattgaaatcactggtaaagttattccccaatcaaagagcgatcgccccaatggactcagcattctcgaatcgcacggaagcacgctgatgaagatcaaaaaaatcgtggtgcccgtggacttttcggaatgttcgaaaagagccctgctttacgccgtccaaatggcnaggnaattttgtgccacggtgnacgtattatatgtggtnccnccctacgccggttacgatccntacgtggtgggagaattccaccagattgagaaagagttgcgaaataatggcgaacaaaaactagctactcttgtttcgcagcaggttcctcaaggattgccagtagagacaaatgttcgagctggccggcccgccacggaaattgtggacgcagc

SEQ ID NO: 166029 - DNA, 890 bp, Arabidopsis thaliana landsberg
  unsure (1)..(890): unsure at all n locations
attcaaaacaggattagcgccatctcactaggatctgattatgaatgacttaccctttcatcttcttgacaacattctcttcagattggaccccaaatctctggggataatgcgatgcactaatagatctatcaattcgcatatatccaacgatccgaattttgtaagtggatactcttccgaatattcttctcgggttggctccagtctttttcacgttgggatcagcttgggcgacaatttcatcatctgccaccatttttcttattcatgcgattctacttcagtgaaagaaagatcagtgttggaatttctgtcttgttacattttaggctcatgctccggccttctcttactattcatcgatggcctcttcctcgcaaatcccctcacaaagaggtttcgacctttgaatcactctggctcaaagcttctgtctcccatatttggtcgtaatagtcaattcacctcacgtgatgacggtatagaagattacaaagctcgtaaggagagaaggatgcgtgttggtttcgtggtaagtcccaccaaaggtttcaagatcgtatgcatactcgagatggaaacggtgtacggattcgagatcagtgacggagattcatggaggttatcggaaacaactatcaccactagctcaaaaagcctactcacgacatggatgaaacctgtttacttggactgcactcttcactggctgagaaacgacgggagtatcatagctttcgatcctgagacagagcaagcacgcttcgttccttccgtattccatcgtggaggaccgggtacgaagctgatttttacggaagattgtatgaagagtcgcctgaccttaatatcggngacacaggaaacaatttcagtttacacactag

SEQ ID NO: 166030 - DNA, 1005 bp, Arabidopsis thaliana landsberg
gtttaaggacgctcacgagttcgttctaaagtgtgattcatgccatagaaaaggcaacatcagtagaagaaatgaaatgcctcagaatccaatcttggaagtcgagatctttgatgtatgggggattgattttatgggtccattccgattttcatacggtaacaagtatatactggtcgccatagactacgtatcaaagtgggtcgaagctattgttagtcctaccaacgatgcaaaagttgtgctgaagttgttcaagaccataatcttcccgagatttggagttcccagggtagtaatcagtgatggtgggaagcatttcatcaacaaggtttttgagaacctcttgaagaagcatggagtaaagcacaaggtcgccactccctatcatccacagacaagcgggcaggttgagatctccaatagggagataaaaacaattctggaaaagactgttgggattacaaggaaagactggtctgcaaagctagatgatgcattatgggcttacaagacagccttcaagacccacattggtacaactctttcaatcttctctatggaaaatcatgtcacctacctgttgtgctcgagtacaaagcaatgtgggcggtaaaacttctgaactttgacataaaaactgctgaggagaagcgattgatccaactcactgacctcgatgagatccgtctagaagcttatgagagctctaaaatttacaaggagagaaccaagcttttccatgacaagaagatcatcactaaggatttccaggttggtgatcaggtcctgctgttcaactcttgcatgaaactctttccaggaaaactcaaatccagatggtctggccccttttgtatcactgaggtccgtccttatggagcagtcactctagctggtaagagtgaagacttcacggtaaatggtcaaagactcaagaaatacttagcagatcaaatcctttcagaggtgacatcggttcatctccaggaacttcttgatgat

SEQ ID NO: 166031 - DNA, 379 bp, Arabidopsis thaliana landsberg
ccggccttgccaggtcttccgcatctccagctcccccatgattgttcagcgccgctacactggtgttgacctggtcgctcgcgagctccacgaggagtctaccttcgtctccaaccctaagccctcggtggtggtccagaccatgctcggcccggtctacaagacataccgcatccttgacattcaggagggtaccattgtcgctctcactgagtctggcgacgtcaagagcggtatccccgtgattcctcagggcaacctttaccagcgcatcaaggacgccttcctcgagggccgtggctccgtccgcgctctggttattaacgacggtggccgtgagctcgttgttgactacaagatcatccactcttcccgtcta

SEQ ID NO: 166032 - DNA, 1775 bp, Arabidopsis thaliana landsberg
cccgagccgagaatgagttcttcgcaatcaccgtcgtcccctgtcgattctagcgattcaaaccagccagacgatcttcctccgatctttaaacggagatcagtttggtcttctgaatatactgtttcttcatcgaattcccccgagcagacgactcccttcccggctcgggaagacaccaacgccgacatcgctcaggaattggatttacctgaggatcccgagccgcctctcgttcggaggtcttctgctcctacggtcgatgaagctgggacatccaattggcaagatgcgtccgagcccctcatgccgacggttaagatcgaggattttctttacttcggcctgaatgagacagaggatatcttgcgtcttaacgagcagaaggctttcgagaaagctgagaagaagagtaaaaagaagaaaaaggcggtaatgtcaaatcctctcggttcatcaatgtgtaccgagcaatctctctcggatcttaaggctcgatttggtcttggtgctgtaactttgcgtgttccgagccctgaagagcgagccgacagtcctcctgcaggtttctatactctgtacgagggattcttctacagctgtttcttatggttgccgatcccgagattggtcttggaatatgtgacatcgtatcagatcgctctttcacagataacgatgcggtctttgagacatctgctcgggattttgattcggagttatgagtctgaaactgatattacgcttgctcatctgagaaatcttcttgagatccggcgggttcccaaatccgaagtggatcagtattacaaggacgagccgtatccgatcacttcttcttcgtggctctcggagatgctgttcacgacgaccttctcgggacggttctgacgagatggtgaacttcgggtagttgtagctaacaatttatttgtgtccgacgcggttttatagtttctttttcttacagtagtttttctttgttgcagaacgcaccctcaagttccttgagccgattcgagatgatttcctttcggcttttcacgcgttatcagctcagaagtgcgattggtcgaaacatttctctcgggatcaagtcgaacgagccctccgtcttcttcacggcgtttcctgtccttccaatttggaatcttcggaccatcgtactcaattcttcgtcgatatgcagtcaaccaaacttactttgagggaggtgtacgcgaagaagaaagtagataaagagagacgcttggcaaaggagaaacgccttacggatgcggggctgattttgccgcgggcggcctctcccgatgagactcaagaccggaatgttgctcccgatgttgcggccccggttgacccgacgcctgctgaagctcaagaggtcgatcctaccgctgctgcgcctttgcccgaggcgattgtcgcgctgcctgcgagcgacaaggcggtgggtaaacgtgtgcggacggatgattcatcgtgcaagaaaaagagcaagaagaagaaggcctctagtgccgaggcgggaaaagagctccctatctttgaagatcgggtagcctccgcgaacctcctcggtgggtgcgcctgtcctttgcttcctcctccggatactcttctggagtcgcagaagtatgctgaaacggcttcccacttcttgcgggtaagtgcgtattcaattttttcatttttcatgtctggatctacgatctgtaattttctttctttgttctctaggttgtcgcctcgatgaaccgaatggtgcattcgtc

SEQ ID NO: 166033 - DNA, 343 bp, Arabidopsis thaliana landsberg
  unsure (1)..(343): unsure at all n locations
tataaaaactgtgaaaggaaacacaatgatcaacgtagaggtcgatagctcctaaaccatcgacatcaatatcgacgaaaatccaaccggtagatataacgggccggactttcgtcatgaagtcatgcttatttttataaagactttgacaggaaggagaatcgtcttagaggtggagaactgcgacactattgaaaacatcaaggccaaaattcaagataaacaaggcatnnnnnnnnnnnnnnnnnnnnnnnnnnnnnnnnnnnnnnaactcgaagatggtctcactttagctgactacaacatccagaacgactcgatccttcacttgataaagcgtctc

SEQ ID NO: 166034 - DNA, 548 bp, Arabidopsis thaliana landsberg
  unsure (1)..(548): unsure at all n locations
gtcgtcagaagatgctcatgaaattgttgaagtcaatgggtttcagattcttgattcgcaggtaataaagcatcatattgattttaaacctcttatttcaattttagcgaagaaaagtgtttgcctttcttgttccacaggtaagccaagtgaatgcaatctttgaaaaacatccagacattgcatcggacttcaatttaaagaaccaacagctcaaaaatgcttacatgggtgttcttcttgacctaattatgacactgtgccgaccgcctaaggagctcacaatggacgatctaaacaaagcagaccgcacggttttggatctgacaaaagctggcttgaagttgcaatggttgcgtcagaaactggacgaagctttcttgaagaaggagaaaaaacgggacattggggcacggatcagagaacttgaggaannnnnnnnnnnnnnnnnnnnnnnnnnnnnnnatctagaatctgatctgaagaaacagaaagctgcggctttggcagctgaaactccgtttgatttcagcgatgttgtttgatat

SEQ ID NO: 166035 - DNA, 878 bp, Arabidopsis thaliana landsberg
tccgatacaaccccgattgatatcattctcgatatactctcgagattgtctacttattcaatcgctaagtttggtctcgcatccaagttctgtggatctatactaagaggtcaagatttcactgagttgttcctaattactaggcccttgagtcgtccacgtctcttattcgcggttcaaaattctgataagtggtgcttgtactcgtcgcctcagtctcagtttccagatgagaatcattctcttgtagtatcagccgattttcatatggagttacgtagagacatgggacaagagatttttggccttgtctctggtttgctctatttccctaatacgcgtacaggcgaagtgccggtgatatgtaaccctagcacgggacaatacgcaagattaactcaaaggagtagtatgaacaatttgagcagcttattagggtatgatccgattggcaaaaaatacaaggtaatcacaccaagcagttcacattttgatccagaaaatattctgacattaggaactggaaaagtagcatggaggagtatccgatgtctcgtagaccattatcctgaaagtgaagggatatgcatcaatggggtgttgtattacatggctagcaacaaattccagttcagtggtgtgaagatagcttcctttaatgtaaggtatgaaacacttaagtttcttaatgcggatgttgacgtaaccttttgtcctgcgcttgctaaactgattaattacaagggtaaattatgcgtgcttagttgtttatgggataatcaaatttatccaaagccgcttcggtggaaggtacttatgttgtggttgtgggttctagaagatgccgagaaagaagaatggttgaacgtgaatacact

SEQ ID NO: 166036 - DNA, 505 bp, Arabidopsis thaliana landsberg
agaggcattttgtgagtttgacccaaatcgggtggccaaaatgggagagaaagagatcgcagagattgcatcaaataaagcaataatgttacaagagagtagagtcaggtgtatagtcgacaatgccaaatgcataaccaaggcaagtttcaagcctttttccgatttttagaaatagcctatagtttattgtgtattgttccattatacatttattttctattatcaataaatggatcctatgaaaaaaaactatattttacaggtggtcaatgaatttggatcattcagcagcttcgtttgggggtttatggattacaaacctatcattaacaaattcaagtattcaagaaatgtaccattgagatctcctaaggctgagataattagcaaagatatgatcaaacgagggtttcgatttgtcggtccagtgatcgtacattcgttcatgcaggctgcagggttaacaattgatcacctcgtcgattgttttagacatggtgat

SEQ ID NO: 166037 - DNA, 1047 bp, Arabidopsis thaliana landsberg
cttaaaatgtactttggtccaagtgagtatacaaagccattcaagattacagcaaagtgttatcttcataaggcaataagattattggagagtcatcttaaagactctgagttgaagtgatttttggatcacccacagttcaaacacttcttccacatgcataaggacccaaatcataaggtgtgatgggtatgtggctgttatttcttcgtacatcatgtttagagaagaagagggaagtatcgtttattgttaatggcgttccgatccggtattctctcgaagaatttgcactcatgtcaggattctactgtcatagttataccaaacccttcaacagcttgggcagtaccacttttgtcggcaagagttttggacccagagcaacaattcaatatccagatgtggaggaaaagttaatgtctatgaaaaaaccttctgaggctcgtctgagagtagctgtgctctacttcttatgtagtgtaatcgttggaaagggtaagacaggagaaaatgcaccaagtgtggagaagtttttccttagggttgtggctgatctagagttgtgcaaaatattttcgtgggggagatatgcatttgatgaaaatgtgaaaaacattttctatttgatggaccaatgcaatggagtagttggtccacaaaaggtgtttcctagttttgttatgcctttggaggtatgtcatttcattattcatctcttaattgttttaagaaagttaaattgtgtacaactttgtttttattagcaattatacaacttagttttgaataatttgtattttgtttgttttgtagtaagtcgattccagttttcaggaaaaatttatgcgaagatattgaatgtgcagatctcagtgtccccggatttgtaaaatgaagtttaaatcaagcactatgaaagggtttccaatgccagatgtgtatgacaaactcggtaaaactcaggttagtgataacatgttaatgagttatctaacatgtatcatggatgttctattaattgaatgttttttatcagacattgcc

SEQ ID NO: 166038 - DNA, 3222 bp, Arabidopsis thaliana landsberg
gtacgactagatatggagtcagtctctatgtgttgcatggcttcaatagattgtcttccagatgagcttcttgtcggaatcgtgtccttcattctcactaacgaagctgcttcaacctctattctctccaagagatggaggactctctttgctttcagtcctaatctagactgtaacgattccatattttgtcaccctgaaaagaataaacgaaagagctttcggtatttcctgtacaaaacattggctaatttggaaggctatagccgtataaagaaattgtcattaaaatttgatgaaaaaagtgtatgtctaaacaaaagaatataagagaagggcatggcaaacttgttgttaaccactggatatgtaatgccctggaacacggtgtctctgagcttcatctatgcttcgaatatatggggtggtactgataagacccaaaatgggctattaagttaagtaacagaaaggagatgagatagtagaagaattagagatgggaagcagaatattcagagaaggaaaggaagaagaagagatgagatgaagaagataaacttttctttgttcataatcgataagtgtttcagaaacaaaagctaatgttaaatagaagaactaaagaaaacaagctttaaacaataagccataaacgacagcccattaggcccaaatcataatctatcaatactctctcgttgagattcaccatgtcctcatggtggaaggaattgaaaatgaaactctcgggcattgatcattgccttgttcgccttagtctcgtgttttgtcttagctctaggatcgattgtaccgccaaaacctgtttggctagagcctctctccttgccctccttatgtgtgaccccaaactgtttccacctactcatttcagctgaccttttcaacgcacgtgtattctctaatgatgagaccccattcgaaaccaacaacatctccaacatcatgcaacactcgtaaactctatcctggtgttttgaaaaactcccaaccatcagcctaaccttgtcttctcctgtctttaaccctaagactaggtgatcttcaatctcgcgtttctgtttttccacacagacatcaacttcaatggttgctttaacgttcttttgttccatcacttgaccaagaacacttctggtggacgggtgaattgcatcttaacaaggatcccaatttgttcaaactcattgaaccaagaaacttcctttggatattcagtacttaacttcatttcttgattttcacccctcttctcatcttcacagtctcggtcattagtgacttctacacaactaaccttactctccccttttaaagctaccttgtccgcaaggtagtaagcaacaattccacaatcgctttctaattcatttctcattcctccttgctccttttcacttctcatcttcacccttttagtaccttgctcaagatctttattcttagcacatagagtgacccaatcttggttatggatgaaggaaaaactctgattctgccaattaacctctgtctctccaagttttgaaagccattcataccctaagatcacatccacatcatctcgtttcaaatcccacacgcaataattttcaactatgtcgatgtcgttaatccgcaaagaaatctgttggcagctccttttaacgtcactagctagtctatagctaaaagacaccttatcattagatggcaccatatctggcatcgcgagttgagcctccttcctttcttcaataatgtgaattccccgccacatcctcttaaacgcaatggaaagagagaaaggacgaagtgtaaatatatatatttttgtcgacaacattatattatgtcatgttattttacatcaaatattgattccgaaattacatgttcgtaagtgcttaccatcgaattagataaagggttttgactttaaaacatcaactcacagtagtattttggtcggagctctacatgcaaaactaatagacaaactttactgatgaaaacagagaaattttctgttaaaatctgtcaattcgatcaagggatttttgtttcgtgctgtgaaaaatgggaaaagttttatgattttataagttagaacagcagactgctcacgaggtaatacctttattctcctctttctttaggtaggtcttagctcgacgtcaagaactcactaaaatcatgctgctcacttcttgtttcgctgtatacgtacactactcctccaccattacctcctcagctagtacattatctcaatctataacaactttatattacaatattcctcatatatacaagctttggttattcgtttgctcttgtttttatcaggtaagcatcatttgtagactacattttcagagagaaatgggtatattccctggctggatcaaccagaacctacaacagcctacagaggtcagttttatttccatcaaccagaggaccctaggaggacacatcaatatttaaagttatgtttctatttgttgttgtaggccgagtccaaaagatctaggaatgttaaaactaagtcagtgtctgagacttatccagagaacagagaagaattaaagaagcaaggaaaactttggagagctgcagagaagaagaaaccatggtatgatgctcctcctaaggtcaaggtaagacttaagaatttattctcttaaaaggaatttgtagaagaattaagaaaaaaaaaaatatgaaagatttcttatattttcatgtttgaaggtgacaacaaaaaagggtctttgccacatgcacatagagttgacagtaggattgcctccggaaggggtctatgatttgttcgctaatccgaacgactttccattcttcaggatcgacaacgagactgggcgccaacttttggtttttctctttacatttttatgattcaaatgtggtattaatgacagaaatatttgagagtgtgatatttttttctgatgaattaggaaaacaaatcaagaaaggttttgatgaaagatggaccgaggcagaacgcgcggttggagaaagctctgacctgggactttctttggtggtgtggaccttttccatttgctctagttgtttatgtcagccgaaagatctgtacagtatgcttccctatatctctcagaaaaatcaaaagcttttgttgtttcatattagggatactaattataagtttggtgtctcttgcttatg

SEQ ID NO: 166039 - DNA, 936 bp, Arabidopsis thaliana landsberg
  unsure (1)..(936): unsure at all n locations
tcaatttttgttgttgttgcagaagcacctacggaagacaaganagtaggttcagttccccgaggtaatcaacgttatagttagatcatgattgatacataaccaggaaaacaagatattttaactttttatttgatttttttacctgataataatagttaatatcagtgaagtttatccaatatctaactttcagccaaaaatttcacctgcggaagaaaaaatattaattaagtttatctaatttcagtaatttacatgataatattagttcatttttctctagattttttttttctgataattcatggtgtgtgtgtatgaagatgctgttttggttagactcgagcaagataagaggatatctctaatcaaagcttgggaagaggctgagaaatccanagtggagaacaagtgagtcctaaagaagtttatataatccattgttttgatgaatttccaaatttttagttccatgatatttttttttgtgttccaaatatatttgtatgtaatctcatttattaactttatgaaacagagctcagaagaagatttcttcagttggagcttgggaaatcagcaagaaagcttctgtggaagctgagctaaaaaagatcgaggtaaaagtgtaattctttattctttcaattttgttgttatatttttaacttttacatgaaatgctttccacttttcacattattctaatttatccgctggaaatatgaatgatgacaggagcaactaaataagaagaaagcacactacacagagcaaatgaagaacaagatagctcaaatccacaaggaagctgaggagaagagagcgatgaccgaagctaaacgcggagaagatgttctcaaagccgaagaaatggctgcaaagtaccgtgccaccggaactgctccaacgaagctatttggattcttctga

SEQ ID NO: 166040 - DNA, 1237 bp, Arabidopsis thaliana landsberg
atggcccctgagattaccgtaaacccgatctatttatcagaaaaggcgcatcaagcacctccaaggagagcttatgtgacgtttttggcaggaaatggagactacgtgaagggagtggtgggactagcaaagggtttgcgtaaggtcaaaagtgcgtatcctcttgttgttgctatgttacctgatgtgcctgaggaacatagagagatcttgaggtctcaaggctgtgtcgtgcgtgagatcgagcctgttcatcctccggatagccaagatgcatacgcaagggcttattacattattaactactcaaaactgcgaatttggaatgtaagtgtgtatatatatagacttcatgaaaacgagagcctccgtttattatctttaaataatgtttatataaacatattcaaaagtatgtttattttcaaatgaattttagttcatagtgttttagttataaattttatgtaaattttcatttctcgtcatagcttctacaatttacaaaaattattttataagaaaaaaaattatatatttttgaactgaaaatattttcatatttaaacgcaaacacaaatatttgcttttgaatttagattataaagttatactcccttagttatttcataaataatatatttttgaagcaaattcagatttttgaacaaatttcaagatctatgcatatgatctaaattctaatagaaacaaatatatggtgtattggtgatgggttcgctagaatttcttcaatggttctttaagtgaaatagaaagagtatgtgaaatcttttgtatatatctaatctgttttgtacttataaacttgtagtttgaagagtacaacaagatgatctacttggacgcagatattcaagtttttggcaatatcgacgacctctttgattttgaagatggctatttacatggcgtgttgagttgtttctgtgaaaaaatatggagttacactcctctctactcgatcggctattgtcaatattgtcctgagaaggtcgtgtggcccgccgagatggaatctgctcctccctctccatacttcaatgctggtatgtttgtgtttgagcctaatcctttgacgtatgagagtctccttcagaccctccaggtcacaccgcctacaccatttgcggagcaagtgagtgacatatatatacatcaattattcaattaatttttagggttttgatttatataatgttcagatgttctgaat

SEQ ID NO: 166041 - DNA, 582 bp, Arabidopsis thaliana landsberg
  unsure (1)..(582): unsure at all n locations
gccggcccggcgcatccggaagtgcaaaaatcgtgcggaccctcgnnnnnnnnnnnnnnnnnnnnnnnnnnnnnnnnnnnnnnnnnnnnnnnnnnnngggcaactggtcgttcggcgactacttcaaggaagcggcgatcccgttcgcctgggaactgctgacgcgccccgagcgggacggcggattcggcttcgacgagtccaggctgtgggcgaccgtgctgcacggcgacgacgagacgcatcggatctggcgcgacaaggtgggcgtgccggaaagccgcatccagcgtcgcggcctgtccgacaactactggcacatgggcgtccccggcccgggcggtccctgctcggagatctactacgaccgcggcccgggctacggccgcgacggcggcccggaggccgacgaggaccgcttcctcgaggtctggaacctggtcttcatgcaagaccagctgtccgcggtccgcaagaaggacgacttcgacgtagagggcccgctgcctcatcggaacgtcgacaccggcatgggcctggagcggatggcggcgctgctgcagggcgtcgncaaaatctcga

SEQ ID NO: 166042 - DNA, 569 bp, Arabidopsis thaliana landsberg
  unsure (1)..(569): unsure at all n locations
gttcgtgtctttggggacagcggcggcgatggactacaccaacgccatccacatcatcccggacgccgcgggccccgacgcctgggccaacgcggcgtcggccgggatcgccgacgccagcatctgggccaccgaggacgactaccgccagtggagcgccgaaccaggctacggcgaccggaacccctcgtcgcgggcggggagcgagcagccgccgccgggcaagaaggctcgcggcacgggcggcggcacgactacgtncgagcggtggcagcacgagcaagtcgctcgccattggcaagatgttcttcaagaccaagctctgctgcaagttccgggccgggacctgtccctacgtcaccaactgcaacttcgcgcatggcatggaggagctccggaannnnnnnnnnnnnnnnnnnnagatcgtgtgcgcccacgaggaggcacggagcagcgggaggagcaccagatcccatcatgacatctggaagtgttgtagctggagacggcggcggtggcagtggtggcggctccaggggggcaggcattcaagggccgtactcaagaag

SEQ ID NO: 166043 - DNA, 2497 bp, Arabidopsis thaliana landsberg
atgagtcgtagggtgaggcagagagtggaggataatggaaagtataaggttgattcaccaagttatactgtgattggagttgaggatttagcacctaaggttcaacagtatgtgaattggactagtttgccttatgacacagtgtttcatttgtttactcgattgaattatcgcgatagagctagcttagcctcgacctgtaggacatggagaagccttggtgcttcttcttttttgtggagttcattggatcttcgagcccacaaatttgatctttcaatggcagcttctcttgcaactaggtgtgctgatcttcagaagattaggtttcgtggtgttgactctgctgatgccataattcatctcaaagcaaggagtctgcttgaaattagcggcgactattgtaggaagattacagatgctacattgtctatgattgcggcacgccatgaagctcttgagagcctccaacttggaccagatttctgtgagaggatcactagtgatgctataagagttatagccttttgctgtccgaaactaaagaagctacgggtttctggcatgagagatgttagttctgaggcaattgaatctttggccaaaaattgcccacagctcagtgatcttggattcttagattgcctgaacatcaacgaagaagcattgggaaaagtggtatctcttcgctacctctctgttgctgggacatcaaacataaagtggaaagttgcattagaaaattgggagaagcttccaaaattaatcggtttggatgtctcaagaaccaccattgaccatattgctgtgtccaggttgttgaaatcatcgcagagcttgaaagtcttgtgtgctttaaactgcccttatctcgaagaggataaaagttacagctccaatagattcaaaggaaaggtcttgcttgctgtgtttactgatacttttgatgagctagcttctatatttgccgataactcaaagaaaccaaagaatatattttcttactggagagatttgataagaaaggataaaagcattgacgaaataatgctttggattgagtggatcatttctcatacacttctacgaattgcagagagcagcaattcacaaggattaaacgatttctggctgaatcagggagctacgttgcttctcagtttaatgcaaagcgcacaagaggatgtccaagagagagcagccacaggacttgcaactttcatcgttgttgatgatgagaatgctagcatagactgtggaagagccgaagctgttatgcgagatggagggatccgtcttcttctagaacttgctaaatcttggcgagaaggtcttcagtcagaagctgcaaaggctattgcaaacttgtcggtaaatgctaaagttgcaaaggctgttgctgaagaaggagggatcagtgttcttgctgatttggcaaagtctatgaatagacttgtggctgaagaagctgctggtgggctatggaatctctctgttggagaagagcataaggtacggtccccttgtaaagttttaaacacacattgaaccttttgctctttcactgacattgttgtttcttatttttattttttttctattagaacgcgattgctcaagctggaggagtgaatgcgttagttgatcttatctttagatggccacatggttgtgatggagttctggtacacgcttgccacctttaaagcctcacacttttcatttggaaatatccaaaattaacacttctggctaagtattatcatctgaaagattgattatcaaaactagtacaatctagtttatccttttgtattagggttttagatttaataattattatgaagttgtagagacaaggtatctcggtcgtaaaatacaagaattttgctagatttggtaattcgattttcgtggtatccaacactgtttttagtgttatttttctctatatttgttctttctaaaacggagaaatctacacttttttggtaattaggaacgtgctgctggggcattagcaaatttagcagcagacgataaatgcagcatggaagttgcaagagcaggaggtgtgcatgccttggtgatgctagctcggaattgcaagtatgaaggagcacaagaacaggtatttccttgttttcgaatgcacctcatttttatttttttattgattcgatgcttgtagtattttgagttccggatggcagtgagtgtgtgaactgagtttgtgacaaattgtcttatttcaggcggctcgtgctttggctaatctagctgctcatggtgatagcaacggtaataatgctgctgttggacaagaggctggtgcattggaagctcttgttcagcttacgcaatcacctcatgaaggtgttaaacaggaagctgctggggctcttttgggaatttagcatttgatgacaagaatcgagaatccattgctgcatttggtggtgttgaagccttggtattgagatttccttttattttt

SEQ ID NO: 166044 - DNA, 2304 bp, Arabidopsis thaliana landsberg
  unsure (1)..(2304): unsure at all n locations
tttatcagctcccttaacttttacaaatggctgctcataatctatgcttcaattcagcttttgtttgcaacgttcatcatcaaaagactcagcatttcccttgtaacgctgtctccaaaacgacctcgacccatgctgtcaccttccaccgccgttccgccaattatcgtccacctctatgggatcatcaatatctcctctcgcttgagaatatatatgtggtaaattgtaatattacatatcatactatacgtgcacaattcatccaaacatgcaaattatcaggacaatctaacgttttcaaagactcattacatgacctaaaattataccacttcttttttctcccaaaaattggcgttataagtctggtgccgaagctagaactttatttgtttttaacatgtatgctaaaaatcggacctgattagtatattatagtaactcttacaatgctctctcttgatatgtacnnnnnnnnnnnnnnnnnnnnnnnnnnnngctatattgtttaaagaagaggtgaggaagacattaaatgaaattgaaggttctattgagcagctagaaatgatcgattctctgcaaagactcggaatctcgtatcactataaacatgaaatccatgatattttgagaaaatttcatgaccagcacggcgaaattgagagggaaacacaagatcttcatgctacatcacttgaattttttctcctaaggcaacatggttttgatgtctcgcaaggttttttacatattacctcattttatttaaacaaccatttttaattaacatagtgacaccaaacccgtattgcagcccgcgacactaaatcagctgctttttttttttattagtaattatcgtttctataccaagtagtaacttaaaggagttgagtagttcatattctttcgtataaataataaaattattcgtatttcctattgcagatgcttttgacgttttcataagtgagaccggagaattcagaaaaactttacacagcgatattaaaggtttactctctatatacgaagcttcttatttttcaatggattcggagtttaaactcaaggagactagaatttatgcaaacaagcggttaagtgagtttgtcgcggaaagtagcaaaactatttgcagagaagatgaaacttatatattagagatggtgaaacgagcactagagacgccgtaccattggagcatacgaagattagaagcaagatggtacataaatgtgtacgaaaaaaagcatgaaatgaaccctcttttgctagagtttgcagcaattgatttcaacatgttacaagctaatcatcaagaagaacttaaacttatttctaggtaaatatgaactaaattctatacatgtgttatatctctcaaagtggattatatctgtttatatgatttaattaattatgtgattgtcaatttagttggtggaacagcacaggacttatgaaacaacttgatttcgtgagagaccgaatcacagagagttatttttggaccattggaatattttacgaaccagagtttaaatactgccgcaagatactcaccaaaatattcatgttaattgtgattatggatgatatctacgacatctatggtacattagaggagctcgagcttttcacaaatgtggtcgaaaagtaagtatatcgtataagtataagaaacttttaaataacaatatgtttgaaaactttttaagatgatttttggtataaaaagatcatattctgaattgtgtctcccatgataatttttatttttttcaacagtcataatatcagttaattataatccatataatatactcttttccagatgggatgtgaaccatgttgaaagacttcccaactacatgagaatgtgttttctttttctatacaatgagatcaaccaaataggatacgatgttctcagagacaaaggacttaacgttatcccttacctcaaacaagttgtaagtttttctacaaatcatttagtatatagaaaatgatgttacttagaaatttttaattttatttacgtagtgggcggatctatttaaaacgttcctaactgaatccaagtggtacaaaactggacacaaaccaagtttcgaagaatacatgcaaaacggtgtgatctcgagttctgtcccaacgatactgctccaccttttctccgtcctatccgaccacatctccgaccaaaccctaaccgatgtttccaaaaaccactctgtcgtccggagctgtgccaccattctccgtctcgctaatgatcttgccacctcaacg

SEQ ID NO: 166045 - DNA, 666 bp, Arabidopsis thaliana landsberg
gtttttctatgtaccaggaatggtattccgccatctccgcaagagaatctaatcatggggttgaacctactgagactgcttgttcagaacagaatagctgaattccacacagaactgggattactttcatttgcaaccttggagaatccttgcatcaagcatgcggtggagctcgagcaatccttcatggaaggtgcttataaccgtgtgttgagtgctagacaaaccgcacctgatgagacttacgtctatttcatggatctcttggcaaaaaccattaggtaaataggcttcatttgtcatttgaccctttctcttctttagctcattgccgtgacttaaaacatcattgtttatctgtagagatgaaatagctggatgcagtgagaaagcatacgatcatctctcaatcagtgaaggttgtaagatgttactcttctcgtctgatcaacaactgttaacatatgtgaacgaggagcacccggagtgggaagttaaagacgggttagttgtcttccaaaaaaccagagaaaccgcaccgtgcaaggagataccgtcacttcaactcatcaaccagactctcagttacaccagagagctcgagcgtatcttgtaaatcccatttaagtgttaccattgtttgacttacacgcctcagtcctcact

SEQ ID NO: 166046 - DNA, 1029 bp, Arabidopsis thaliana landsberg
tctttttaaagatgtctttcaaactacctctttctttacttctgcttcttaccgtgatcttatacaggtaaagagcctttggcttccagagttccaatttcaagaagacctcgacccattgtatcaacacctgtagtgccttttaaatctgctttacgttcttcagtcgcctccaagaatgaattaacatcttcttgctcttccattgagagctgtctcagtgtttcgtcaaccgcttctaacaagccttctatacattcagtaaagcagaagaaagatcagagtttaagaatagcttcccattctttggcaaatagaccaaaatccagcgctggatctagaaatatagaccagcttaaagttccacccctctcagccggtaggacatacaagttcaatgtatcacgtcttagttctagtgttgactggtcatcggaatcaccgcgagcttttactcctaataaaatggctaaaggtaacaagaaaagtgtccatggtgataacggtcctccaactgattatacaacacagactttgaaacctctgaacaattctaaagatgtatctgttgtccaagatgacccaaagccttctgcttccatgatgaaaccaacgggactccgtgtgccatcgccaaaagttggctactttgacggagtaagttcccaaattcatgaaatcctttacatatgaactaggaagtaatcagagtaacatttgacaaagaaatatatctaatccttatctatgtggaatctcattacgtatatgaatatttgttgttaacaggcgaggggcagcgttgcacgaacacccacgggatcctgtactggtccggtaagtggcttgtcaaaacatggagcttgtagtcccgatgaatttactccaagtagaactgcaaagtcccaacccacaatgtctaaagcagcggttcgtccagtttcaaggagttcaaggctgattgtctcggcttcaccaaagcttaccaacaaaaggtattcaaaagtcagtgcagaggaacaacttgga

SEQ ID NO: 166047 - DNA, 1411 bp, Arabidopsis thaliana landsberg
ctctactttaaagtttaacctcactatatactttattcatctatttttactcgcagttgggtattgtgaatcgcatctttgaaaaacacccggagactgcattagaatgctgtacgaagacccaagacgtgagagcatcatacataaatgtcatctttagcctaatcaagttgctctacaaaggggctcaggaacactccacacatgatctgtctgatgcagaaggtgctctggcatacatgaaaaatctagggtttaagttggattggttggagaagaaacttgatgaagtcaaagaaatcaagaagaaatgtgagcgagtgactgaaatggagaaagagctgcacgacttgatgaataagcacacaaacgtaagtaaactgctggaaaaggagaagttagagattaagaatgcgtcggctcctgatctatctttcagtgatgttatttgattactcgtgttcttagggacttgatgttttggttctgtttgtttgtttttgtgttctagtctctgttcgttaataagaaagagccctctgctctgcttcagcatgtgaagctaaatacttatttatcttgaagttgctgattttaaatccttgccttctggatggggaaggcacgtagaattgataacactagtaaaacaattttgtcagaaatcctcactagcgaaaggtgattctttccataacttttgttctcatttagtcgtgggacttgtgctgctccgtaatacgttgttttgactagagttctatctttctcagtaacacgacactggttaccagacttgtgaacgatgaactcaagattattgttgaggtcgatgttcttcaagttattggaaaactagatgtacctcttaaaaagataatgcagaatgatgatggttcggtgtctcgtgattagcttaaggaaattccaggagatttggtggatgtcaatgggtttcaagttcttccttcacaggtaagaaatgtacttgtaactatataatccacttccttgcacaagctgcatatatggtttagtgtgtatgttttcaggtctcgaaaaactcctatctgatatggtttaactacttattagtccatgtttcacttgcaggtagaatctgtgaacaatctcttcaaaaagcacccagacattgcatcagacttccgtctggagaacacacatctaagaactacatacttgaatagcctactatgctagactgagcttatgtgccagtcccctcataaactctccaatgtcgatctcgccaattctatattctacactatcttatgtgacaaaagcagggtttaagctggattggctagagaagaaactgaaagagattggtgagactcgggtgcaagatattgaggaagagttgaaagacatgaagcaaaagtgcgca

SEQ ID NO: 166048 - DNA, 1555 bp, Arabidopsis thaliana landsberg
agggttcaggagccactaagtactgatgggtttagtgttattgtcaagcaccgacgatctgttgtgtcggtagctttatcggatgacgattctagaggattttcagcttcaaaagatggtactattatgcattgggatgtatcttctggtaaaactgacaaatacatatggccaagtgatgaaattctcaagtcgcatgggatgaaattgagggagcctcgtaacaaaaatcacagtagagaatctcttgctttagctgttagctctgatggtcgttatttggccactggaggagttgaccgtcatgttcatatttgggatgttcgtacccgagagcatgtccaggtaatgataataaatttggtttttgtttagtgttttttttatttgttcttcatcaagtcttgcgctcaggtattacaattatgtgtctacaggcctttccaggtcaccggaacacagtttcttgtctatgtttcagatacggaacttcagaactctattctggttcatttgatagaactgtgaaggtgtggaacgtagaagataaagcatttataactgaaaatcatggacaccagggtgaaattctagccattgatgcactgaggaaggagcgtgcacttacggttggaagagatagaaccatgctgtatcataaggtaatagttctatcctccatgtcaacactgttggaagatatcatcataaggtttctattattattctgtatttgtaagtcttgttatatgattataggtgcctgagagctcccgtatgatctatcgagctcctgcatcgtctcttgagagctgctgtttcatcagtgataatgagtacctgtctggttcggataatggaactgttgctctttggggcatgttaaaaaagaaaccggtgttcgttttcaagaatgcacatcaagatatacctgatgggattaccaccaatggaatcttaggtgaaacctaatttagatcctccccatttcatctctgttgcagttggatcttgacattgcagtatatagttataaaacacttttgtttcgttgcagctactgatgctctgaaatatctaattcttatttatttgcttaacagaaaacggtgatcatgaaccagtcaacaataactgttcagcaaattcttgggtcaatgcagttgctactagtagaggcagtgatcttgctgcatctggagctggtaatggttttgtgcgtttgtgggctgttgaaactaatgcaattcgacctttgtacgagcttccactggtaaaaaggccttcactatttatattccttagagacgtctgaagaatctgatgtgtgagagtgggattagatgtatttcacttcaccaagtgataatgcttgtattgccgggagcgttcttacagactggatttgtccactgtgctgtttatgcaacatcagctaaatttctgattgccgacttcggacaggtatgtgagcatctgttatagcgctcttgcctgtcctttatatctatatatgacctctactctgagtgatggcgaacctcaaaactgatcg

SEQ ID NO: 166049 - DNA, 1814 bp, Arabidopsis thaliana landsberg
atcttcagtgaaagggagagagattcttgtgagtgaaagccatgaagaactagcgatgatcgtcgataatctctttaagcgtgaagactccgaagaatataaaacatcgcgagctctgtacaagtactgcgtctcttataacccaggttgcttagccgtaaagcttcttaaactctatcaatattcttctaatgccgttctcagattacgatcaatctatcaactctccgaaactctcacagatttgagaaatcgcaacttcaaactatctctcgactctctctatgaaattaaaggggttttgatttcatgcttgacaatggaagaacccaaagaatctgaaatcaagatccttagaaaaatcgtgtcttgtgtagcttacaatgttgtgatttcgataaaggcaaatgggacgagcttggtgattgtatcttaacgctagtgaatagcaaagaacctgtcaaggcttttcatgtctttatcgatttgccatcattgtatcagagttttatcgacaagtttatgaaggtaattgttgagaaagctgagaaggttttgtttaatcctgagaaagatagagttgacgattggagcttggctttagaaactgttgtgaaaatggggattcagactttggatacagagattagagttgatttgataaggattcttctgaacattcttgtgaactcagtgaagatgctagtgcaaaagggaatggaacagtttttggtacaagggcttaaacatctcgagaagttcgtgttgcgagataagaatctatataattacactaaggtacaacgtcattttgtgatgactttcatgttcaagatcaaagatttcgtaatagagagcaaggagattgtaaggaagatcactcggttggttaaaacacaggacaaagctgtgagcaaacctgtcgtgaaacctcaggaaacgaaagatgatggagcagaatatgttcgtggcttgtgtgaccatttgaagactttgtcatcagttgatatcttgaaaatctttgtgtcaaatgttgttgaagataggtccagagagatagcaatcagacggcttgaagttgtactctctgatcacacttcaaagaaagtggaaataaaattgtcagagatgagagaactccaggcattgctcatctcttgccttaagcaagaaagaatctctgacagtatgttcaaagtccttggtaaggtggtgaatcacgttgtgtatgagatgtccaaacaccaagatgtcgcatgggatggtctacgcgattatattgcatcacaaagcaaaacaaagtttcagagagcggtttatatcttccagtgcttaacaacgccgcttattgatgacgattttgtgattcatgtgatggagaatcttttcttagagataaccgctaggctagacccacctagagataacagtagctgggtcttggcgtttatgggtggcttttgtttagcaattcacaattgatagagaagtcaagtaaagctgaatccgttgcacataagatgatagattctataagagagcttgtggaaagagaaatggaagttggtcttgtgaggagaggtttcagagatgtggaaacaactggaatgatacagtactagcctatacaaattcattgctttggagactgtatgcaatcaaaggcaatgtaattgttgagagaggagtgaaacaagttgagaaagagcttccagagaatgagtttgattggctctaacttaagtgctgaatagaaaaactagtgttttggtgtttattgggcctagaattatcaaaatatcacgaaatgggct

SEQ ID NO: 166050 - DNA, 689 bp, Arabidopsis thaliana landsberg
ggttaaagaccggtggtggtattattgttaaggaaggatttcttagatgggaaaatggaggagggacatgtcatagctcggctcaaatttattcctcggctttggttgagtttggtgcagtggttcatgaaaaagcggtcttaggtgcagaggttcatgtaggatctggtactgtgattggaccatcagttgacattggtccttccacaagaatcgggtaacatttcttgtacatgtttcgaatagaccattgttgtatttcagcatctgtcgaagattctattcgctgagtttcttttgttctatccagatataatgtttcaatcagcaactgtagtattggtgattcttgtgttatccacaatggagtctgcataggtcaagatggtatgaatcaaactcacatagattagccaagatcataggctggaggaggttttgatttgagaattgggttcttttgattgtttgcttatttttctttcaggctttggtttctacgttgatgaacatggaaacatggtgaagaagcctcaagtaataatcccctattgcatttcttgaatctgaatcaacaattagcggttacttgatttatccactgtttttctttgtcatctctagactttaaacgtaaagatagggaatcgtgtcgaaatcggagcaaatacttgcattgatcgaggcag

SEQ ID NO: 166051 - DNA, 1719 bp, Arabidopsis thaliana landsberg
caactgccattgccccctcccctacctcaagggacttctgctcgggccatcgcagctcgacgcaagacgctgtccaagtcgatcgtggaggcttgcgaaacaaagaaaacattcctccaatccgcagtcgacaagaaagaatacagcagaaccttgctggttgacgatggcagcgccgaaggggcaagatctgccggtgcctacagacccactcctcaccgcgaaggccacagcggccggttatctcacagagaacgatcaccgcgccgtgattcacctcggccttcctcccgaactggactaagcagcgaaccgcttgctgacctaattcggaaaaagagagacagatcaacccgcgacagctcctcccccaaaagagataagacgagagccaaactgaccgctatactcggcggtcgccgccaccccgatctattggtcctcctcctccagtcgccgtatctccttcatccggatcaggaggtgaaaaggccgaacggagtgctaaccctcggtgggatgaaattgaggtccgagatgctggaaactaaagctgttttggttcctcagaccaagtcgctcacgggttagaaatttctttctactttatatcatgacattttttaccatttcgacttattgacttagcgttccttgactggtcaaaccttctctaacagcgatggaaacgtagggaaacatctttcgatgtttcaaaacacgaaaagacaccatgcagccaggcttcgatagatggcgtcctgcaattcgcgagcgattcctactccatgctcaccactcatctcgggttagttccctttacccacaatagatattttaatctttgctccttcacttagacgttaaacccttctcgttattacctggttcaagcgaacagcgaactcaacgacatgattgagtactatgaaaggttgctgctagacagggaaaaggaggttatgacgtggaaagataagtcttcgtcccttggggcaatcgtttttatccaaaccaaaaatgttagaactgagctggaatcaaatacaaaggggtggccaactatcgggatgctgagttagcgaggtcgacatcaaaagccaggaaggaggtaaaaggtcgcgggatggaattgatccaaggggcaatcgtctttatccaaaccgaaaaggttagaactgaactggaatcaaacatcgaggagtacgagagcaatctcctccttttagatcaaacccatgaagatgacttctccgaggaacgagagagggacgagttgaagaccgtcctggaagagaagcgaaattgtttagctgcccttccttcctcgtcgttcaaccctcaacaattcgaggagttcttcaccgaatcgcctcctttgagcgaatctggattacaatgggccggtaaattctgactctttttttaaaaccaatccacagtgaattactcttatattaatccgagataattgccttaggtgttagcgatcccgtggaacccgaagtgcctatcgcgccggcatcaattctggaggtggtaatcactccacatgaagttcctccatccgtgaactcagagacagtggtcatcgacgacgatgatggttcagaatccgtggttcctagcgagcagcctgctactggcgagccggacgagactgagacaactgccgcagaccctgatgcccgaaaacctgtagtggctatgtccacttag

SEQ ID NO: 166052 - DNA, 892 bp, Arabidopsis thaliana landsberg
gaacccatggggcggcagtgagcctacgtctgacgtctcggtaagtcttgaacttaatacttttatgtcgttacttttacatttacacctcttttagcgtcaaagggctcaaggaactcgcagatttcttaatgtcacaaggtttctactctgcagccaacagttgcagatgataatacttcagcatggaccaatgcagcagctgagaacaaacctgcctcggctagtgatcaacctggtggttggaatccctggggtaaaacacctgcttctgaagctggcactgttagtggatggggagatacaagtgcttcaaatgttgaagcttcttcgtgggaaaaacaaggagcttctacttccaatgttgcagatttaggttcctggggtacgcatggtgcaagctctggtggtaataagcaagatgaggactcggtatggggtaaactatgtgaagcttctgaatcaagtcagaagaaagaagaatcgtcttggggtaagaaagggggatcagatggagaatctagttggggaaacaaagatggaaattccagcgcaagtaagaaagatggagtttcctggggacaacaggataaaggctctgacgagagcaagggaggatctgcatggagtaatcaatgtggagattttggttcagggaagaaaaaagatggttcttctggttggaacaagtcagcagaagattccaatgccaatagtaagggagttcctgactggggccaaccaaatgatggctcttcatggggtaaaaaggatgacggagcggcatcgtggggtaaaaaggatgacggaggctcgtcgggtaaaaaggatgacggaggctcgtagggtaaaaaggatgacggtaataaggatgatggaggatcatcgtggg

SEQ ID NO: 166053 - DNA, 1725 bp, Arabidopsis thaliana landsberg
  unsure (1)..(1725): unsure at all n locations
nnnnnnnncgccaccgctctcctcctcctcctcctcctagtggcagtccctgccgtctttgccgtgactttccaggtgggagataatgatggttggaccattggtgtcgagtacacgagttgggttagtgaaaagactttcagagtcggtgacactctaggtaaataaattgtttctttcattacttgcttcacttgttttccccataacaaactaataaccatttaggttaaaatttgttcatactgattacttgtttcacaagaaactccttttttaccttctaacaatcataaggatttgttggtttcttttgtattgaccaatcagagttcaaatatggtccttcgcactcggtggccgtggtgaataaagccgactatgatggctgcgaaactagcagaccgacgcagagtttttctgacggagacactaagatcgatcttacaaaagtaggtgctatacacttcctttgccttactcctggtcactgcagccttggcatgaaactcgccgtacaagtacttgctgccgtttcattagagcctccaccgtctccatcagctccatcgccgtctccatcagctccatcaccgtctccatcagctccatcgccgtctccatcgccgggaaacgcagaaaacttgaaaaatgcggcgtctaagggaatcatgagctatggaaagattgtggtgacgatggtgttgatgtacggtgtgcttaattagatattcccgcaacaattgcctcgatctatttttggtcttggtctttcgaactagtccatcatgaagtgctcttcttgtgtgtaataaattattttcttcatcaatacttttttgcttattgttatctttactcgatctcttttgttctattactcatggtcgtagcacagcgttatcgttatcatgttctacatgcttattgagtacagtacaaattaatcttagattccggttccttcctcttggaacaatatttaccgttcgaattttgggacataaggaaatacaagttgtcttatatctaagccaaattagagcgtcaaaggacggcttagagagattagaaaaccaaatcgtataaagaaagagacgttgtattaaattaacccgtttgtaaattgtaagatatatatatatatagtcatctcaacttgtattttttgaataacaagtttatttccaacagcaacattacatttgactagtgtgaaatacacatcttggcggacccggttattatatggactggtaaaaattgaactatgtggcaatagaccagtccattgtttgaccgtcatagctagtacggtttatgatattgatggtataaaactgacatggttaaggagaagacaccattatcagcttcagctttgtgaaggagaaccgatcattcacaaaaaaggttgtcaatattggaccgagagagaaaagcaaaatcatattgattagtatagacaaatttggtggagaagcgtacttcaaaatttttgtgtagtatagacaaatctcatcacgagtcttttatttgtaaatttgaaatgtgctacacaagatcgcgccattaaatgttgagagagtccttttttgggtcttctgagtagtggaaatgtaaccaaatgatttattagcccaaaacaccaactaaccaacaacgttttacaagcaccacaagttagaaaatctgaccccataagaaacaaaatctgaccctggt

SEQ ID NO: 166054 - DNA, 3073 bp, Arabidopsis thaliana landsberg
aaaaaaaaacttgtcatatttagtcattgggctaaatgggctgcaacttattaacaacaaactggcccgactactaattatagaattggggatgttaaagattttgtcgtttgtaacattttctaggaaacatccatggagtttctgtgccaatagtcaacggtcacacggatccttttcttccttgttaaaatccttcttccatccatctaggatcttgctccatccttcaccattctaatggattcttcttttttccttgtcgtagtcgcagctgctataggcttcttcatactttttcgaaaattcagattccaagaaagtaattcttcttctttatctcttccatctcctgcaacttctgtgtctcgaaactggaaacacgatgtcttcccgagcttccacggagcagatgtccgaagaacctttcttagtcacatcctcgaatcgttcaaaagaaagggaattgacacattcattgataataatatagagaggagtaagtcgatcggtcctgagctcaaagaagctatcaaaggatcaaagatcgcaatcgttttgctctcaagaaaatatgcttcttcgtcatggtgtcttgatgagttggccgagatcatgaaatgcaggcaaatggtgggtcagattgtcatgaccattttctatgaagtggatccaactgacataaagaaacagaccggtgaatttggaaaagccttcacaaaaacatgtaaaggtaaactaaaagagcaagttgagagatggagaaaagctttggaggatgtggccacaatcgccggagaacattctcgcaactggtttgtcctcttgatttctactctccttaattaatatttccttgtcaaagtgtattctttcagatcttcgtgaccattttatcgcaacgattgtatattgatttgatatctatcctctaatgtcaggaggaatgaagcagacatgattgagaaaatagccacttatgtttcaaacatgttaaatagtttcacaccatcaagagatttcgacgggttagtagggatgagagctcatatggatatgctggaacaattgttgcgccatgatttggatgaagtaaggatgatcgggatttggggaccgcctgggattggtaagacaactatcgccagatttctgcttaaccaagtctccgacagattccaacttagtgcaatcatggtcaatatcaaaggatgctatccaagactttgtttggatgagcgcagtgcacaattgcaactacaaaaccaaatgttgtcccagatgatcaatcataaagatatcatgatttctcatttaggagtggctcaagaacggttgagagacaagaaagtgtttcttgttctcgatgaagtggatcaattaggacaactagatgccttggcgaaagaaactcgatggtttggtcctggaagtcggattattatcacaacagaagatctaggagttttgaaggctcatgggatcaatcatgtttacaaggtcgaatatccatcaaatgacgaggcttttcaaatcttctgtatgaatgcctttggacaaaagcacccaaatgatggtttcgatgagattgctagggaagttacctaccttgctggtgaactccctttgggattgaaggttctaggctccgctttgcgggggatgtccaagccagagtgggaaagaacactaccaaggttaagaactagcctcgacggaaaaatcgggaacattatacagttcagttatgatgctttatgtgacgaagataaatatctatttctttatatagcctgcctttttaacaaggaatcaacaaccaaagtggaagggcttcttgcaaacaagttcttggatgtgagacaaggtcttcacatattagctcagaaatctctcatatccattgatgagaattccttttatggagaaacaatacgtatgcatactttgctcagaacaattcggaagagaaacttcctgtaagcaattcgtttatcatggctataggaaacatcaacttttggttggtgaaagggatatatgtgaagtacttagtgacgatacaacagtaagttttgccattgcatctccccctgttaattgagtttatttgataacacgtcatcattactaatatttgttttggctcatgtttcaggataatagacgttttatagggataaatttggatttatataagagtgaggaagaattgaaaataaatgagaaaacacttgaaagaatcaatgattttcaattcgttaaaatcaacctgagacagaaactgcttcacttcaagattatacgtcaacctgagagagtgcagttagcactagaagatctgatttatcactctccacgaattagatcactgaaatggtttggttaccagaatatatgtttgccttctacttttaatccggagtttctcgtcgaactagatatgcgttacagcaagcttcagaagctatgggaaggaactaaagtaagtagttttgatgaaaactttcactttttataaaaaatctataatttgtttccgtaaatgtttattagcctattatatcaatatgatcttctttgttaaatgtagcaacttagaaatctcaagtggatggatttgagttattctatagatttgcaagagcttcccaatctttcaactgcaactaatctcgaagaattaaagcttagaaattgctcaagtttagtggagctcccctcctctattgaaaaactcaccagtctccagagattagatctccaaggttgctcaagtcttgtggagcttccctcttttgggaatgcaactaaacttaagaaactagatcttggaaattgttcgagtcttgtgaagctcccaccatctatcaatgccaataatcttcaggaattgtctctaataaattgttcacgtgttgtgaagctccccgctatcgagaatgcgactaagctccgtgaattgaagctccaaaattgctcaagtctaatagagctccctctttctattggaactgccaacaatctttggaaattggatatcagtggatgctcaagtctcgtgaaactccca

SEQ ID NO: 166055 - DNA, 511 bp, Arabidopsis thaliana landsberg
cacatggctgcttcttcctcttcatcttctcccgctggggcaccaacaacctcaacagaaaatcaagtgttcatcagtttccgtggagctgatatacgcgatggcttcctcgactatctcgtgcatgaaatgcaagatgcaggtatcaacgtcttcatagacgaccacgaggtgagaggtattgatctagataatctatttgtgaggatcgaagagtcagaggtggcgattgtgatcttctcggaaaagtacacgacttcgaagtggtgtttaaacgagctggtcaaaatcgatgaatgtgctgctaagaacactcttatggcgattcccgtattctacaaggtggaaccctccgaagtgaaggatatcgaggggaattttggcattcatttcagagctctaaagcgcaacaatccatacgatacagtaaacgtccagaaatgggagaaagctatagcgtctatttcagtaaaaactggcatgccgttgtcagaacacgggtttggctttt

SEQ ID NO: 166056 - DNA, 495 bp, Arabidopsis thaliana landsberg
  unsure (1)..(495): unsure at all n locations
gaaacccttccaccacaggggacactccacatttttcttcgtaggatgttgttccggttcggagtgcaaaagcgagtcggattgaagacgttggcttcaggggaggttgggtatacgtttcagcgaagtggtatattcgtcggtgcaaagggttaaagcatagcggccccttgcagcgccgcttttgtgggccgctcgcttcaagtgcaccctaaccgaggaaaccatggagatacgccgctttgaaagcaaggacgaactggcggtaaaggnnnnnnnnnnnnnnnnnnnnnnnnnnnnnnnnnnnnnnnnnnnnnnnnaggacattgcccggaagctccagattcaaactggatggtttctcgtcggagttgttgatgagcaagtcattgcgaccatcatggtaagctacgacggccaccgcggatcggttaattacttagcggtcggacccaaccatcgaagaaagggattgggcaacgcgttgatggccga

SEQ ID NO: 166057 - DNA, 687 bp, Arabidopsis thaliana landsberg
  unsure (1)..(687): unsure at all n locations
gcagacacatggcaaaggaaaaaggaaagaaagatntgcaagctcttcttcatcaacaattgtggaactttaagaacaattacgccgcaagatatctgagctcgacactgagaatgcaagacgggcgatggagcatcgacaatctcagatgcggatctcaggcttggagaagcttgttcaatacatgaaagataaagatccagaattatcagcttttctggcctcttctacaccacatgtgaccacacctgcagccaccaacaccataccaacaagcaccacacctgcagccacaccagcaagcaccacaccttcagccaccataccagcaggcaccgatttaaattcatcccctttgtcaaatgctttctgaaactcatgaactttttcatatattgttatgttataaacttattgtaggatgataatcttgtctatttaggatgataatcttttgtctatttaagatgataattttttgtctatttaggatgataatgctaagttattttgggtttgaatttttgtttttggagcttgattactaaaattttaaatcaggtaattaattaggtttatgattagccaaaacatgtaaccagattgtgaccaaaccagttacaactgtgtgaccagattcgaggttaaagagttacagatatgagtcgtacatgcgatgacaaaaga

SEQ ID NO: 166058 - DNA, 999 bp, Arabidopsis thaliana landsberg
atgccgccgaagaaggcttcagcaccaggggctggcacgctgcagccgctggaccccaatcaagacgtcctttctcttagagaggcacgaagccagaagaggaaagctaccagtccaacacctccggaggatgatttagatcaggagattcaaaatctggaaatccttcagcagcaggttcaacgcaagaaggagaagatggccaggctagctgaactgcagaggcagatagacgaagcctctgaagaagttcgtcatcttgctcaggatgagcaacaccgaagcctcagcatcaagaccttcatcaggagggctttcccaacgaagatgactggtatgacaatttccatcatgggaattttgtttttgatgatgcttctcccctgtccgctgagctgcaggctacaccttggcccccgtcctacaagccgcctcagctccccatatttgatggccactcagacccgaagcagtttttgatgagctacgaagcaacagtatcttcgtatggtggcaatgctgcagtcatggccaaatcttttgttatggctgtcaggagtgttgctcaaacctggtattcctcccttcgaccaggaacgatcacttcatggcaaaagctgaaggacttgttgttaaccagcttccaagggtttcagacgaagccggtcactgctcaagctctattccagtgcacccaggatcacgaagaataccttcaggcgtacgtccggaggttcttgcgtttgagggcacaggcaccaacagtgcccaatgaaattgtcattgaggccatgatcaaggggcttcggccaggaccttcagctcagtacttcgctaggaagcctcctcaaactttggagaagctgctccagaagatggacgaatatattcgggccgataatgattttcgtcaacagaagggaggaggctttcaggttttctgaacatgaccaggggcttcggaggaagattctatccgaggcacgttaggtcaatcca

SEQ ID NO: 166059 - DNA, 2049 bp, Arabidopsis thaliana landsberg
  unsure (1)..(2049): unsure at all n locations
ggtaataatgttacaatcatcaagcttaaacacactaacatcttcccggtcgttgaagtaaatagcattctccaaacatccatagtactcggaggctaagaccaaaaaacaattgtccgtcgccacaatgagtgccttgtctcccaaggaactgacctcaacccattctaccaaattcttgtccatcttataaaccttaaaacaaacggttctctcggtaagaactcgctttacgcaaaatttcttatagaatcgatgaacaacgcatagttctccacaatactccacgagtctcttttctttgcaattatcaatttcgtagaagtccactggagttgaaggtccgtattgatatatgctgagttcagataaactaatccaccaaattgctcctgttaagtctaatgcatagatttttcctttgagacgtataatattcaaaaaacctttagcttcttcattgttgattcttgtacaatgtctagattcttttccactcttgcaacaccaaatttcgtttttgaagccaactacaaaaaatacattgtctaggaaaacaactctatccgaatccgccaatactgagaatgcataattcaatccatccgctgatggcgaacagaacgtatatggatttcaggaagctacatcgagtttcatcagacgcttgagttgcagacatggatgcgagagcacacgtggcaagctaaggcggatgatgtggagagtcaaggatggaagctaacttggcgtggtgtcaaagacaagaatcaccgagaagatatggaagatatcgtcttgaaaaattaggaaggaataagcttggagaaaacaagaaagattccttaaaacgagattctcggagatcctaggtttagggttctggagagtaggtannnnnnnnnnnnnnnnnnnnnnnnnnnnnnnnnnnnnnnnnngaatactacgatacaatcttcagagcattacaaaagtttgaaggtgagtgtgtaattctctttgtcttcacgtgagagtgataagaaacagaggagagaattaggcttagatattcttagtcgggtttgatcttttgggtagaatagatcaagtaatctccgagataacatttgtaaataacttgttatcaataagaatatagttataagcaattctctgtgttgtgttgatctctataccctcttaattggtatcagagcggacacctgataaaagaagttgtgaatctgttcaacaggtgagatcttgcgacaagggaaggagaaagcacaacggttcattgcgatacctaagccactgaagctggatgctgagcattacgggtattggaaggtgttgatcaagcaatcgattcaaagtatcgacatggatgcatggtttgcagtagaagatggttggacgcctcctaccacaaaggatgcaaagagagacattgtttcgaaatcaaggactgaatggactgcggatgagaagacagcagccaatcacaactctcaggcactgtctgtgatttttggatctttgttaaggaataagttcactcaggttcaaggatgcttatcagcaaaggaagcatgggacattctgcaagtctcatttgaatgcaccaacaatgtgaagcgtactcgtctggacatgcttgcgtcagagtttgagaatctgaccatggaagttaaagaatccgtggatgacttcaacggcaaactgagctccatcacacaagaggctgttgtcctaggaaaaacgtacaaggacaagaagatggtgaaaaaatttctcaggagtctacctgacaagtttcagtcacacaagtcagcgattgatgtatctttgaactcagatcaattaaagtttgatcaggttgttgggatgatgcaggcgtatgatactgataaggaagaaattctcaacagctacgcaacctattttggtaccattgaagatgatgaccacacggttgaggaagatgctcagatgggaacgattaggagtctgatactgattcagagtgattctgaaaaagaaggaaaatcaggagctcatttctga

SEQ ID NO: 166060 - DNA, 1774 bp, Arabidopsis thaliana landsberg
atatgtgcaacggaagtgatcgtcttggacaaagagaagctgaaggtatattctattgatggtctttaccattatttttagggttttaaattttgttctcaattttgtttctgcctttggcttacaagttactagagattctgtagaattcgagaatggttgaccaaatatcaagtcacttcatcttaatcttgtgtgctaattagaacatggaatttgtattatttgatgatatctcacaaaagttctctggtcttttgaaaaatcagagatttgcaccaacaatgtgagggtcttttcatataattcattaagatcagccactgatagtttccatccaacgaacagaatcggaggtggtggctatggcgttgtctttaaggtaataaaaatgataacttctcttacaatctgcttaaatcatgttgaggttcttctggtgaatgtagtaaagggttttgaatcttgcagggagttttgagagatggcacacaagtagctgtgaaatcactatcagcagaatctaaacaagggacacgcgagttcttgaccgagattaacttgatatcaaacattcatcatcctaaccttgttaaactcatcggttgctgcatcgaagggaacaatcggattcttgtctatgagtaccttgagaacaacagtcttgctagtgttttgcttggtaacttttgccacaattgcattcttgtctaccaaatcccatttgtgtcctgtttttctgatcttgtttgagtgatatcaggttcaaggagtagatatgtaccgcttgattggtccaaaagagctgcgatttgcgttgggacagcttcgggtttagctttccttcacgaggaagtcgaacctcatgttgttcaccgtgacatcaaggcgagtaatatcttactagactcaaacttttctcccaaaattggtgatttcgggttggctaagctttttccagacaatgtcactcatgtcagtacccgagtcgctggaacagtgtaagaatccctctataaacatatcagtttccatctttcctctacatgtattttcagctgatgaaactgcgactacaggggatacttggctccagaatatgcacttcttggtcaactgacaaaaaaagcagacgtttacagcttcgggatacttgtgcttgaggtcattagtggtaatagtagcaccagagccgcctttggagacgagtacatggttcttgttgaatgggtaaagctaaaagcctcgtacctcaacaaaaatatatatagctctatgtttgtgttaatgtttcttacaagtgaaaaaataatacattttcaaaatgtaaaatgcgaaaacaaacaatattcaatgctttaaactctgtcttgggcaggtgtggaagctgagagaagaaaggaggctactagagtgtgtagatccagaactaaccaagttccccgcagatgaagtgacccgtttcatcaaggtggctcttttctgcactcaagccgcggcgcaaaagagaccaaacatgaagcaagtgatggagatgcttcgcaggaaagagcttaacctcaacgaggatgccttaacggaacctggcgtctacagaggtgtcaacaggggacgcaaccaccgtggaatcggtcttagggtcggccaaggaggcagctcacaggagagctcgtcaacgcaacgtgacaaagggaaaagctcagccgttcctcaagggtcgacgtccaactctaatatttccttccagagcatcacagagttggctcctagatga

SEQ ID NO: 166061 - DNA, 2862 bp, Arabidopsis thaliana landsberg
atggtaggccttggcaaaaaaaccgtacctgaaaactcgaaccgaaaccgatccgaaaaaccggtttggggcgggtacgtatattagctatttaccctattgggttttagattgtcgtacccgtgggtataggataatagccgatctgaacccgatacctgaaagagtatcaacttacccgaaattacatatacttattcatagatttatacatataaaagtttattttatatttaatatttgaaccaaatacatttatgtcctcgtgtctcctcccctcctcctccacgggtttttccattgagacgtcctcgtctctctcctcttccattgagactttctcgtgtctctcctcctccacgatagtagcgatacagacgccctcttgtctctcctcgtccacggagaaatgatctcataactccctttctgcaaacaacaaatctctcaactcctcttattatctctatatccctttctcttttaatgagatgtgtatagaccaatttacccctcctccttctttctctaattttcattttaaaattaaataattttagaaagaaaaaaaaattgaaaccggaaaaaaaaaacagaatccgtgaaactctctctctctcctctcctctctctctctctctcctctaaagctcgagctcactctctctcctcgctcactcatttctctcttgccggaattcgatttacatcaccattgttgccatatccttatcttcggtgagcttcgtcgacgtagaaagaaaaggtatgtttttcgagctgaatagagcttaaaattgaagattagaactaagagattttgtcaattagatttaagattaagcaaattgtgtttgggtatgcacattggaagtttatgcatactgtataggttgaatagatctgtaaatggataagaaatagattacaataactgaatcatagtgaattatagttttgaacccgaaaccattcaatttgagctcttgtcgggaaatacatctggtagaactgagtataactgcacatgattcaattgaaaatatatatgtagtatgactttgttgcactagtattaaccatttacatgtagtatttatttggtacagttgtattaccaattttcatgtagtatttatttggtacagtagtattaccaattttcatttagtattattagttatacatgtattatacagataggtgtagtatgactagttatacttgtgttacccaaaattgtagtataactagtttttttgacagagtttttgtattgttgtcgtaggatacaatggtggagaaggtgatcatatattttagatgaaaagattgaacgtacagcttgatgatgaatacccaggagggaaaataactctctctatgttagaaagtaagatttgctcgaaccttggattagatgaaagtaaggttaaattgcaaatgaagtacaatgcagtgatgttgggaccaactcaagagatacacattagtgatgatgaggatgtcggtgtctatatattttcaggtgaaatggttagtagatatcctttgactgttgacgtcatcactccaccagaattgcccgagaaactgtctagagtggaggtcatcaataaaagttctcttggtaagaactatgctgatttgggttcaaatgaggatgaaatgagagattatgcaaccatcgtgatgggtgatatgtctataatttgcatgttttcactgtccattcatcatcgttttgagtccagttttgtatcattcatcactgttttatatcatttctcatcattcttgcatactttgcatgattaggatagctttgcatacatattgcgttgctgagttgttttcaggtgatttggagttgtttgcgagcaaattggaagaaatgagccagaaccagaagacatactcgaccaccaggtcgtgtgcatccagcaccatactcgaccccctggtcgagtgactatggagccattcttcccatctactcgatccccaggtcgagtaacctcagctcaggccactcgatgacgccactcgacccctggtcgagtatcacttcgccacaccaccagaccacactcgaccgttcagtctaccacgttactcgaccccctggtcgagtatcatcactcaccaccaacaccatcactcgacttggcactcgatcacatcttcatagtctactcaaatccgcactcaaccagacaagctgagcacaaggaagagaagaggagaagccgaagtgtttggaagcggcctggacctccatcggatcacgaagcccatctcggcccattatcactctatgggcgtggcgattaggttattggcccgtctactatcattttctttcgttttgtataaatagatgttttagggttctgtcctaagaggtctagtcgacattgagtttttgcttcagttttattttctgttttactctggttgtgccgcttttgcttctgcaacctataattcgagatttttccaagttattcagattccgcatttgatttcatctgtcatctgtcatctactctttatctctatacttatgcaatattatcatttacctgcgtttatgtctttgagcatgttgtctgagtagtgacttagaattcttaaggatgggatagagtagttgtggaatccgtagtctgtagaatagttaagttttagaattgattgaatcccttcaggactagttgtgtttactgcttatttctttctgatcaactggaattcgatccaaagcattcccgcacccagaaggtgttcgatggaatgcttgatccactagttcctgagatattcgtctctatcccaagggattggccgtttagagcgttt

SEQ ID NO: 166062 - DNA, 1093 bp, Arabidopsis thaliana landsberg
atgttcgatgaaatggttagatctcgtcccttctatccggcaattgatttctgtaaactaattggtgtcatcgtgagaatggagcgtcccgatgttgcgatttctctctatcagaagatggaattgcgggggattccacttgatatctacagcttcactattctgatgaaatgtttctgcagctgtcataaattggttttcagcccaacgttgttacgtttaacaccctaatccacgggttatgtctggaaggtaggatttctgaggccgtagctttctttgattatatggttgaaactggatgtagacccgatgtcgttacgtttaccacactgatgaacggtctttgttgtgagggtcgagttctccaagcgctagctcttgttgatcgtatggtagaagaaggtcatcaaccttacggaacaattataaatggattgtgtaagatgggtgacactgagtctgccttgaatctgcttagtaagatggaagaaacccacatcaaagcccatgttgtcatctataatgccatcatcgatcgcctttgcaaagacggacatcatatccatgctcaaaaccttttcactgaaatgcatgacaaaggaattttccccgatgttattacctacagcggtatgatagactctttttgtcgctctggtagatggagtgatgcggagcaattgctgcgtgatatgatcgaaaggcaaatcaatcctgatgttgtaactttcagtgcattgatcaatgcattagtcaaagaaggaaaggtctccgaggctgaagaaatatacggtgacatgcttcgtagaggtatatttcctaccacaatcacatataactcaatgatcgatggattttgcaagcaggatcgtctaaatgatgcgaagcgcatgttagattcgatggctagcaagagctgctctccggatgtagtcacttttagcaccctcatcaatggctattgtaaggctaaaagggttgacaatggaatggagattttctgtcagatgcatcgaagagaaattgttgctaatacagttacttacactactttgattcatgggttttgtcaagtgggggatttcgatgc

SEQ ID NO: 166063 - DNA, 2184 bp, Arabidopsis thaliana landsberg
atggaaagcaatatatttggaatgtgcattgtcatgtgaaaaactgaatagttatgatgtttggcttaagggttcccattatatggttacgacaatctgaaataagaaagtggctttgagttttaatcatatgagctctaatgcaggtggtgacaacatttctgttacaaaaggtgttgtgtctcgagttgaaccgacacaatatgttcacggtgccacccagctaatggctatacaaatagatgctgctattaaccccggaaatagtggtggcccagctatcatgggaaacaaagtagctggtgtcgcatttcaaaatctttcaggtgctgagaatatagggtaagtcagaggttaattattttagctctagtgcagtaaaggattaggaaaaggagttaaacgaagtttatatcttgatatcttaacttatgtaagtaacatgagtttatttgtcactctcggaatgatgtatgaatcactgctgtcttgagacatctcctaagtttgattttctaatcatggtttgcaatatgcagtataattgaagtagtgtacatgtcttgacaaggcaaggtttaattgaagaatttgatttcgtggttttaaactgcagctatataattccaacaccagtgataaagcatttcataaatggcgttgaagaatgtggtaaatacattggtttttgttcaatgggtgtatcatgtcagcctatggagaatggtgaacttcgtagtggttttcagatgagttctgaaatgacaggggttcttgttagcaaaataaaccctctatcagatgctcacaaaattttgaagaaagatgatgttcttcttgcatttgatggtgttcctatagcaaatgatggaacaggtatattttcctttatttccataagcctcagtgctgactttgtcccctattttgttggtgaagtgtgttttgatgtattgcagttccttttcggaacagggagagaatcactttcgaccatttggtttctatgaagaaaccagatgaaacagccttggttaaagttttgagagaggggaaagaacatgaattcagtatcacactaagacctgtaagtcatttgttatgactaaatcactgtatgttgtttgcttgctggttcatataccatctctaaaatggacaatcatcttttcttctgagcttaatagttttgtattgtatgcagctgcaaccactagttccagtgcatcaatttgatcagcttcccagttattatatatttgcgggcttcgtatttgtacctcttactcagccataccttcatgaatatggagaagattggtataacacttctccccgcacattgtgccatcgtgcattaaaagatttgcccaaaaaagccggtcaacaacttgtcattgtctctcaggtttgtgctttcttttccctagtgttttttttctttaagtcttgttagaaagattgaaaatcacttgagccacaatgataataagtacatacagtcaaccagatttcctctgtttcctaagcagcgaaagcttgcttagaacttttgaatgtccagcaaatataacagcaatgatgtctcgccatttatgtatcacactgatattgaatctctggttgataggtgttaatggatgatatcaacacaggatacgagcgtctcgcagaactacaagtaagtaaaagctaatcttaaacctcgttgtcattattgtaaaatgctcctgacccttttgtcatcgattcttcttaatatggcatacgtttagggaatcagcaattaaaataaagaattaaacataacagagcagtaccatatgattctaaaacagcacatatgaaatgcaaaatcataacttagacatgatagctttgcatgatatagtgttctgagagactgacaactaaactgattttgtgctgaaacaggtgaataaagtgaacggagtagaagtgaataatctgagacatctatgtcagctcatagagaactgcaacaccgaaaagctgaggatagacttagacgatgagagtagggtaatcgtcttgaactaccaatccgcaaaaattgccacttctttgattttgaaacgacacagaatagcatcagcgatttccagcgatctgcttatcgaacaaaatctagataccgagttggcttcttgttctgcggtttga

SEQ ID NO: 166064 - DNA, 3605 bp, Arabidopsis thaliana landsberg
gtttcacattcgtttcacaaacttcttcgttttggcacaaacttcttcgttttcctctccgattttcctctccgatttcactcaaaatcgccggcgaatttcctctccgatttcactcaaaatcgccggcgaatttcctctccgatttcactcaaaatcgccgacgattttcctctccgatttcactcaaaatcgccggcgaatttcctctccgatttcactcaaaatcgccgacgtattttctttctgagaaaccccaaaatcaccgacgaatttcctctccgataaacctgttcttcgctgaaggattcagatcatatctctacgacgcaaacaatccccagagatatcgatagatccgacggtaaccgtttttataatcgattttatagtcaattttatagtcaattttatagtagatctgacgctgtttcataacatgtttcgcagatggattcagagagtgaaatccttacattgcctgaacagatctacaaagaaggtaacgaatctattgcaatgggtacggttcagcaacattccgattggattttagttaataaagtagaggaagcgttaggcgatagtttatttgacaagattagaagttctttttttggtcctctagttgaattgggaccaagaatgaaggcaaagaggggtgtaaaattttcagggaaatttttccactacctcatgcagaagagagtgatgactaaaggatcaactctttggtttagagttgattctcaaccaatccgtttctccttgagagagttcttccttacgacagataataaagttttacaatcatttttaaagcttaattaactgtcgtagaatgatttacaaggcatttgcataactgtttgcgtagtttacaatcgtttttaaaacataagtaagtatcatagataatttacaagagattttaaaagcttttaaaaggggtttacttcattaacaatcgtttaagaagcataagttagtggcagataatgatttaaaagggattttaaaaagggtatgcatggtctacaaccgtttttagggataagtaactagcatagaataatttacaagggattttaaaagcttaaagaagtgttaaacacgtttacaagggatttcaaaagcataagtaagtgtcttaaaacgatttacaagggattttagaagtgtttgcatagtttacaatcgattttaaaacataagtaagtggcatagaatatttacaagggattttaaaaccttttctaagggttaaacatgattagcaatcgttttttaagcataagtaagttgaatagaatgatttacaagagattttaaaagcttttagaagggttaaacatgatttacaatcgtttttaaagcataagtaagtgtcatataatgatttacaagggattttaaaagtgtctgcatggtttacaatcgtttttaaaaccataagttagtggcattgaatgatttataagggattttaaaagcttttaaaagcttttaaaagtgttaaacatgatttacaatcgtttttaaagtatttactataaaacctgtaataatagtctctacactgtcttttgttcatacaggaattcaatgtgaacctgttcatagggaacttcgacgaaaggggaaagatcctgtaaaagaaccatacttttgggctagtaaaggatcctatactcttggtgatctcgaagatcgattgtttttaaaacctaaggaaggtgaacctgctgttgaagatgaagaaaagttgtgtcttgttgcagtagtgttgactgaaggaattcttttgacaccatatggaaaagagaagatacctttgccaagattgcagcatgcttctgattttgagatgtacacagcccaaccgtgggggtaaagaagcattcagtgttctatcaaattcaattctgagaatggacgagaaaacttgggcaaaagagaaatatgatttgagaggatttggactagcgctaacaatatgggtgttgagcgcagttccagcatttggtgcagcatatggagttaaagataaggaattccaatctgaatatccattgatattgaagtggaaaagcactactactccagagtttttcaagatcgtaaaccttgtaaatgatgtttctgaggtaagcttttgtctatttacagaattctttaaatggttttgagatttgaagttctgctttctcaagatttgtaatgttattgtatcttcgcagattgaggtgaatacaattattggaaacccagaagacttcaagtctttagttcctgatttccacacagacgacatagaattccaaaaggttttggaacttgttaagatgggctacagattgaagaaaactgaatggaatacaagatgcgttgatgtttgtgctgcccttgaagaagtaggtcaaaacaaaatcaataacaaaatatctgatagcgagaagcttgacaggattttgacaatccttgaagatcttaacaagagagtcgagctgattgagaggattttggacattagaatggaggaaaagaataatcagagatccgaggaagatgaagaaagaaaacaagaagatgaagaagtagaaagacaaccagaggtaattgtaaatgtttctttaaaaggtatttgaaaggaaaggttttacaatgtattttaaaggttaaatacgcagtaaacctttacaatgtactctttttttcgcaggctgaagaagaaggaggagtagaaagaaaagcaaaggtaattgaaaatctttacaagctattttaaaagtctactaattatattaatgattgacttattaattttattttgttgcagaatgacaatgaatcatttgaagattcaatctgagagccaaacacacagtatgggagctatccgggtgatgatgaaaacacccaacgtgatgttggtgatgaagtagctgaagaatcatcaaaagtacaataatttatatctctaaaagtcttacaaaaatgattagtatcctttttataattttacattctgttatcttttcaaggataagtctcctattccacgatcctctacaccaaatttcaatattttgtctgaagaaagtctggatgtttaaaaggataagaagagagttagcagaggaagaaatgaggttagcatttaaaaaaatttgtattaatttaaccaagtgtttatagtatttttttcaaatctttaaaactttatgtttcatgcaccttcagaacaagagagttaaagcaagtgttcatgctgaggataatcttaaaacaagaaaacaggttagtatttgcaacagtactgtttttaaatttgtcaattgtcttgttatgatatttacaagggattttaaaagtatttttaattggtgttttttactattctaggtgccgagaaagaggtagaaacaagttgatagtgctgatgttgatgttccaacaaggaaagaggttagtatctaatttattatgattttgaaaattttgtttacaaggtattttaaacatctgttttttttattatttttgataggcacagagtaagaaaaggaaaattattggcaatgatggtaataacgctaataatg

SEQ ID NO: 166065 - DNA, 1027 bp, Arabidopsis thaliana landsberg
ttagcccaaatgacgatgactgtcgagaagaggatcgaagctggcgttacggtgagccatgaaggtgtgaaacgggcttacgtaactttcctcgccggaaacaaagactactggatgggtgtagttggtctagccaagggtcttcgtaaagtgaaatcagcttatccactcgttgtggcgactctccctgacgtgcctgaggaacatcgtcaaatcttagtggctcagggatgcatcatccgtgacatcgaaccggtctctcctccggagaacacgaccggttattctagggcttattacgttatcaactactccaaacttcgtatttgggaggtaaatatcttacttaatataaactgagtgtataaatataatattaccgtattatattttgtcaatattattaccatataccttgagtgatacgtgggtttaagcatgataacgcctattgtcactaacattgcaaaaaccatatataaattatgcttcaaaaaaaaaaaaagtctatgtatatatattacaccatttattgtcacagatatttaacgagttattaacatataaatgcagtttgtggagtatgagaagatgatatatctagatggagacatacaagtgtttaagaacattgatcatcttttcgatactcctcgtggctacttgtacgcagtcaaagactgcttttgtgaggtgtcttggtccaaaactcctcaatacaagatcggttattgccaacagtcacctgaaaaggtaacttggcctgttgaaagtttaggtgctccaccgccggtatatttcaacgccggtatgttggtttttggaccaaatcttgtcacttacgaggatctccttcgtgttgttcaaatcaccactccaacttattttgccgagcaggtacgattttttacggattttctatcatttgatttgactttattatatcttgttacggactctgataatattgtttatttttgtaggactttctgaattatactttagagacatttacaagccaatccct

SEQ ID NO: 166066 - DNA, 1773 bp, Arabidopsis thaliana landsberg
aaagattaagcgagagagagagagacaaggtctcatcgagcaaagagtgtgtttccatggatgtgtacgaagcaactaggatcgtgctctctagaatccagaacttagacccagctaatgcttccaagatcataggtcttctcctccttcaggatcacggtgagaaggagatgataaggttagctttcgggcctcagaatctccttccttctgtcatagccaaggccaaaaaggacctcgaagagcggctttctttcttgactccgagaaccgccgaagattttgagtccgatttagggttcggatggggtcaccgcaaagaggtgcttaggtccaactctgttccgccgagacttgccaatcagttcaccggttatccattctcccccaaaggtgtcaacttgcaacagagtgaagcccaaaggttggagcttttctttttctttatttttttccttcatctgtatggacgggtattctgaaactttggttggtaaaatgtgtagcagagctgctgctttgatgatgggcgatgacttgcacaaattgggaatatggaggccagagaggatcgacctctcggccacggcctgcccggcgtctagacagatctatctgactttcccggctgacagtatcttcagggaagaagatgtttccgactacttcaggtattactcttgtttggaacccattcattcttcttgttggatgttgtctacttaaagcaatggtggtgcagtacgtttgggccagttcaggacgtgaggataccttaccagcagaagaggatgtttgggttcgtgaccttcatgtacccagagactgtgaagagcattctggccaaagggaaccctcactttgtgtgtcattccagggttcttgttaagccttacaaggagaaaggcaaagtcccagacaagtacaggtactttggcttttcctgcttgagctgctcctgattcctcatctctttacgacgctttgattcctctgctgcaggactaagccatccagggacattatggatttccagcttggtataaagctctctctctctctctcttttatttcccctaagcgttgggttggtattgaatactgatttctctgtgtataggggggagggcttttcatgaagatctgctgtggaaaaggaggtttgaagaacgagctcttgagctgcagagcacaaggctgatgaatctgcagcttctcgacgtcgagaaacagtttcaactcaatttcgaccaaacactacttgtttctccacgactaggttcggttttggtccgagtaagtgatttatgcttgtctgaaatgtgtaataacctgatcgctctctgctggcagtttcaaacaatcagagagtgtgcacaaaagagaatgatgaggatacaatcaaacttccagagaggtatccccagtttgataatcgttcattttgtgagcttgaagaagatctgagtattttttgtctttttgtttgccgttgttcagcttggaggatgataggctggtggatagcccaattgtatcaccgaaacaccattttctcgagtgtggggtagctgcagaaacaaagggttcaggcttgtcgtcgccatcttttgatcaggatgagtctagtacaggtacattgaaagagcctctcaagtccttgaagtgccaaatgccgaggttatcaatgatggggataacacagggcagcagcggaccaacaacgtgtcgcgttgggatctaaacccattcaaaacagctaaccagtggtag

SEQ ID NO: 166067 - DNA, 495 bp, Arabidopsis thaliana landsberg
  unsure (1)..(495): unsure at all n locations
tcgctcggcggccgcaaggcgcggttcgaacccaacgtcatcgagggcaatctcggccgcgtcgccgcgccacctccgcgcgccagtgcgccggcagcggacgacagctctcgccctgtcgccatccccgtcatgggccgcatcgccgcaggtacgccgatcgaggcgatccagacgcacagccatacgatttccgtgccgccggaaatgctcgggccaggcgagcactacgcgctggaagtgcgcggcgattcgatgatcgaggccggcatcttcgatggnnnnnnnnnnnnnnnnnnnnnnnnggataccgccggcaccggcgagatcgtcgtcgccctcgtcgacgaccannnnnnnnnnnnnnnnnnnnnnnnnnnnnnnnnnnnnnnnntcgcgctggaagccgccaacccggcctaccagacccggatcttcggccccgaccaagtgaaaatccaaagccggctcgtcggcctgctgcgcaaatactga

SEQ ID NO: 166068 - DNA, 527 bp, Arabidopsis thaliana landsberg
atgggtgcgagaagcagccagactgtggatccagtgttgagccggagatactcatcggaatcagagacggtactagcggtgcgacgacgaccgcctatggtgaacggaggaggattcgtagtgagcaatagcaaacaagtagtagtatttagagttgatgggtgtggagttcttggaactaaaggcaaacttctcttgagaaatggtgatggtaatgatttgcttctcatccgcaaaatggtaaccaactttatgtttttgcttagtttagatcatttctgtttaattacaatgaaacgagtgcataatgttactcttatttggttaaagggaggaatagtgcaggcactgaacatggtacacaacaaatgggaaggttttggctatgacaatgaaggaacagagaggttagttttcaccttgaaagatccaaaagattcatgtcttgttcaaaacagttcaatcaaaatcttagttcacggtaaacccccgaagatatcatcaactcgcaacaactacgtagagat

SEQ ID NO: 166069 - DNA, 633 bp, Arabidopsis thaliana landsberg
gtgggattcaatatctcaagttttgaatgctttttaatgtttatgaatttgcattttgatttttggtgttttatatttgaaactaatgcagagaaaccttcgaatggtcatccatatgaaactgagatcactgttttgttagagaatcctcagattgagtttggatttttgagaggagagtgttcattggaaatgagtgattcatatgtgtgggttgagacagagtcgcagttaaaggaacttgcagaaatattagcaaaagaacaagtttttgcggttgacactgagcagcatagtttgcggtcgtttcttggtttcactgctctaattcaggtaaccaacttgtaagaatcgttgtagttttttttaaccgttgaagttgtgatttttaattcttctctgaaacttgcagatttctacacatgaggaagactttttggtggacacaattgcgttacatgatgtaatgagtattcttcgtcctgttttctctgatcctaatattcgcaaggtatattgttcagtgttacaatcttgtaacttaatgtgtttcaaatttttaaaagaagtcttatgtagcacttgtatgtttctgccaagatgagtttagtcccccaaagttgtatgtgcgca

SEQ ID NO: 166070 - DNA, 1664 bp, Arabidopsis thaliana landsberg
agatcaataggggttgtgtccacttaaagggggtggtccctttttattaacaaactggaagtttatttttcaaactattttcatcgcataagtaggctttttattttctgaacaagtgttttgcctgaggaggcttttaaacctttttaagaccgtgatcccaagagggtttctgcaatatttaagtacggatttgcaaaggccatcttttaaatagcttctttgtttaaccatgtggccaagttgtgagatttataggctgatcaaacctatctcttaaaatgtgagtctgaactcgttttaaatccgcgaattccccaactcgggtttggtcaattcgacttatttactgggcttgggccttaatcgtttttcttatatttaatgaaccgtttgtctttaatgcgacggttgccatttccttccttggaaaataggaaaagcctcacgtctctaaggcaataattgccttttcctcgatttccaaaaatgatttaaaccatttggacacgccccaattattaattttgtggtttcgagaaaaaccgtaactctctataaataagagcacaaacagtcattagtgtcccaaaatatgatctcagaaatttacttggtaaatacttcaagaatggaaaacgaaagagcctccaccgaaagtcctcttgaccccggtaacccactgtttcagtccggcgatggttttgagcccgccggtgtcctctttccacacgcttgtttccacttcccttcgaaagagaaaaaagagacgtacgactttatggacaggtaaaccctctcttgttctctttttcggaacaagttttacttgttttttaaccagttcgtattctaggtcgtcgacaagcatcgctgcctatgcgatgaaaggcagcgcttgggtctcaagaggcaaacgcttgaggcccgaattgcccgtatcgagaggaagataagggccatggagagcgacccttttcaatgggagtggaggaacttcgactgcgtggcaaagatcccgcacatgctccggatgtaccttcgtactcgaggccaagttcctaatcccgtaaatgctccggtcgaggtggtccatccgaaagcgaggaggacgacgaagaagaggacaacaacccctgcaagcgcgtcaagaatgacttcgaggcggacgacaaaaaacttagcgtccactttgaacgccgaaccggcgttgaagaagcctgttcgtgagcctcttccataaatgtcctttgaactcgctacttactttattgttttttatttatttccttttgaacttgctatgggctccggcccatttttaattcatggaaactttcctattttcttgatttcaaaatatttgttttggagatatgttataaatgctgggaagacttgaaggcgtgagtctttccacgaatcactcagatctcgaatggaattgcgatcttaaaatccctataaatttcaactcttaagttctctttatttttcatctaaactttcttttctttttgcagctatggagtttaaccttcgatgtttaaaatccatgccatacttttcgagggtcgggatgatggacgaagacatcccatacgtgcctggaagagggccttcttcacctcgtggcttcttcaggtccctaatccgaactccat

SEQ ID NO: 166071 - DNA, 768 bp, Arabidopsis thaliana landsberg
tgtggatatcgccgggcgggtcggggtgtcgctgccgaccgtgaccggttggcgggctcgataccgcgagcgagggatcatcggcctggctgacgaggctcgatccggtcgacctcggcaggtggatcatcgcaagatcgtggccacgacgctgaaaccaccgccgaagaaactcggagtgacccactggtcgagccggttactggcgaagcatctgaaaatcggcgacgccacagtggcccgggcgtggcgggagtacggagtgcagccgtggcgggcgcagacgttcaagttctccaccgatccagagttggttgccaaggtcaccgacgtcgtgggcctctacctggccccgccggagaacgcgatcgtgctgtgctgcgacgagaaatcccagatccaagccctggaccggaccgctcccatgctgccgatgcaacccggactgcccgagcggcgcacccacgactacgtccgtcacggcaccaccaccctgttcgccgcgctgaacatcgccaccgggaaagtcaccgcgacctgtcaggcccggcaccgccaccaggagttcctgcgattcctcaagcaggtcgcccgggcctaccccgccggcgagttacacctggtgatggacaactacgccacgcacaaacgaatcgagatccgagactggctagccgcgaacccacgaatccacgtccacttcaccccgacctcggcatcgtggatgaaccttgtcgaggtctggttcggcatcatcgaacgccaagc

SEQ ID NO: 166072 - DNA, 632 bp, Arabidopsis thaliana landsberg
catgtcttacctctcaaggagaagctattccaaaatggccatggctcgtgtacttagttggagcaatgggttgtttaatctgcagctctgtttcacacctccttgcttgtcactcaaaacgtttcaacatcttcttctggcgtttggactacgcaggaatatctctcatgatcgtcgcttctttctttgcaccaatctactacgcattctcctgccaccctaacttccgtttactctatttatcctcgatctcgatcctgggtctcctcgctatcatcactctcctctctcccgctctctctacgccgcgttttagacctttcagagctaatcttttccttgcaatgggatcctctgctgtgatacctgctacacatgtgctttgtctttactgggatcatcctaacgtgttcatcgccctcggttacgagattgccaccgccttgtcgtattttgtgggagcaacgttttatgttagccgtgtgcctgagagatggaagcctggtgcgtttgatatggcgggacatagccatcagatattccatgtgtttgtagttatgggtgctcttgctcattgtgttaccactcttctcatcattgatttttcacgggcttccccttcttgtgggttt

SEQ ID NO: 166073 - DNA, 509 bp, Arabidopsis thaliana landsberg
gaaggcgctcgacttggaaggcgcaacaccgatcttgctcggttctcaggtaaaaccaaaaacaaaaaaaagggctcttgatccctcttgctcgattctccataatccgttccatgttttctgattcttttcattgaaattcaatcattgtagttggagtttcatgtgcatcatgcaaaggaagcagcaacagttgtgaaacttgtggcaatgcttgatcccaaaacagggcagccaacaaagaagtctcctcgttgtctaactgctaaacagagcgcaatgcttgaggtttgaaaaattctttgccttatgaggtaaattataaattattacaacagcggattcgatctgacaatttttggttgtaactgcaggttagtctccaaagtccagtttgtgtggagacattttctgagagtagagctcttggaagagtgttccttagatcatcgggaagaactgttgctatgggcaaagttactcggattatccaagactcataaacattc

SEQ ID NO: 166074 - DNA, 547 bp, Arabidopsis thaliana landsberg
atgaagaccgtgcggtggtcatgtctgctgttactgctgtgcgtgccgttgctggcctggggcaaccccgtaacgccgagtatgccgggcattcccgtgctgagcgtgcacaacggtgctgcaggggttcagaactggacgttgtcattgcaggtgttggcgctgatgacagcgctcaccctgttgcctgcgctattgctgctgatgacgtcgttcacccgaatcatcatcgtgctcggctttctgcgtcaggcgctgggcacccagagcaccccgcccaaccaggtactgcttggcctggcgctgttccttaccctgttcgtgatgtcgccggtgttcaatcgggcttaccaggacggtgtgaagccgtacatgagcggccagttgactgccgagcaggccgtgccggcggcggcggcgcctttcaagcgtttcatgcttgatcagacgcgcgatgccgacctgcaattgttcacccggttggccggtggcaagccctatgccagtcgtgccgatgtgccgttccgcgtggcgatgcccgcatttg

SEQ ID NO: 166075 - DNA, 2130 bp, Arabidopsis thaliana landsberg
  unsure (1)..(2130): unsure at all n locations
ttgcatattcagattcttttactcttcatatggttcttgaaagcttaagtctgacttgttttttactctagcttatgtgtgcggagaaaagccgggtctcatacctgaaaaaccattcatcatggaagagattcgtaacgaaaatggtcttcaattggatattaaccttgaaagggagcttatgaagcatagattgaaagaactcaatgaacaagattgttccgaagaagacattactctttccatgaaagaactcggaatggaaaggtgagtgttgttgatgattgaaatatccctatataggttactcatcagaatggaagaatataattttgttattacgttaatgattagggccaagcttcatggatggcctaacacatatgttttcaccaaatcaatgggagaaatgcttcttggtaaacataaagaaaatcttcccctcgtcatcatccgtcccacgatgatcactagtactctttcggaaccttttcctggttggatcgaaggcttgaggtaagtttattatggattaggaatctaaatattgataaaaaaagttgaaagtaggattatgttagtccatagtgattaaaaactcaagatttcttgttcattctttcttttatttttttaattcttactaattacaattgtccacaatactggtatttgtatgtagaactgtcgacagcgtgattattgcatatggaaagggagtgcttcagtgttttcttgtcgatgttaactcggtctgcgatatggcatgttattaaacatgttcctaaaagaatttacaaagttatatgcctcatttcttatatgcatatttaagagagaaaaaaaattgaagaaccaatgtttctatgcgccaagtacacatgctaaatgacagtcatgttgacagataccagtagatatggtggcaaacgcaatgatcacggctgcagccaaacacgctggaggttcaggggttcacatggtgtaccatgtcggctcatctcaccagaacccagtcacatttggagagattcatgagattgcggttcgttactttacgaaaaaccctttgcgaagtcgcaatggctcactcataaccgtctcaaaagtgaggttcataccaaccatggctttgttcagcctctacatgaccctacgttacaaactacctctccaggtactaacatgaacaagagttttgtccttttagctaaatagaaactcaactatatatgaattactaatattacaagtttttttttcttgtagaatatactattctgtttaatcttgcgattccatagatgcttttaaaggatagcgtacttaagctaatttgcccaaaaaaaaaaaaagcatacttaagctaattgtttcaaaaatataccatttaaaattatatatcttcttataaaaaatattatcctatttataccatttataatctattctggttaaatttatacaatttaacaaaaaataaagctaaatattttcttatggcatccttttttttttttttctggcgatagtgttttgatctgtattgttagttcttcatttttgttcaatcaatactaaattgtttttcacagatatttttctctaataacgttttgatcttttagaacgaaaactaaatattttctcatagatttttttttgtagtgttttgatatgtattgttaattctttctttttcctcaatcagttattaaaactagttgacataatatatccttggagaaacggagataaatatggagacaagaaccgcaaaatcgagttggtgatgagattggtagagctttatgagccttatgtactcttcaagggaatgtacgtaaattaacttcaaattttctgctgtagaatttaaanctctataattttaatcgaaattataaacttgaactataatattttatactcacataatattaatatacatatttttcttgcagattcgacgatagaaatacaaagagtttatgcgcaaaccagaaggaagaggagatcaaaaatacagaaaaattgatgtttgatttcgacccaaaaggaattaattggggagattatctcacaaatatacacatttctggactcgtcacacacgtgcttaagaagtga

SEQ ID NO: 166076 - DNA, 529 bp, Arabidopsis thaliana landsberg; identical to SEQ ID NO: 1976

SEQ ID NO: 166077 - DNA, 1009 bp, Arabidopsis thaliana landsberg
taacttttgattcatcaaaaaatgtgaaagtttagatacatctttgtgttcaatcatgttttgattaggatgaagaattcagaaatttgattatatcttatataggagagagacgtgtttcgctgatttgctaatttgctgattttattgttttaatcttacttctgagagaaccaatagtaatttctggtttcttcgtattcttgcaggttttaaaagctctacatgctccaatgactgtgactttggttcagtttgctgttggtagtgtgctcattagtatcatgtgggttcagtttgttttggagatgtgtcactcactctgatatgttttccttgatatctagttgccatcttgccgcttgttgttgtgtgcacacttggtaatctatttacgaacatgagcctcgggaaagtttatgtttcctttactcataccattaaacccatggagccttttttctctgttttattatctgctttgtttcatggggaggtgagctctttttctgatttgtgtttttctttgacatgttggacaacatcactctcttctcaattataacattgatgtctctcggtctgatggctcatgtgactttctttacggaaggcatcaagttcactccttcatgcattcaatcagctgtgagcttattatatattacgattctatttttttatatccttctcaaatgcttgcaggtcctaacacccaatctcagttttgcagggtgtgaatgttcaacaaatatatacaaagtcttttatcgatgcactctgcttccacgcataccagcaagctaagacttttttctcttaatgactttgttcaaaatttgttgacattatcgatcattgcaaaaatatgaatacaacactgcagaccaaaagaattttactatactcacaaggcactgccactctaacatatagataccatgcggcatgccgatatatagccctattctcgcgccatcaatatcttaaaggcggagatgaaagaaaa

SEQ ID NO: 166078 - DNA, 2744 bp, Arabidopsis thaliana landsberg; identical to SEQ ID NO: 38053
  unsure (1)..(2744): unsure at all n locations

SEQ ID NO: 166079 - DNA, 1489 bp, Arabidopsis thaliana landsberg
  unsure (1)..(1489): unsure at all n locations
gcgtaattggatcaccatggaggtctgatcaagaatccattcttcgactttttctgatggaatgtcatgaacacaagagaagaataatgtgcaagagacgacaccaaatggagtatcggaagatctggtgaagtgcttgatgggaatctatctggaactcaacaggtcatcgcgtgagcgagaagggtcaaaaactgtttcaaagctgagcctcacacacctcaagaacgcttctttcaaacgcaaatcggtgtatgaccataacgcatctaatcttgatccatantgagctgtcatggggacttctcttagagacataggagaatacaagaacttcatccatatcactcgaacctccattgatgttagccgtttatccgattgctccacttctcttgtcattttgaggtacttaccaatncagatttccttcttatttacctgatgagatcacaagatttcatgatctctgtataattaaacacacatgcagggttttgaaggagaagttgagcagagtggatttgagtttcttgaaccacaagaaaaagatggcattctggatcaatacctacaacgcctgcgttatgaatgtaattccatgactcaattcatatttagttgaagcaaagtcaagatttcggaaataactttgtttgtttgcagggatttttggaacacggactaccttcatcaaaggaaaaactgctgaccattctcaaaatggtaactaatacaaaacaagaaacatctttaaacttcgcatacttaagttaatgaacaaaattgacttgtgttgtaggcaacaattgacgtgggaggtacacaactgtctgctctagatatcgaaggatccatcttgcagagtccatgcgaacctagggaatctgtaagtactcatatatatcatcctgtgaagttgtaataactgatctttaaaatgtttcttttatccgaataaaaaggtttcagccggtgaaagcgaagtgagaatacagacacgctacggattcagatgcgtagagccaaacctaatgttcgtgctttgtcgtggagattggtcttcacctgcagtaagttcactcaatttcttcaaatatgataagtgttgcttcaacggtagtaactaacaaagcatctttgttcatgatcacctatatacatgatacagttgagagtttatacagcagaagatgtggtgaacgaactaatcaaagcaagaacagagtatctagaagcttccatcggtgtctcgggaaggaaaaagattgtgattccgcgattcttgcataaacgtctacgggatttcgctgaggatgaaggctcgttaattgaatggatatgcagccaattaccaccagcccaacgttgctttcagctcaaggaaacagcgatggaggggttgaacaagaaaagtgaatctcaattgaaaaaactgatagaagtgaggtctcacgaatacgagtttcgttatctcttggcattgtaa

SEQ ID NO: 166080 - DNA, 1564 bp, Arabidopsis thaliana landsberg
atgctcgccaatcctcttccatttactgccttgaaatctctcaagccttacaagaacgcttggcgtattcaggttaaattgcttcatgtttggagacaatattctgtaaaggctggtgaatccatcaaaattattttggttgatgaagctgtacgtgtattatagtttcaactttatattttgtccagccttatagtaggttcaagcatcattttcccttactaattattatttaaattatttttgtcatatagggtgataagatatatgctgctgtgagaagagagcagatcaagaagtttgaaaggtgcttaaccgagggtgtttggaagatcattacgaccatcactctaaatcctacaagtggtcagtatcgtatttctgacttgaaatacaagattggatttgttttcaaaaccacggtctctccatgtgataccgtttcttatgctttgttcctctcacttgctaagtttgacgtgatcctctctgtatccgctaactcgaatatcttgcacggttagattcaaaattttattttcttttcgaacatatatgcattatctcttcatagatttcttctctttgtctatacagatgtaatcggtcaggttgtcgatcggtctgaaattcaagatcttaacgctaacaacaagcccaccaaaaaaatcgatttatatttgagagatcagcagtacaaacaatctatattcatattcattcttatttaaagtttgttgtttttttcactttttattaataaattattctttccatttttagtgacactcgcttggcatgtacactttgggagaagtatgctgagatcgttgacaaagcttgccaggagtcaaccgatggtattgttgtttgcttaatccgatttgcgaagatcaatctctacaacggtaattatattgttatgtattactacatatctatactattttaaaaacacgatcttatatttttaaaacagatactaggagtgtttccaattcttttgatgtttcacaagtcttcgtggatcccacgttggctgagttgggtctttttaagcaaaggtaattgtatttatttgtcactaaatatatttgtttatacataatattaagcaaagtatattttcttgatatatagcataccaactgatgggttaactttgggaagttctggatcttttcacaagaggctctatgcaccaagaattggggatgacgatggtgattatccaaggcaaacaatcaaggaagtcctcacatcttctgatgtactattcattaatttatttatcctactaacatttttattatatttttatatttttagcttagtttgttaattcctctttatattcatttgaaggtcggtaagtgcaaaacagtttgcactgtttcggtaattgatacagattggccgtggtactatttttgttgtcgtgctcacaacaagaaggttgtcaaagaagaagctatcaaacttgaagatgtcaagcaacctcaaaagccaagattttggtgtgaaatatgcaatggttttgcaaaatatgttgttgccaagttag

SEQ ID NO: 166081 - DNA, 329 bp, Arabidopsis thaliana landsberg
acggctgctggagaaaagagtcgcgacgactgcaggagaagacgagacgcgacggagaagaagaagaagttagatcggacggtggaagttggaatggaaagaagaagttatatcggagaagaagaggttaccttggagaagaaacagatcgactcgcagctgaacctggagaagaagagttgcggcggctgctggagaataagaggcggggacgtaatcagatcgaagaagaagagaggcgacggcgaagaaaatagatcggagaagaagagaagccggcgacgaggaaaacagatcggagaagaagagaatcgaagaaaaaaaattag

SEQ ID NO: 166082 - DNA, 1985 bp, Arabidopsis thaliana landsberg
  unsure (1)..(1985): unsure at all n locations
atggtaacacagcaccaagaatgctgactttgagaggaagaagattgttggagctgtttcgggcaatcagatggcagaggtgaatgctaagttggattcggttcacaacttgcttcaaggaagaagcatgtccactttgcagctgaggatgagactattgagcctgagattgagtcagaagagggagtctactacatagatggtctaggctacatgaagtttggacagccacatggcaacttcagtggcaacaggtttacagagaaccaaagttcctcgaactacactcaaaagcctgccttccagacgacatttccttagagcaacttccagaggacctatggtaactcagctaaatgtacaggtagctcaaactgcccaatccattaagagacaagaaggctttcttcctggtaatcctgatgctaacccaaggaagagctgtaatgccatcttaatcagagatggaaatgatgtgtggaaagaagttaatactgaagacgagatggagctcgctacttcagagttggtgtcgaccgacacctacaagtgttgatcgacaccctatagaacattcttctatgagacgattccatacgaaggtgtcgatcgacacacctctagtgttgatcaacactgggtccggactgcaccatatgaggtgcgaatcccgatgaagcccgagactgcttacactcctcctgtcccttatccgaaaaagcgtcgttctaagcaggagattcatgcggctaagtgcacaaccatcatggagaagatcctcatttctcttcctaaggatgcttctaaaacatcttctactccactcaacaggtatgtcaagcgggttgttgacaatgagattagctctgctgaagctaaactgctgacaagagacattagtgcaattctgttgcctaaggtcaagaaagagaaggcacagagagtggacattgctgagtacattcgctctatcactcctgattagaccactgagaagctcccggatccaggcagctttattcttgattgctctatctcctcaagcaggttcagccgctctttgtgtgatctgggatcaagtatcaacctcatgcctaagtttgtttctgagagactaggcatgactaactacaggccgactggagatcactctcctcttcgcggatcgttccaaatgaatcctagaagggattcttgtagatgttcctgttaaggttggtcactccgtaatccctgctacttctgtggtcctggactagaagaaggaacccaaggattctcttatccttggaagagcattcctagccccaggtggtgctaggattgatgtgaagataggtaggatcttcaaagtttgggatttggagatggagtttggcatggatggttcatagcttactaagcctatcagttgcattgcttccaacatagacacacctcctcagactgctcagaatcccaccatagagccacacacaatgctcctattcgctcagctcgccaacgaaagttgcagagcaatagtgtcgatcgacacccctacccctnnnnnnnnnnnnnnnnnnnnnnnnnnnnnnnnnnnnnnnnnacattctcttcagcccacaccacttgaggatctttgtgataagttctcttctctcttctcctgctttatctttgattaattctttagattattcgaagacatcttcaaaagataacaagcctagagttcctcgaaggcttgtttctcttgttattcttgcatgtgacgagagagtgtcgatcgacacaccctagagtatcgattgacacctcaagctgcctcaaccagatccgtttacacaccgccttggaaggcgaggaggcagcagcaatcctccgccactccacccacatcctgaactccgccaagtcaagctattgactcaaaacaagcacttagtgggaggcaacccactggttaaatttttcaatccctttcttttattttcttttctttt

SEQ ID NO: 166083 - DNA, 446 bp, Arabidopsis thaliana landsberg
  unsure (1)..(446): unsure at all n locations
accattttgatgaaacgaagctcgaagcaggtnnnnnnnnnnnnnnnnnnnnnnnnnnnnnnnnnnnnntggattgtgcttacgtgatacttccaaaagggttgtcgcaccatttattgcacgattctcaacaaattgccgaaaaaagcagaaatttactacgcccgattattgcaaaagaggcacttgcgttctgcgttcagatgttacaaccggatgaaattgccggattaaacattgtaaaagcttctatgaccggcatgcatcgagcagctatggacctgaaagtgagacctgaactgctactcattgacgggaacaagaccttgctttcaaatgaaattccttctgtngccattataagaggagatgaacaatnnnnnnnnnnnnnnnnnnnnnnnnnnnnnnnnnnnngtaccgggatgaatacatggtgcaactccatg

SEQ ID NO: 166084 - DNA, 590 bp, Arabidopsis thaliana landsberg; identical to SEQ ID NO: 68579

SEQ ID NO: 166085 - DNA, 2040 bp, Arabidopsis thaliana landsberg
gagaacctcgcttgcagcaatagtaccaagaatgctgattttgagaggaagaagattgctggagctattttatgaaatcagatggtagaggtgaatgctaagctggattcagttcgtaacttgctcacagagaagaagcatgtctactttgcagctgaagaagaaactattgagcatgagccttagtcagaagaaggattcttctacatagatggtcagggatacaggaagtttaggcagccacatgacaactttagtggcaacatgtttacagggaaccagggttcctccaactacacttcaaagcctgctttccagaagacctttcctcaaagcagctttcagaggaactatggtaattcaacttaccaagccccccctccaccgtcagcagagataagaatggaatcgatgcttgagcagattctggagaaccaaacaaaatttgttgtggagtttaatggaaagtttgatgttgtctacacagttcttaatgggaagatcgacaatctgagctctcacttgaagaagttggatgtacaggtaatcttgatgctaacccaaagaagagctgtaatgccatcttgatcagagaaggagatgatgtgtaggaagaattagacactgaagacgagttggagctcgctattgcagagatggtgtcgaccgacaccttccactgttgatcgacaccctatgggacactcttctctgagataactcaatacgaaggtgttgatcgatacccctcaagtgtcgatcgacattggatccggactgcaccttgtgaggtgcaaatcccaatgcagcctgagtttgtttacactcctcatgtcccttatccgcggaaacgttgttctaagcaggagattcatgctgctaagtggatagccatcatggagaagatcctctcttctcttcctaaggatgcttctgagacatcttcttctccactcaacaggtatgtcaaacgacttgttgacaatggcattagctctgatgaacctaaactgcttacaagggacattagtgcaatcatgctgcataaggtcaagaaagagaaggcacatcgagtggacattgcttagtacatctccacaagcaggtttagccgcactttgtgtgatatgggatcatgtatcaacctcatgcctaagtttgttgctgagagactaggcatgactaactaaagggagactagaatcactctcctcttcgcggaattttccaaacgaatccctgaagtaattcttgaggatgttcctcataaggatggtaactgcctaatccatgctcatttgtggtcctgaactacgagtaggaacccaaggatcctcttatccttgaaagagcattcctagctacagctggtgctaggattgatgtgaagaagggaaggatatctctcaatatatgcgatgtggagatggagtttggcatggatggttcggaatataaattgcttgtcagtagcattgcaacaaacaaagacacacctctaaggctgctcagatttcaactccaacgccaactatagaggctgctacagctcagcccacagatgagcattacagagagacaatgtcgatcgacaccacaccccatgtcgatcgataccatcgcgcttcacagacagatgcttctgcacctcttccacagcccacaactgctttagttccctgtgataggtactcctctatctcttatccaactgttactttgattatttctttagactcttcgaaatgtgcttcacatgtaaacaagaatcgagattctcgagagcttgtttcttctgctgatcttgcagataacagatagagtatcgatcgacaaatgatgctgcacggagccgatctgtttacacacccccttggaaggcaagattgcaatccgccaagtagcacaagtcttctatcactcgatccaagttctgaactcccgccagtcaagttattgactataaataagcgcttagtgggaggcaacccactggtatgatttttttctttttctttttcctttatttacgttttttcc

SEQ ID NO: 166086 - DNA, 732 bp, Arabidopsis thaliana landsberg
cgcgccggatttcctggagcgggtggaggcgctggtctcgcagttccgcccggatggcttggtgctgacgccgccgatcgccgaccacgcgaagctgctggcgctgctgcaatcgcgcggcatgccgcatgcgcgcatctcgccgaagagccgcagccgcggcgtgggcgccacgctggacgagcgttcggccgcgcgcgagatggtgcggcacctggtgtcgctggggcatcggcgcatcgcgcacatcaccggccaccactcgcacggcgccagcggctggcgcctgctgggctaccgcgacgggctggagcaggcggggttgccgttcgatgcggcgctggtggtcgagggcctgttctcgttcgactccggcgtggtggcggcgcgccggctgttcgcgctccggcgccggcccaccgcgatattcgcgggtaacgacgacaccgcggccggcgtgatgtgggcggcggcggagcatggcctgtcgataccgggcgacgtgtcggtgtgcggcttcgacgacaccccgctgtcgcgccaggtctggccggcgctgaccacggtgtgccagcccagccaggacatggggcgcatcgccacgcaacagctgttgcgcacgatcgagagcggcgtggacggcgacatggtgtcggtgccgttcacgctgcaattgcgccgatcgaccggtgcggcaccggtgcgggcgcgggcgcgcaaggcgtaacggca

SEQ ID NO: 166087 - DNA, 762 bp, Arabidopsis thaliana landsberg
atgggaacatataaagctgaagacgattacgattacctcttcaaggttgtcttaacgggagattccggtgtaggaaaatcaaatctgctatcccgattcaccagaaacgactttagccacgactcacgctcgaccatcggtgttgaatttgccacacgtagcatccaggtcgacgacaagattgtcaaagctcagatatgggacactgctggtcaagaacggtaaattttcctatctataatttatcatcgtagatccttgttttagttcttagaagttgaaaattttggttgcttccaatctcgactttcattttaattgaaagcgttgttcgcttggcagtcgctaaggactttgaccaaaactttgtcgtatagaccaaaatttgtagtggcttatttattcagttaacataataacatgtcgtagtcgccaacgattgtcaaacgaataggttcatagtaagaactattcgtaacatgagatcaatatttctgattgtggagattttgtttaggtatcgagcggtgacgagtgcatactacagaggagcagtaggggcaatgttagtttacgatataacaaaacgacagtcgtttgatcatgtagcgagatggttagaagaattgagaggacatgctgacaaaaacattgtgattatgctaataggaaacaaaactgatcacgggacacttcgagctgtaccaaccgaggatgctaaagaatttgctcaaagagaaaatctgaatttcatggactgaa

SEQ ID NO: 166088 - DNA, 999 bp, Arabidopsis thaliana landsberg
atgccgccgaagaaggcttcagcaccaggggctggcacgctgcagccgctggaccccaatcaagacgtcctttctctcagagaggcacgaagccagaagaggaaggctaccagtccaacacatccggaggatgatctagatcaggagattcagaatctggaaatccttcagcagcaggttcaacgcaggaaggagaagatggccaggctagctgaactgcagaggcagatagatgaagcctctgaagaagttcgtcatcttgctcaggatgagcaacaccgaaggcctcagcatcaagaccttcatcaggagggctttcacaacgaagacgactggtatgacaatttccatcgtgggaattttgtttttgatgatacttctcccctgtccgctgagttacaggctacaccttggcctccgtcctacaagccgcctcagctccccgtatttgatggccattcagacccgaagcagttcttgatgagctacgaagcaacagtgtcttcgtacggtggcaatgcttcagtcatggccaaatctttcgttatggctgtcagaagtgttgctcaaacctggtattcctcccttcgaccaggaacgatcacttcatggcagaagctcaaagatatgctggtgacaagcttccagggcttctagacgaagccagtcatagctcaggctctgtttcaatgcacgcaagatcacgagcagtatctccaggcatacgttcgaaggttcttgcatctgagagcacaagcgcctatagtgcccaatgaaattgtcattgaggccatgatcaaggggcttcgtccaggacctactgcccagtattttgctagaaagcctccacagactttggagaagctgcttcaaaagatggatgaatacatccacactgataatgactttcgtcaaagaaaggaggaagcctacaggttctctgagatgaccaggggcttcgaagcgagcatccacccaaggcacgtcagatcaatcaac

SEQ ID NO: 166089 - DNA, 744 bp, Arabidopsis thaliana landsberg
gaatattgacaagactacaagagtctaacatcccttgttgaatcaaactttttttccaggttgagtggtcactatagagaacttgttcagtactcaatattctgaaaatctcaacatcacggtaatattatttatttattttgaataacaaggccctgtcttatttgagtatgaaatatatgactttacccctaattcgaggagatttgctggtcaagctagcgactggttcataccacgattaaaagagcatgtcatgtctgtaaatggaaatatttactggcttgcttgcacgcaagacatagaaagtggtgatttttcaatagagagatttacaagtgtgtctctcccgggtgatcatcctttttatcatcatcctatcactttatcagtgactagagaagatcaaaaatgttgtatgttagctactcgtgccatgcaagtagactatatagatgtatcatgtatggattgcaactaagattgagggtaccggagccgcgtcatggagcaagttcctatctgtagatttagctaatctctacaagcctttttgctttgctagtgggatgaatttcttggtcgaccaggagaacaaagttttggtgtgtcgcggtaagcatggggtctgcaacgtttttttacacgttgtgggagaagataaatgtatacaagtggatcatgatgaggaagaatctcaatggtcacttcttaatcagttatgttccaacgttggttcaaatc

SEQ ID NO: 166090 - DNA, 648 bp, Arabidopsis thaliana landsberg
ctgcggaactccattcaggagaggtcttgaatctccctcagcctggaaatctccattttacataaactttttcttgttcagcccaaggtttgacacagatttaactatcgaggtacttgataatgccttaagatccttgtatcctatattcaacatttttacttcatgggtgcataatttcaaattcttttaatatatagacatgttatccttaggcaacttaattgtatttattttttcaggacatgggctacattttcagtcctggggagagaagctacgagagcataggagtgatgacacagataaatgaacatacaagtgcatttgcagcttttgcagatgcaatggaggtttcaatttcacctactaatgatgatgcgaggcagaagaaggaattggataaagagaataatgatcctctactggtatatatacatactctacaaatcattcactctctaagtagacggttttgagattatagttctagaaacaaagaaaaatgttttatgctccattgattttgtgttttgaacatttctcaatctataggcggagcgtcgagtgctggacttcaacgattgcgagtctccaatcaaagcaacagaagaagtctcatcctacctcttgaagggatgtaggtaa

SEQ ID NO: 166091 - DNA, 1391 bp, Arabidopsis thaliana landsberg
  unsure (1)..(1391): unsure at all n locations
atggacttagggtacgcggaaaaagaagagaaagtgtaacaaacttaaaaattgacggctatgatcaagtcttaaaaaagcttaagtacttaatataagattgcttggaaatatggtggctggagagttcgtcaccatggtgataatgactaatgagattgaaagcacgaaatcataatcatattttgttatctattttgttgttaattttagtggattgtgtgtgttaatgtatttctgacgaaaatattcgttttagtatactagcctgacttttaacttaaagctatggttcagtttttctataaaacttgtattttcttcattcgatcttcccacaccacacattattatatttctcaaacgaaatttctctcttcaaacaagaaatactaaaagactgctcgatctcttcaaaatgtatctaaacaaacttccctcttccattcttttctcaatagtttgtgctatcactatgattcctttcacaatttaattatattcttcctatcattccattaactcattcttgcaatgttttttttttgaaaatgtagctagcaaaatattttcttccattttgtcgtaactcatatatagtttcagctatcagatcacatttctttatttttcttgttatcatctcatattttggagggatttttgagatgcatctttttccatttcttatttgttagttcttatatatagttaatgctgtcatctcactcgtctcaaaattgtttctcttgcagggattcatggggaagtttgcctgcagatctcctactaaaatctacagatttgcttaaccttaactttgacgaaggtaggaaactaagaagcatcaacgctcattggaggaaaacgattccttctttccgtgaaggaggtttcaaagaggaaaggccttggttgttgtaccgtgaaaggggatccggacaggcccgtttctacgaccctgtgagagagagggtacacaataggaggcaagaccaaaatcttgaaggggcaagattcttgggatcaacattaggttgggttgttatgtccgactccatggacgtaaacctacgcggagaccaccaaactttcctatacaacccnnnnnnnnnnnnnnnnnncgaactaccccctctcaccattggaaacccatatgtcaagggtatgctccgttatggtgtgctcaccggagatccacgtgaagacagcacttatgcttgcctcctaatagataacgttcacatacttaatcgcttgcatcctaggctacatagtaaaatttattatgtagccagaacgaacggagcatgggctaagaattggtcagtgacttctatccatatcacattaactcgaatgagatttataaagttcatctccccatgttc

SEQ ID NO: 166092 - DNA, 957 bp, Arabidopsis thaliana landsberg
atgaaaaaagaaaaacaagcgattgcatcacaaagaaatagaagaagagtaataaaaaatagaggaaacgggaagcgattgattgcatcattatcacaacgaaagagaagaagaatacctagaggaagaggaaacgagaaggcagtgtttgcaccatcatcactaccaaacgatgttgtagaagaaatcttcttacgacttccggtgacagcaataatccaactaaagtctctctcaaaacaatggagatcgacgatcgagtctcgcagttttgaagagagacacttgaagatcgtcgagcgatcacgcgtggattttccacaggtcatggtcatgtctgaagaatattccttgaaaggaagtaaaggtaatcagcctcgtccagatacagacattggttttagtacaatctgtttggaatcggcttctattctgtcctccactcttatcactttccctcaaggatttcaacaccggatctatgcttctgaaagctgtgacggacttttctgcatccattccctaaaaacacaagccatatatgtagttaacccggccactcggtggtttcgacaacttcctccggctaggtttcagattttgatgcaaaagttataccccactcaagacacttggattgacataaaaccagtagtctgttatacagcattcgtgaaggtcaatgattacaaattagtgtggttgtataattctgatgcctcgaatccaaacctgggagttacaaagtgcgaggtttttgattttagggcaaacgcttggaggtacttgacttgcactccaagctatcggatattccctgaccaagtaccagcagctacaaacgggtctatttattggttcacggaaccatataatggcgaaataaaagtggtaggtgtcgatactcacactgaaacgtttcgtgtgctacctaagattaatccggccattgctagt

SEQ ID NO: 166093 - DNA, 516 bp, Arabidopsis thaliana landsberg
tccacaagtttttcctcagaaactaatcaagacttctttgtcaagcaaacgtctgatttttccgtgtattctgcgtttcagaagcaagaatccaactctgtttcactcaacaattcgctctcttccatgatccctacgcaattcaacatcgacattgatggatctgtctcaaatgcgggttttgagacacaagtatgcgtgaaaccctcgattattctttttcctcctccaaacaacacttcaagcactatctctgaacaagatcatgtaaaagtgtcagagcctaattgggaatcacactgtggaaccacaagcaacctcaacaatcccgttatgggacaaatgaaatggtccgacgagtacctaaacgaatcgttattctctacccaagtttacgtgaaatcagagacggatttcaactccaacattgcctttccttggagccaaagccaagcttgtgacgtgttccccaaggatcttcagagaatggccgtctcttttggtcagtccctttag

SEQ ID NO: 166094 - DNA, 1829 bp, Arabidopsis thaliana landsberg
ccgtctagcaaaatctgcaagatggaaaccttcaacttgttcgccaattgttcgacgcaatgcctaaaggaactactgttctttggaacactatcatcatcgggtttatttgtaataatctaccacacgaagctcttcttttctattcccggatgaaaaagacggcacctttcactaattgtgatgcttatacttactcttctacactcaaggcgtgtgctgagactaagaatttgaaagctggtaaagctgtgcattgtcatttgatccgttgtttacagaattcaagcagagttgtgcataattctttgatgaatatgtatgtttcttgtttgaatgctcctgattgctttgagtatgatgttgtgcgtaaagttttcgataatatgcgtaggaagaatgttgtcgcttggaatactttgatttcttggtatgggaaaacagggagaaatgctgaagcttgtaggcaatttgggataatgatgagaatggaggtaaaaccgagcccggttagctttgttaatgtttttcctgcggtgtcgatttcgagaagcattaagaaagctaacgttttttatggtttgatgcttaaattgggagatgaatatgtgaaggacttgtttgtggttagttcggctatttctatgtatgctgagcttggtgatattgagtcatcaaggagagtgtttgattcttgtgttgagagaaacatcgaggtttggaatacaatgataggtgtttatgttcagaatgattgtctggttgaaagtattgagctttttcttgaagcgataggatcgaaagagattgtgtctgatgaagtaacgtacctcttggcagcgagtgctgtttcagcgttgcagcaagtagaactaggcaggcagtttcatggttttgtgagcaagaactttcgagagctaccgattgtgattgttaactcgttgatggtgatgtactcaaggtgtggttctgtgcacaagtcatttggagtctttctttccatgcgagagagagatgttgtatcgtggaacactatgatctctgcatttgtccaaaatggcttagatgatgaaggattgatgctggtttacgagatgcagaagcaagggtttaagattgattacataactgtgacagctttgctttcggctgcatcaaatcttagaaacaaggagatcgggaagcagactcacgctttccttatcaggcaagggattcagttcgagggaatgaacagttaccttatcgacatgtattctaagtcaggtctaattaggatatcacagaagctttttgaaggaagtggttatgctgaaagagatcaggctacttggaattctatgatttccgggtacacgcagaatggacacacagagaaaacgtttctagtgttcaggaagatgttagaacagaatatacgacccaatgcggtaactgtggcatcaattctccctgcttgtagccaaataggtagtgttgacttgggtaaacagctccatggtttctctatcaggcaatacttggatcagaacgtatttgtggcttctgcgttagtagatatgtattcaaaggcaggagcaataaagtatgcagaagacatgttttctcaaacgaaagagagaaattctgtgacatacaccacgatgatactggggtatggccaacatggaatgggcgagagagctatctcgctgtttctctcaatgcaagagtcgggaatcaaacccgatgctataacctttgttgcagtgttatcagcttgcagctattcaggtctaatagatgaaggtctcaaaatattcgaggaaatgagagaagtttatacatca

SEQ ID NO: 166095 - DNA, 2220 bp, Arabidopsis thaliana landsberg
ctccccttataaaatataatgagagattgagacgattttcagatagtgtataggggtaggaatgtttccaatgaccccattattatacattatttagaatgatcaattacaaaggttggaaaaaataccgatggtgtcgatcctgtatgcgagttcccctttgtttactctcgaaaatgaataagtctgtaggagagaaagaacaccgaaaaagaaaaaaatatataaagaaaggtcaatttatcaaggtataatacaggaatgagtctagaaggatcttgaatgttagcttgtttgatgagacccaacgatgaaagccttgtggaacttaggtatggaatctagaatattgtgtaagcttgcagagaagtacatgttggttaggatttgattagacttgttaggcatatggacttagtttggatgatcatggcaataggctagagaatgttgggagttcctttgttttcaaaacctcttccacgggttcggcttttgtgttttgcttgagggcaagcaaaagctaagtctgggggagttgatataacccaattttcagtgattttatctatgttttaagtataggattttgagtctttatgttatttctcgagtctttttagtgtcttttcaggtactctatgcagtgggacaacaatggagataaagagacattttggagcaagagctaaggaaaaggaagctaaggacgatttttagatccaggaatcagcgaggagtatcaatcgacacactcttggtgtcgatcgacaccagtttcggctcaggaaaagtcctagacgctttcgagtttatagaagaggaaatttggagagacagaagacagtggagtcaggccagacgaaatattggggtatttggagttctgtgcgtatgatgtagattatcggcttccaatcgagcatctagagatgatgtatggatttccaagctgaaaggacacaagtcatcgttttgacaagaaagagctttagtcattctgggccacgcttgggtctaaacatggattttccttctctagacccaaaagcaacgaaataaggagtccgatggttagatactttcataggtcttttgccaatggagagttagagttgatagagacagcgctgcaggagttgctttgtttagcatcagatggtacagttctagctagagatcagacagacgcttcaatctcattctacctaatcgaacatttgctgaattacagaggatgggctaagggacttaagaaaccaggaagaatggttgtgggaggagttttgaccccaattttgagagcatgcaatgtacctatgcattcaaaaccgattcctccgagatggattgatatgcagcatcttatcaattccaagagtttttggtcgcagtagaagaatggcctatataaatataggttcggtcaccatacaacaggactatctattttcgtcctcccaaatcccgcttccacttcgatcagatattgtggcaacatttagttttgcccaccagtggagaacctctatacttcaggtgatgaagttgtcccgatggaaggagtgaacgatgatgaggctccaattcatcattccgataatgaggcagaacctatggacgagtcttacgcaacacaacagttttactttgaggagtactccgcaccaaggcaaagtaaagactcaaaggaaattcacaagcaccttggctttctccaaagctggtgtaaacttcaagacaaggctctcgcaacactcaacaagaagtttaacgctctccagctcaagttcaccttttcttcttctacgacggcgatgccaacagacatgcctttcaggagaagcggatccactcgacatgaacctatgcaatatgatcagccttcgccaccaagacagtcttcatatgagctgagagaacaccatgctgcaccttcaccaccaaggcaatcatcttttgaacctagggagaatgagaagaggagtaagttaaggaagcgtagaaggacaaggaaatcggatactggggcaagccactctaccgcaccacttgaggagccactcgatcaacaacccgagcaaagggtagagcatccaactaattaaagtccaacacaatccactccctggagctatacaaaggagagcatggatgaccttgtctccgcctacttcacctgacaactgaggtaacaccacctcgaccattgtatttaac

SEQ ID NO: 166096 - DNA, 2839 bp, Arabidopsis thaliana landsberg
atattaaaggagaagtccagtttaagcatgtgaagttcatgtacccatcaagacccgagacaccaatctttgatgatttatgtctaagaatctcatctggtaaatctgttgctctggtgggtggaagcggatcaggaaaatcaactgtgatatcgcttttacaaagattttatgaccccatcgtaggagagattcttatcgatggtgtgtctattaaaaagttgcaagtgaaatgtttgagatcacaaatgggtctagttagccaagagccagcactcttcgccacatcgatagaggagaatatattatttggtaaagaggacgcatccatggatgaagtagtggaagctgcaaagtcctcaaatgctcatgatttcatttctcagttccctcttggttacaaaactcaggttagattctaacttttaaaacattgattattgtttgattttagtttgagtcaaaaatgtatattttgtttttcttatttacaaaaaaaggttggggagaggggagtgcaaatgtcagggggtcagaagcagaggatttcaattgcacgtgcgataatcaaatcaccgacacttctactgctagacgaggcaacaagcgcattagattcagaatccgaaagagtagtccaagaagccttagacaatgccactattggtcgtacaactattgttattgctcaccgcctctctactattcgtaatgttgatgttatatgtgtattcaaaaatggtcagattgtagaaactggatcacacgaagagctcatggagaatgtagatggtcaatacacttctctagtccgcttacaaatcatggaaaatgaagaatcaaatgataacgttagcgtaagtatgcgagagggtcaattctcaaatttcaacaaagacgtgaagtatagttcaagactttctattcaaagtcggtcttccgttttcgcaacttcaagcattgatacaagtcttgctggttcaattccaaaggataagaagccatcttttaagagattgatggcgatgaataaaccagagtggaaacatgcattgtatggttgcttaagtgcagtcttgtatggagccttacacccaatttatgcatatgcttcaggatcaatggtgtcagtgtattttctaacgagtcatgatgagatgaaggagaaaacaaggatctatgtgttgcttttcgttggtctagctgttttatgtttcttgatcagtatcattcaacaatatagttttgcttacatgggtgaatacctaacgaaacgtatacgagaaaatattctctcaaagctattgacctttgaggtaagctggttcgatgaagacgagaactcgagtggatcaatttgctctagactagccaaagacgcaaacgtggtatgtctttttgtcttactaatttaaaatctacaaatcaacctttttacgagtgatcccataatgttttgttatgataggtgagatcgcttgttggtgaacgagtgtcgttgttggtacaaactatatcagcagtgagtatagcttgcacacttggtttggccatttcttgggaattatccattgtgatgatagcaatacaaccagtggttgttggatgcttctacactcaacgcattgtactcaaaagcatatcgaaaaaagccattaaagcacaagatgagagcagcaaactagcggcagaagctgtatccaacatccgaaccataacagcattttcgtcacaagaacggatcctaaaattactcaaaatggttcaagaaggaccacaaagagaaaatatccgtcaatcgtggttagcagggattgtgctagcaacttctagaagtctcatgacaaacacatcagctttgaattactgggacggtgctagacttattattgatggaaagatcacgtcaaaagcattctttgagttgtttaaactctttgtgagtacgggtcgggttattgcggacgcgggagcaatgacgatggatctagccaagggctcggatgcggtcggatcagtatttgcggtgttagatcgttacacaaacattgaaccggagaaaccggatggtttcgtcccacaaaacataaagggacaaataaagtttgtcaatgtggactttgcgtacccaacacgccctgatgtgattatatttaagaacttctccattgatattgacgagggaaagtcgacagcgatagtgggtccaagcgggtcaggtaaatcaactataatcgggttaatcgaacggttttatgacccgttaaagggtatggtaaagatcgatggccgtgatataaagtcttatcatttgagatcacttcgtcaacacatagctttggttagccaagagccaatattatttgctgggacaatccgagagaacatcatgtatggaggagcatctgacaagattgacgagtcagagattatcgaggcggccaaggcagccaacgctcatgatttcatagtaacattatcggacggctatgatacgtactgtggagacagaggagtacaactatctggtggtcaaaaacagaggatcgcgattgctagagcggttttgaaaaacccgtcagtgttgcttctagacgaagcgacaagcgctttggacagccagtcggaacgtgtggtgcaagatgctctcgagcgtgttatggtagggaggacgagtgtggtgatcgcacataggctgagcacaattcagaattgtgatgcaattgctgttttagacaaaggcaaactcgtggaacgtgggactcactcttcattgttgtcaaaaggtcctacaggtatttatttctcattggtgagtcttcagacaacttctggttaa

SEQ ID NO: 166097 - DNA, 1877 bp, Arabidopsis thaliana landsberg
cttagatgcaatgagtgtggtgacaaatatctcagctattaagaaatttccatttgtttgtcgccaaggtgaaaccgactatgaatcaagatatgtctcattcgaacttttggacaatatgtaagttgtagtgtttttaagtaagtttagtaatgcattgcttagtctaatattagcttaataatgtgtgagtagatgtgtcatctgtctgaaaaattagcttaataatgcattgcttagttatattggttaggggagagaaaatgaaatgctatgctgttggaagatgctgtgaactttttgttataaatttctcaaaatgtatcagttcagcctcttataactatcagcccattgtagccatagtgagtttttggagaattgctgagattgagggttagtttttttcaatactattgtaatcctatttacttatgatttttatttttattatataactttaaataaaaattttgtaacaggtgagaatgttttgatgagtgaatttggatgttcaagaatttacatcaatccaaccactttccctgagatagatattcgaagttacatgtaagactttaaacattttttaattatattaattaaccataacatcaattaatcaatacaatttttttatttttctcttttacagccgcagtttcaaagattatgatgaagttccagagaaccaaaggatggaagtgattgaaaatatttaggagtttgacctggcagctcttattcttctttaaattatgttttgaacttcttttaagtttctccaaactttgtcattgcaagttgttttttttgttaaactttgcttatgttttgaacctatttaattattatattcccgttggatttttctctatcttactttttgttaaactcctaacaaagtttacaaatatgacataaagaaactccaaacaaactcctatcaaagtttgcaacgattacataaaagtatagttatagttatacttatttctgtgaaactactatgcttatgatttaatattttcgaccatgtttagcatagatataattattgatgattatcttttacatttaaaaaaataattgtttgggtaccaagaataaaacattaaaaactttgtgacaaatcattcttggaaacattcaggattgataagtgtgtattttgcatgttttaagcatccatttgtcatcactttagcatcatatcatcactgttttataacatttcacatcatttgtcatcactttacatgtttaggatagttttgcatgcatgttgcatatttgcgttgatttcaggtgatttggagctgttgacgagctatctggaagaagcggacataatcatgacaaaccactcgaccagaggtcgagtaggagcttcaagatctcaagagaccactcgacccccaggtcgagtagaggacatcaccacttcacttcaccactcgaccacgaggtcgggtgccctcatctccatcactcgatcacatcactcgaccatgaggtcgagtgtcttcacctccatcattagacaatcactcgacctcgtcactcaacctggaagtcgagtatctcctgacaaacactcgatcacttcactcgaccacgaggtcgagtgtcttcaccttcattgccagaccactactcgacctcattgctctacttggaagtcgagtatcaccatcacaccactcgactacatactcgatgataagcttcagagccttcttcattccgcactcaaccagacactcgagcacaggaaaggaaagaagactccagctactcactcgacctcccactcgaccacatgggtcgagtacagttctttatccgtcccaatacttcgtcgttttgagtattag

SEQ ID NO: 166098 - DNA, 689 bp, Arabidopsis thaliana landsberg
  unsure (1)..(689): unsure at all n locations
atatgatataattcattatgatataggaagatctagnaaagtttagagactgtagtatacccaagatgattggtgcgtagcaatgcaatagtgtgttaaggaacaaccagatgttacttccaggttccatctagtatggattggggtgcgtaatcgtccggttaattattacannaacaaatatatcatagaagttgcggccggtgttggaatagtgataaaatgtccgtttcatgcagaaaaatcagagagtcaagcctatatgcgtgttcgagttttgtttgatgtctctcaaggtttgcggaattcaaacaaggtttagctaccaaacggatcgatagttaagattgaaatcgattatgaaagaatccgaaagagatggtttcaatgtcagcagctaactcatagcaaagcgagttgtctttctattcctttacgccaaggctgatactatgatggatggcgatcgggggattgctctacagtctacaagaatacaagcgaataagcaaatctgcttctgccagataaataatcaaagagaagtgccgttgtcttcccataaaatgatggcggatgctttcaaagccaatttacatatcgtctccttacctaaggaaaaccctaactcgatggctgctttaccagatgatatggatcaaattagacctaagcactctctcaaataa

SEQ ID NO: 166099 - DNA, 905 bp, Arabidopsis thaliana landsberg
ctccaaagccgccagcctccggtatgtcatttccagattcacactgtacaattctacaccagtgtgtataccatggcaaagcttcaggtcctatcagacttcatgccctcatcccaggttctctcaagatgcaggtatgatgcaccttggcaagaggtgtccctcccaacatctgtttgcttattgagcccgcttccaataggtgcttcgtcaccatagtaacttcctcaccaagctcgttcaagacgcatgccagctggtagaatacttggcacagtgagtcgatagatacacttgtccttaaaatagcgtcatccgcagcagctgttattgttatgagaagctccacagggatatgagagctatgaatgacaagctggtcaagttacttcctgtacaatatgagcacgtccattttctctatgatgatgagacgctccaagtccaggatggggagactctccaatcagaagaagttagctatttgcaaaatcagggaggttacaacaaaggtttcaacaacttcaagcagaaccatctgaatctgtcttacagaagtacaaatgttgcaaatgttccatacacccaaggacaagggtatgttcctaaacagcagtatcagggcagctatcaaccgcaacttccatcacctgggttcacacagcaacaaaatcaacaaccttcatcgactcctgactcagacttgaagaacatgctacaacagattctccagggacaagcaacatgagcaatggatttgtccaaaaggatggcagaaattcatgacaaggtttactgcagttacaatgatatcaatataaaggatgaagcactgacatctaagatccgattcatagaaggccaaacttggtcgacctctacacccaaaattacaggaccttcag

SEQ ID NO: 166100 - DNA, 418 bp, Arabidopsis thaliana landsberg
acagatttacaaacacttcatcaaaagctgtaacgtgagtgaagatttcgagatgcgagtggtatgcacgcgcgacgtgaacgtgataagtggattaccggcgaatacgtctcgagagagattagatctgttggacgatgatcggagagtgactgggtttagtataaccggtggtgaacataggctgaggaattataaatcggttacgacggttcatagatttgcgaaagaagaagaagaagaaaggatctggaccgttgttttggaatcttatgttgttgatgtaccggaaggtaattcggaggaagatacgagattgtttgctgatacggttattagattgaatcttcagaaacttgcttcgatcactgaagctatgaatcggaacaacaacaacaacaactcttctcaggttagg

SEQ ID NO: 166101 - DNA, 693 bp, Arabidopsis thaliana landsberg
cttctcgaagcacgactcccatcatttcgacgatcaaaaacgccctgccatattggatttatatcattgattgtgaagtggatgaggtctatctttggaagctcgagcatcatccacccacaccattgttctcctctactctaacttggctcgctttgcacccatctacctgttcggttctgtggcataaatctatatggtttaaggaccatattccaaagcatgcgttcattaattgggttgtggcttggaacagggcttcacactagggaccgaatgcggagttggagaatttctattcccacggattgtttcctttgctctggaagttcggagtctagagatcacctcttctttgagtgtgactttagtctggcggtctggagtcacttcaggaatagaacaagattatctcctccggtccccttcatggcctgcctcttatggattaattcggcttcgtgtgatgctaatctctgtctcatcatcaagctagtgttccaagcctctatttatctcttatggaaagaacgcaatcgtcggatccattctcatgctccccgtacctctgctttgatcatcgaggaacttaaggttattctatggtcaaagcttgatcccatttctcggcgtagtgaatttgattctccaagatcctctctgctctctacttggtttcgtttcttcagctaa

SEQ ID NO: 166102 - DNA, 3031 bp, Arabidopsis thaliana landsberg; identical to SEQ ID NO: 1907

SEQ ID NO: 166103 - DNA, 3785 bp, Arabidopsis thaliana landsberg
tcgccggaacaatatgcgatttagttttggtcgacaatcgtctttagatccgattcgtcggagtcctgatggttctaacggtccgcagcttgctgtaccggataatctcgacgctactatgcagcttctatttgtggcttgtagaggtgatgttgaaggtgttcaggatctgcttgatgaaggtattgatgttaatagtatcgatcttgatggtcgtacggctcttcatatcgctgcttgtgaaggtcatgtcgatgttgtcaagcttcttcttactaggaaggctaatattgatgctcgtgatcgttggggaagcacggtaatgtgataaatttcaattgttgtctcttattggttaggttttgtgcttttggttttgaaattatgtttgtgttgtgtggataggcagctgctgatgctaagtattatggtaacatggatgttttcaacattttgaaagcccgtggagctaaagttccggtatgttgctgcatttttcattgattcaagctctgttcttttcatatcttaatatgtttatagttacattttcttcttggttttagaaaaccaaaaggacacccatggttgtggcgaatcctcgtgaagttcctgagtacgagttaaatccgcaggaacttcaagttcggaaagctgatggtatctcaaaggcaagatctctctttgctttactttcctgtaataatgtcttagtttccatttatagatttttaacaagatactacatcacttttccacttgccagggaatatatcaagtggctaaatggaatgggactaaggtttctgtaaagatacttgataaggatctctacaaggattctgacactatgtaagattactcttctcttcaatgagtaatatgtctatgttagctaacaggtcaagaaggagtttgaatttcttcttgagtgaagctgtagatcgttgaaatcatctttgttatggtcatagtgatgatgatatgagatgtaacattattaatcatagttcttatataatcttctatgttggaactgtgcttttttggtaatatcttctggaattctcatttcatctgtgttaatccatgtttagttttcatagattatcttagttctgcaatcttagcatctgaattttattatttacccacagaaatgccttcaaacacgaacttacactattcgagaaggtgcgtcatcctaatgctgtacaattttttggagctgttactcaaaatgtccccatgatgattgtgtctgagtatcatcctaaagtaaccttctccctcttttacactttaatttttttccctcattaagcaatttttggatgctaggaactaattttgtctactcgatggtaacttgcatggtgaccttgggatttaggatttatcaagcattgaagtgtggcttgcttcaacaattgctttgtagtggtattgtatgaataagtatttatgttttgcaggctttattcaaagcaagattcgaacaagcgcttgaatctcataagctgaacataaagaaaacagaatagcagctacggagaatgggtgttagctctgaagatccatgtatcatttatgtccatgttacaatggctaaaaaacatatatcatgtatcatttatgtccatgtttaaacctcttaaccgatatatcattctcttctttttttttggttaatacatattgagtttttagttgtaaacttataacacaaagaaaaaaaaaaaaatcagtttcaaatttaaataattattagtaaaattatatatttttcattattagtaaaattaactatatattttttttgaataacataaaattaattatttgtaatcaaaatattatctctaccacttgacaaacatatattataatatatagtactatctaaaattaaaatataaaattccatccaatcaataaatacacatccaaaaaatatactcaaatactacattcaataaatctaacatttaaattgtttgctataaaacttaacaacacatatatattataataaatttttattaaaaatttgacaaaaccataatattaacaaactaaacaaatttactcgataatacaattaaaatttcatggtactaaaccataatattatctttcaaaaatctaaaattttgtatttgtttataaaaacataagacccgggcagagcatgggttatcaatctagttaatgattaattcctaattaataaaattcgatatgcaatcctaactaaccatatctataatcacttgattcgaaaattattatagctttaatgatattttaccaaactttaatctactcttatcaattaaattcgatttctcgagagaaaatgagtggcgattctagggtttccgagagacttttgcaagatgaagctatgctggatgttggtgagaagagtcgtccgccagatgaccctccgggggaccctccagatgcggctggtgtgtgggtcaggaaagtggtggggagtggacctggtggtaggttgaatccggtggagattatggatgatgcgtttgtgactgcgagaatggtactggaattcccgaatggggaggacggtgaaccggtgattaccattggcagtgaagttttggaggtaatgaatactttatggaagaattgtatgattgtgaaagtgttggggaggagtttgtcgattgcggtgctaagtaggaggctgagggagatgtggaaaccaaagggggcgatgcatgttttggatcttcctcgaaatttcttcatgatccggtttgagtttgaagatgagtatctagcggctttgacaggaggaccatggagggcttttggtagctaccttatggtccaagcatggtctccggattttgatcccttgaggaatgatattgtaacaacgccggtgtgggtgaggttaacaaatataccactaaatctgtattataaatcagttttgatgggtattgcaaagggtcttgggaagccgatcaaggttgatttaaccacgctgcatttcgatagagcacgttttgccaggatatgtgtggaggtcaacctcgccaaaccgttgaaggggacaattatgataaatggagagaggtattttgtggcgtatgagggtttgtcaaacatttgttctttttgtggactgtatggtcatctggttcattcgtgtccacgtggtgcagtagagaggacagtgaacttaacaccaactacagttgcagttagaacaacagagacggtgacaccccgagagaatgggagttcccaggatgaggatgggtttacaccggtgagacggtcggggaagagagttgagaatccgactaggcgagctgggaaggcggcggaaaaagctagtgcggttatggaaaggaatcttaaagatattccaattactgatacagagaatatcatgacacctaacagatttgtaggattggaggaggattcagttgctgataatctaagggaaggtgccatgattacgggggagaataaagaaaatgaaggtgggagtaatcaggctcgaattggaaagaagacatgtcaattgaggcaagttccgggtaagagtgattggcgcaaaaacacaggggagacgagtacagggtttaaatcgaaacgggctgaaacaaataggcccaatgagttattgggcttcagagcaaaacagagtaaacaagtgaggcctactcgtgggcttgtcgagttctgggaaaagaatgagaggcgaaacaggggcagtgggacgacctggtggaatattc

SEQ ID NO: 166104 - DNA, 291 bp, Arabidopsis thaliana landsberg
agtgggttgtattaacatgcaacccaatgactagaatatgtacatcatggtctacttggtgctattgttgttgactacacgccttcaatcctaaagtgcctaatttcataggttattgagtttcttagaaacacaagcaatgataagaaaatgaagaggattactccaatgcattgatagttggtgatcgcaggagataaggatcttgatccattcatcaaaggaacaattggtggataaagagtagtgtctcacatcctcatgtctctcatcaacaaaaccacgaagaag

SEQ ID NO: 166105 - DNA, 1507 bp, Arabidopsis thaliana landsberg
  unsure (1)..(1507): unsure at all n locations
tgaagaatgtgaaaagactcccgttgaggtaaaacaccctcttcatccaaaacattttcttcagcttgtctcgcaaaagtcgtcgagaattcaaaccagaaagtgtttctgttgtgaggaggatctcgaaaagatattctactattgctcggattgtgattatgctatgaatatagtttgtgcggaaaaaccaccagtcttgtatatagaccatccgaattggcatcagcatacacttgctctctttcctagacaagctttcttaacttgcaatgtgtgcgccttggccgatgcaagctctcctatctatatgtgtcccccttgtgattttgtggtccatctaagatgtatcaacttaccacgtgtcataaggatatctcgccacccccatcgcatctcttttacccctttgttcgaccaacgagatagatcttgtggtgtttgtcgcgaaactatcgacaacgattttgggggttattcttgcatcaaggatgattgttcgtacggagcacattcaagatgtgccacacaaagaaatgtgtgggatggcatagagcttgaaggggtgttagaagagattgaagaagaagttgagccgtttgtgacgataagtgatggaatcatacaacattttagtcatcaacaacatcatttgagacttgatgagaacaaagacagagattacgatgacagtaagcagtgtgatgcatgcatcacaccaatctattttggtaacctctactcttgtatgcaatgcagcttcattcttcacgaagaatgtgcgaatttatctcgcaaaatacatcacccgatacatccacatatgctctccctagtgggaggatatcacgatgttagaaagtatgaggataagtgttcagcttgtccttggtcgtgcatagcaggtttcttctatgtgtgtgataaagaaggatgttattttaagattcatgtgcagtgcgctacaatttctgagccattagtccatgaaagtcatatggatcctttgttcttaacatcgaaaccaggagaggaaagaagatgttgtgtttgtttagagttaggacattgttccacaaatgaannnnnnnnnnnnnnnnnnnnngactttgctttgtgtttcaagtgtgctactttacctcataaggtgaggtataagcatgataagcatatgcttactctttcttatggagaggaaacaagtaccataccaaattggtgtgaagtttgcgagaaaaaaataaaatcaaaggagcggttttatatgtgtgatgagtattgttgtgtcacccttcacatagaatgtatgcttggagtggacttatatatgaagcctggttcattttggttctaccgcagtagcaaggtaggcgttctacccaacaatcatcatatgtcaagacctatttgctcattttgtgagaagcgttgtcaacacaaaatagttttccaatgttttggattaatatcttgttcaacttcttgtattcgtgttaaggagtctaga

SEQ ID NO: 166106 - DNA, 355 bp, Arabidopsis thaliana landsberg
tcactaaatacgataatgaatactttcaaaaccccatttctcatcatcgttgcgattagctttctggttcttgcaaccaacgctcaaaacgctcaacaagactaccttaacactcacaacaccgcccgtgcgcaggttggagtagcgaatgttgtgtgggacacagtcgtagcggcctacgcaacaaactatgcgaatgctagaaaagtcgactgcagcctcacgccctcaactggaggatcttatggagaaaacctagccaatggaaataatgccttgttcacaggtgtagccgccgtgaatctttgggttaacgagaaaccttactacaactacactgccaatgcatgcatag

SEQ ID NO: 166107 - DNA, 501 bp, Arabidopsis thaliana landsberg
caaaaaaaattacaacgttgatcgaatttggttgagttttaatctatttatggaattttgcagctacatgaattcaggacgagcaacaatgttttagagccaaactcatcgtggccatttcaaggcaagtttttttctattatattccttttttaaaagaagctttctttcaataataagcaaatgggttccacgtattactagtccttattgaaatttatatcaaaaataaataatttaagcagacctccaaatgtattacttgattgatggatgcataaactaatatatgtgtttgacaacataaatcctaatgaaatgtaactttaaaattatatagatttgaagtcagcgatggaggcatttggagaagttgaaagcagcaaagaaatggaaagagaatcaactaaacaaaacctgaagaagaaactctcttcaaaagcttctctattgtgtaattcatggtcaccaagattctcaagatcaagcaaagtccttgct

SEQ ID NO: 166108 - DNA, 709 bp, Arabidopsis thaliana landsberg
  unsure (1)..(709): unsure at all n locations
aaaaacttaaagagttcctggacattttcacagtgaatggctgcaggaaaagacatcattcattctgaaatgcttgaagaagaagtcaacaaaggtttacaactttggatcaatctttcctccaacgagaaaatgtaattaaacccacctgcaaattcgacattttggactctttttaaaccggaagttgactcttcattttcattttgacaggatagacccaaactaccaagaactgtcgcattcagacataccaaaagcagaacaaaacggtgttgaagtcaaagtcattgcaggagaatcaatgggaattcaatcacctgtttacacaagaacacctactatgttcctcgatttcactctccaaccaggagctcaaatccaccagaatgttccagaatcttggaacgcatttgcttacattctagagagcggtgaaggcggcggcgttttcagttcctcgaactcttcgcctattccagcacacagtgttgtggtgttcggaccagggaatgannnnnnnnnnnnnnnnnnnnnnnnnnnnnnnnnnnnnnnnnggtttgtgttgattgctggagaaccgattggtgaaccggtggttcaatacggtccgttcgtgatgaatactcaagctgagattgatatgaccattgaagattatcactatggtaagaatggcttcgaaatggccaagtattggaggtcacaa

SEQ ID NO: 166109 - DNA, 1070 bp, Arabidopsis thaliana landsberg
ctaatttgcaacgagccaactctgtgtgttcgtcttggtactctgcttggagacaatgcgtgaccaaaactaagatcccttggctgattctattccccaaaagcgaaaaaaacaattcattcacgctcctcaatcccgaggaaaaacacaaacgttacaaaacgcaagatcttggtgtggaatttgcgaagtgtgtttgtatagcaacctatggaagttggctccttatgcaagattcaaagtgtaatctaaacattttgaatccattcacccgcgagaggatcaaccttcctcctgtggagtcacaacgtggcaaggtaaaggttaaacgaatcatagatgatagatttcgcatttcacactatcacatcggaagcgagtccaaatatatgagtataggatcccctgtgttttggattgacgagaaaaccaaagattatatagttatttggggacttagagattggtgtgtggtttctgccaagaaagggtatacctcgtggaatcaaattcccaaaacttcaaattgtcgtgacatggtgtacaaggatcacaagctttacttcctaaccaagtctggtggtttcaaaatcttagatttttctggtgagattccacaacaaatcttcaaatgtggtacgtttctgaagaaaagtcctcctagtccttctcctagttggaaacgacagaatgcgtttggtcgctgtcgtcgtctaccaagtgattattggttttttttcgatccaaaacttgtagtaacagtaagaggagatgtcctaagggtcattatgaaacagcataggtctgaatacatatggcccttcgacgtctacaacatttattcatcatcagggaacttgatgatatatgaaaaagttgattctttgggagacgaggcaatgcttttggatctaggcatcactgtgccctccagtgaaattgatggactcaatggaaattccatctatttcagtggcattcatggacgtaggaagacaaatggtattttaatcttcgatctcgagacagagaagttggagaaactgcacaaatatgattgctcatccgtt

SEQ ID NO: 166110 - DNA, 507 bp, Arabidopsis thaliana landsberg
atcgttccgtttctccgccggttcgttatcgctcagactctccgccggctcaatttcgctctgtttctccgccggctcgttatctctctgactctccgctagttcgttatcgctccgtttctccaccagctcgttatctatctgtttctccaccagctcgttatcgctccgtttctccaccggctcgctctgatcctccggcgaatactctacagctatgcgttggtaatcgatgtatcatcattcagcttttttactgtaaccgcgtccctcatgtcctccgtaggtttctcggggatcgaaatcacaccttcgtgggtttttggaatagtcaagatgcgggaaagctaaagagatctagacatcggttggagattgcagagcttttggatttgaggaatcacgttgtagattcgagaggaaggggcttgaagggtcgttcgtttgaggtggttgttggagaatgtttgggttatagaggagtaaggctagagaaggcgataggca

SEQ ID NO: 166111 - DNA, 215 bp, Arabidopsis thaliana landsberg
cagaacctctcgctcttaaagatcttggtcacggaatcaagagtgattcaatctatttcgtcgacgacgaagatgtttggccagatcataaagatttgccagattataaagatcatgtatcgaattgcggtgtcttcgatattgccacaagtaagaccgaatggcctaagaagatctatttttccattaataaaactcagtggtttgtttgggag

SEQ ID NO: 166112 - DNA, 171 bp, Arabidopsis thaliana landsberg
tagggaaatagagcgagaccattgccaaaatttggggaatgggatgcgactaatcctggctcggctgaaggattcactgtcattttcaataaagctcgcgatgacaagaagacgatgaataccgctgccgcaggacctgagagtattgtttcacctccaagaaatgaagaa

SEQ ID NO: 166113 - DNA, 649 bp, Arabidopsis thaliana landsberg
atgaatccatatactaactttgtcggcttcatttgtcggcttcatggatattttagccagtcaacaagaaacccccatcattcatgagagtatttcaccaagtcttggaattaatgaatctgacgtccgtatcttcagcatacaaagaacatggaccaagtggtcagtgagagacactgctgtgctaatctttgtgtggctaaacacaagcaatgatgccattgttggtaataagcaacgaccaaatgccttatgaagcattgcagcttattttgcatatagtccctcagttggtagtctgaaaaagagagaaacactataaacaaaagtgggaaaagatcaacaagagtgtatgcaagtttgtgggatcccatgagtttgcaacaactcatatatggaataaatgataatgatctgatgaagtagcccatcaaatttacgagaatgattacaatgagaagttcaccatggagcatgcttaaagagagttaaggcatgattggaagtggtgtgcatcacagtcaactaaagagactggaatgtataagaagaatggctgacgatggtcctgcacattcttcaagctctactccagtaagccatggagaggctaaagcttcccaagcttgtccacctggtgtgaagcact

SEQ ID NO: 166114 - DNA, 1447 bp, Arabidopsis thaliana landsberg
gctgcaagatagcgatcggttcgaggtcagaagcaccacccgaacccacacatgtagcatggatgcaagaggagacttccacaagcaggtttcaacggctgtgattggaaagttgatgcgtactaaatatattggagtaggccggggctcgcgctaatgagctgagaagaatgctacgcccagaattcagcctcaacgtttcctattggaaagcatgtcgggcacgggaaattgccatggacaatgcattggggtccgctatggggagttacgctttaatccaaccttacttcaagcgtcttttaaagacaaatccaaattctctggtggtaatggagaccgaaaaagataactctggcgtagagaggttcaagtacttgttctttgcgcttcatgcatgtgttcaagggtatgcttacatgaggaaagtcattgtaattgatggaatgcacctacgaggacaatatgcagggtgcttcattgcagctagtgcacaagacgcaaatttccaggtgttcccattgcatttggaatagtaaacatcgagaacgatgaggcgtggaattggttcattataagctataccggatcatcctgagttggtgtttgtgtctgacagacactcctttatttatgccaacatctgcaaggtaatagagtaacataaactttaccacatacaaatgaacttaacggaaaatctttttatctgctaaattaaacagtaacgcctttggtcattgtgcagctttgctcaatgtcatctcatgttgcttgcatcgtccatctgaaaaggaacattgaggtttacttttaatctgatcacctaagtgccttggtatcaagtgcagcaagagctcatcgcctaagtgacttcaacatgatatttgctaaaatttaggctacacatggaccgtgcgctgaatacctagcaggtattggattcgagcattggacaaagtcacattttgttgagaatagatataacgtcatgacaagtaatattgtggagtcgctaaataatgtgttaactatggctcgagattatccggtaatttccatattatagtcaatttgcacaccactcgtaacatggtttgcgcttaggaggcaagctgccaaaagtgaggataatatcctcctgcctaaagtgcacgatatcgtgatcgaaaattacgagaaaggagcaggatgtgccgtgctaaagattggggatgggctatatgaggttagagaaaagagaggctcagcatttgcagttaacctatgggagagaacatgtacgtgcagggagttccagctcctaactatcccttgctctcatgccatagtagcggctatagaagaaggaatctgcgtggacacgatggttggagtccatcacaaaaaccccgagcttagattgtcatacaaagcactgataatgccagtacccggcacggaaatc

SEQ ID NO: 166115 - DNA, 1136 bp, Arabidopsis thaliana landsberg
ttagtttcagacggaaagagagagtatagccatggaagtctcaaatcagaccagaaaacggaaagcaatcgacgccggacatggctcgcagccgacggcgtatcgaggctcagatggtgtagatctttctctccttgaagcacttgagaagtcttcgcataatgcagtagaagcgcttgatcttaaaaccctaaaaaagcttgtcctctccttcgagcggcgtcttagagacaacatagctgctcgtctcaagtatgtggagaatccagaaaagttcgctgactcagaggttgacctacacgacgatcttcagaagctcaaggtgctcgctggagctccggaactttacccggaccttgttgcttccaatacggttccttcgattgtcaatctcctctcccatgaaaactccgatatcgccaacgatgttgttcagcttcttcaggatctgactgacgaagatgccttagaggataacgacgagcctgcgcgtgtgttagtcgacgccttggttgaaaacaatgtgctcgagctcttggttcagaatatgaatcgtttgtctgaggctgaccctgacgaagctacggctatatacgcaactttgacggtgattgagaatttggtggaagtaaagccggctgttgctgaattggtgtgtgaaaggacgaagctattgcggtggcttctgacgaagattaaggtgagggaattcgaaggaatcaagcagtacgcgtctgagattcttgcaattctgctgcaaaacagtacggcgaatcagaaacggctaggtcagatgaatggtgtagacgctgtgcttgaaggtgtggcgatgtataagtcaaaggatcctaaaactcctgatgaggaagagatgttagagaatctgtttgattgtttgtgttgcctcttgatgccattggagaacaaggagaggtttgtgaatgcggaaggtgtagagctgatgattattatcatgaaacagaagaaatatgcttacgggtctgctattcgagctctagacttcgccatgaccaattatccaccagcatgtgagaggtttgtggatgttatgggactgaaaacagcatttgctgctttcatgggtaaggcaagtttttcaatcccgtttcttttta

SEQ ID NO: 166116 - DNA, 4543 bp, Arabidopsis thaliana landsberg
aaaaatccaaatttcgaaaagaattaaacttgtctaaaccgcagacaatccgagataccttgcaccgagcctcagattacgtatcccatgaagaagaaatggaactactatccaaaagacacgagccgcctaagcaaacgcctcatagcgataaatcccaacttaatgctccaaaccacaaaaagggctctcaaggcgggacattcgttcaccatgaaggtcgaaatttctccggagcccataattaccaagctgatacgccccgaggccgaggacgaggctacggtcgaggacgcggatgagaatcctacacttggacgaaggatcaacccgcaggaaacgagcaggaatactatgagttgcataagagttacgaccatcatacttccatatgtcgtagcctcggagcaaagttggcagcaaaattcctagccggagaaatcggtggaggcttaaccatcgaggacttagaagcggaaaagggtaaaaccgagcaggtcaacgctgtggccaatcctgagcagacagcccccgcggcaaaccccgaaggacccaaaagaggccggggtaatcgccaaacagacgacgatgagccagaagctgctcggggaaggattttcacaattttaggggattcggctttctgtcaagacacgacagcatcaatcaaggcatatcaaaggaaagccgacgcgaatcataactggacgcggccatttaatggaccaaatgacgaagtaacctttcacgaaagcgataccaacggtttagaccgtccacacaacgatcccttagtcattacactgaccatcggtgatttcaacgtcgaacgagtcctagtcgacacgggaagcacactggacatcattttccttacaactctgcgagaaatgaagatcgatatgacgcaaatcgtgccaactccccgacctgtgctcgggttctcagtgaaaccactatgactctcggaaccatcaaactaccagtccgagccaaagggtaacaaaaatcgtcgatttttctgttaccgaccaaccgaccgtgtataacacgattatcggcacctcatggctaaatcagttccgagctgttgcctcgacatatcacctatgcctgaaatttcccacaaacaacggcgtgaaacccatccggggaaaccagaaaaatgctcgtatctgcttcatggcagcgcacaagctcaggaaccccgtcagtgaatcgacggccgatgcgaatcataagaaggccaaacttggccgagccaaagaaaagtcaatctccgagcagttatagcaattaaagaccgaagaagctcgggaatctacgataccaactcccgatccggtcatctcaatttgccttgacgacaaaaagcccgagcgatgcgtagaaatgggcggagatctaggagaagaactaacagctgaactcaccattttcctcaaagaaaacgtcaatactttcgcctggtccccagaggatttgcccggagtaagtgttaacatcgtatcacacgagctcaacatcgatccaccttttaaacccatcaagtagaagaggagaaaattgggtcgggaacgagcagaagccgtaaaagccgaggtagaaaagttattgaaaatcggatccatcaccgaggcgaaataccccgactggatcgcaaacccagtcgtagtaaaaaagaaaaacgggaaatggagagtttgcgtagatttcacagacctaaacaaagcttgcccataggacagtttcccattaccacacatcgatcgcctcgtggaatcaacttctagaaacaagctactgtcgttcatggatgctttcgctggttacaaccagaacatgatgaaccccgaagatcaagaaaaaaccgctttttacacagagcaaggaagtttttgctacctatcaatgcttcgtcggcaaaattttttccttacagatcggaaagacaatggaggtctacattgacgacatgttggtgaaatccatggaagagaaagatcacgtgacccacctgcgcgaatgtttcaaacaactaaacctatacaacgtcaagctcaatcgtgcaaagtgtcgcttcggagtaagatccggcgagttcctcgggtacctggtcacacatcgcggcatcgaggcaaatccaaagcaaattgaggcattgttgggaatggcctcacctcagaacaagcgagaagtgcagcgcctaaccggaagagttgcggcccttaaccgtttcatctctcgatcaaccgacaaatgcttagccttttacgatgtgcttcggggaaacaaaaagttagaatggacgacccgatgtgaagaagctttttaggaactcaagaaatacctagcaactccacccatccttgccaaacccgtaatcggagaactactatacttgtatgttgccgtattagacactgcggtcagcggagtgttagtccgagaagacagaggccagcagaaaccgattttttacgtctcgcagaccttcaccagtgcggaacctcgctatccgcaaatggagaaacttgctttagcagtcgtaatgtcggctcggaagctacgaccttacttcgaattccattccatcgtagtaatgggatccatgccactccgcgccatcttacacagtcaaagccaatcaggacgtctagctaagtgggcaatcgagctcagtgaatacgacatcgaatatcggaacaaaacatgcgcaaaatcgcaggtcctagctgattttatcgtcgaattacccaccaaagaagctcgggaaaacccactcgacacaacttggctcctacatgtagacggctcgtcatcaaaacaaggctcgggtgtaggcatccgcctcacctcgccaacgggtgaaatcctcgagcagtcattcaggttaaacttcgaagctaccaataatgtggccgagtacgaagcacttgttgccggacttaatctagctcgggggttaaagattgaaaaaatccacgctttttgcgattctcagctcgtcgcgaatcaattcaacggggaatatacagctcgggacgaaaaaatggaagcctacctggttcatgttcaaaagttagtaaaacatttcgacgaattcaagttaacaaggattccacgaggagaaaattcatcggccgacgccctagctgctctggcctcaacctccgacccgaacctgagaagagtcatcccagtggaattcattgaaaaaccaagtattgagctcggcgaagaagaacacgtcctcccgatacaaatcagcacggatcaagatgacctagacgaatgcagcccaaagtggatggaacccatcataagctatatatccgaagggaaattgccctcggataaatggaaggctcgtaaactcaaagctcaggctgcacgtttcgtcttaatagggaaaaaactttacaagtggcgattatccggaccattgatgacctgcgtagaaggagaagcgacttgcaagatcatgaaggaaattcacggcggttcgtgcggaaaccactctgggggaagggctttagccgtcaaaataaaacgccacggattcttctggccaacgatggtcaaggattgcgaaaaaatttcaaaacgatgtgaaaaatgtcaaaggcatgcgccgacaatccatcaaccagccgagctcttgtcatcaatctcctcgccatatcccttcatgcgatggtcaatggatataatcggacctatgcatccctcgaagcaaaaaaagttagtcctcgttctaaccgactatttctctaaatggatagaagccaaatcttacgccagcataaaggacgctcaagtcgaaaacttcgtgtggaaacatatcttatgtcgccacggaataccgtatgagattgttacggataacggctcgcagtttatatctacccgtttccaaggcttttgtgataaatggggaattcgacttagcaaatcaacgccacgatatccccaagggaacggccaagccgaggccgcaaacaaaacgatcctcgacggcttaaagaaacggcttgatgctaaaaagggctcgtggtccgacgaactcgaaggcgtgctttggtcgcatcggacaactcctcgccgagccacaggagaaacccctttcgccttagtatacgggacagaatgcataattccggccgagatgatagttccaagcctacgacgaagcctatcccccgagaacactcctgataactctcaaaggctcctcgacgaactcgatctgattcataaacgaagagattcggccctggttcgaatacaaaattaccagaatgaaacggctcgtcattacaattcaaatgttcagcaacgaagattccacgaaggagatcgggtcctccgaaaagttttccagaacactgccgaaccgaacgctggaaaactcgggacgaactgggaaggaccgtacttaatttctaaagtcgtccgactaggagtgtatgagctagctgacttaagcggcaaagccgttccaagatcatggaacgcaatgcacctaaggaaatactacaac

SEQ ID NO: 166117 - DNA, 304 bp, Arabidopsis thaliana landsberg
atggatgaggcttataagaggcggtgtgactggtatcatcatggagaattggtgtctggtggtgaaagtgaaagcaaagtcagtcagtggaatgatgaagtagttgagttgtatcaggctgcagagtatttggacgaagagtttgatgctatggttcaattgggcgagattgcagaacgtgacggcaagaaagaagacgagttccttgcaaagcttgcagatgctgagacacctctatatacaagctgtgttaaccatagcaagctgtccgcgattgtgtctctgtttagactgaagaccaaaa

SEQ ID NO: 166118 - DNA, 402 bp, Arabidopsis thaliana landsberg
  unsure (1)..(402): unsure at all n locations
atgtcaaacgtgagttttcttgagttgcagtacaagctctccaagaacaagatgttgaggaagccttcaaggatgttctctagagatagacaatcctcagggctatcttcacctggaccaggaggcttctctcagccttctgtgaatgagatgagacgtgttttcagcaggtttgatttggataaagacgggaaaatctctcagactgagtacaaggtggtgctgagagcgctaggacaagagcgggcgatcgaggatgtgcctaagatctttaaggctgtggatctggacggtgatgggtttattgattttaggnnnnnnnnnnnnnnnnnnnnnagaagtggtgggattaggtcttcggatattcgaacatctttctggacttttgatttgaacggcgat

SEQ ID NO: 166119 - DNA, 213 bp, Arabidopsis thaliana landsberg
atgtacgtagtggatcttacctacctgaaaccgcttgacgccatcgaggcacacctggacgcgcatcgccaatacctcaacgaccaatatgccagcggcatattcattgcctcgggcccgaaaaacccgcgtgaaggcggggtgttcctggcgaggggaaaggtcatctgttccaaactccaaatcaatcatcatgttggtcccgttcaggct

SEQ ID NO: 166120 - DNA, 3500 bp, Arabidopsis thaliana landsberg
cacaagggtcaaaagaagatggaaaaacctccggaaatgacagagtgatctcagaagaagggtatgagactgagaaaataaaagagcttaaaaagaggtctgatacgcaagaagaaactatagagaggctagctcactctgttgaggaacttaggagtaagctgaatcagatggagaaggaagctcaacctaaaggcgggattaacactatcccgagaaaaaagtttacttcaagatggtctgaagagacagattaccctcaagaagagaaagaagcttattttgaagagaggaaaattgagtattctgccgaagacctctccagggaggacgctgagtatgatgatgatatcagagaggactatgcacaccctctctgtcattcattttcttcttgataagtgtgaggagtcaagctagagactttaaacaagctcacttgggaggaagtcccatgaatatccttgtaaataatttttactatcttgttatttttgatttgttttagttgtgtttgtggttctcaggaagaaaggaataacgtgaaggtagagtaaaaattcaaaacttttactctactgatggcctagagatcgagtacatttgtcgagtatgagcgatttttaaaaaacccgaaaaattttaaatcatcattttactcgaccaacaggagctacagagtcttaaagagagttcatcaaggttacagaagattgcgggatttcctgagattttcctagtgaagatagagtaatgattcagaacaaagagagagatgagggacccactgctgcagccatgtctcccacgctccccacaaggtgataacgaaatctccatgcttcttccctcatcactcgaccactccctatcctcttcccctctcaccaacacttgacatgcaaccaagaaatccccatcactccccacgcttataaattccaccactcgactctcattactctcaacactcgaccgcaacattcccttctctctacttaccaagctcactctctctcaaaccaagaaaccgacaccactcgacctcacgaatcatttgcctctcaccacctctcgctcatagccactcgaccaagctgccatctttccctcttctctcaagcccagccatcactcaacatcaccaccgttttcttctcttccgcgagctcaacatacttgaccacttaacgtcaccaccgtctcgagctaccactcgacctcgccatttccttcactcgatctctcccccgctggacactcatcaccatcaagctcaaaaccactcgacctctacactatagcaaccactcggccgctcgtctctctctttcgcagccaaagaatcatcacctcttctacttcactcgatcgcagcaccttaagcaccacagtcttctcaccgttcaccattcactcactctagaaattactcgatcgctccacctccaggccaccaagaaatcactcgactactaatccaccaaaccgtaaaaaaaaaaaaaaaaaaaattctcggttcactcgaccggtttactctgttggtttgtgtttttggttttgttaggactaacgtaataacgtttatctttgagttacatttgttttcaggtttcatcatgagtaactacagtggataatcatcaatggatcctgattataatgtggatggagctgagtcctggtccactagaccgagagagcaacatgtttactagagcttcagggatgaatttgaacgctctgctgcctgacgtaatcaaagaagagctgaaatcgctagaggaaagagggtgatatcgagtagatataggctgatttatgaggacatcgaaactgagtgttagccagagtcatggcgtaaggagaggaagctgctgaacaaacccgtcgaggttccagtggaggagtatatcagattctttgagatgaatgacttctggggaacgaggtatccgtgctattagactttagcccagctggggttactagagaacgtgcatcaaaaagtgtcatctgaacacactcatgtcttacccttacgctgctacatagaaaaagacaatcgagtttctttccacgacgcaagtgaagatgtatgagggactcacacactttgagctggataccatggggttaggctttttgacattctcagtggatgaacatcggtatcagctttcgatcaagaagttggaagaactgtttggtttccctagtggaaaggtaaacaaacccagatttgcagagaggagcttaaggatttgtgggccactattgggaacaatctaccgctaaactcggcgcgtccaagagcaaccaaatccggagtcctgtgatccgctactttcagcgctaggttgccaacgtcttttactccagggagtctacaggtaccgtacaaagggaagaagcatggagatttcgtggagatgatagatttcgcgcttactgggattctccaccgtacaaagggaaagaatgtcttgagaggcgatctcaacaacgcaccaccagtaatgtctctgttgatccacctgtgtgggtataggaagtgggcgttgacgaacggcaagaagaaggtgagaggagcactatgcgtgggtggcgttgtgacgccaattctggaagcttgtggagtaccgctcaaggaaccagggttagcaccgatgatgatggacttggatcatttacgccgatgtgaattcttggagtttgtcatggctggcgactttcaccgctacaggttcgagcattcatcgattagaatcgccaacattcttctcccctacattgacgctactaggattctcgagggcatgaacattgacttcaagtttgcgcttgaagatctttatttcgagggcagtccgccatctgaggagattagtcacaccgaagtagctacaacagaagatgttgatgagacagatgacatagatgaggcggagtttgacacgagcatgtatcatttcagtgagcatatacctccagcgagggaaagcaagagtttgagtgaagctcacaggaacaacagcaagctgcagaagtggtgcaagaaacaggataagttactcgccaagtgcctcagggctatcaagtttctgaaggacaagatcagctgctcctcttccactacaactattccgcaatgacagctccctcaggacatgccttcgaggagatatgacgcgcccgagccaagttggcgcaggcctgagcctagagagcagaagattctgcatgtccctgcgaggcattcatcattcgagcctcgtgaatctaggaggaataggagaacgacactcactcgatctagcagcaggagcagacgacttctgcagtctcgtagtttacgcgaccgcggtgctgtccgcagcagaagaagagaggtcgagtatcctcatagcggtgctggccgccacagagctgatgagatcgagtacccacctgctggagctgatacagaacatggcggctcgtctatggcctgtgagcaa

SEQ ID NO: 166121 - DNA, 178 bp, Arabidopsis thaliana landsberg
ccccaacaaataactactacttcaaatccaaaccatttacatactttaaaaaaaaaacctcttacgtatattccaaatcatttattcgataatcaaaataacctttccccctaacaaaatacctaataattacaacactcttataaataagcatcgaaatactctttatcaaaaaatt

SEQ ID NO: 166122 - DNA, 681 bp, Arabidopsis thaliana landsberg
atggagaagaaggctctcactactgctgaatcagttcgggttgtggaaaagcatccatgggttatcacctttccgaaccatgaaggcttgacttttctcttcgatccattggaacggaagaggtacacactgaatttacccgagttagttggaaccgatgtttgttactcgaaagacggatggttgcttatgcgaagatccagtttagtggacatgttcttcttcaacccgtatactagggagcttataaacttgccaaagtgtgagttgtcctttcaggctgttgctttctcttcggcccctacatcaggtacttgtgcggtaatagcgtttagaccttttacgagatttatcattcgtataagcatttgctatcctggagcaactgagtggattactcaagatttttcttgctctcatggatttgagccgtacatgcatagcaatcttgtctatgccaatggtcacttctattgcttcagctcgggaggtgttttagttgactttgatctagcttcccgcacaatgagtcaccaagcatggaatgaacatatatgcccttatattcatatgtacaatgaagaatggtttagtcttaggcagagccctttacttggctgagcagaaaggagagctcttaaacatgaaaacatgtagcagcgagataccgttgctgtatac

SEQ ID NO: 166123 - DNA, 3335 bp, Arabidopsis thaliana landsberg
  unsure (1)..(3335): unsure at all n locations
cgcaggtcgactctagaggatccccgacaccgttgctctacaactctcattggcgagctgaacgtgttggagcgttgtgtgttgctctatggtgggattctgatcagtctgaggaggtgtgcctatgctaaaagcaatgcaactgataggcttagtaagctttgaaccatccatgccaaactccatctccgaatcacaaaccttgagagagattctccctctcttcacatcaaacctagcaccagctgtaactaggaatgctcttccaaggataaggggatccttgggttccttttcatagtccaggaccacaaaatcagcaggtataacagagttaccaaccttaacaggaacatcctcaaggatgctttcagggattcgcttggaacgatccgcaatgagaagagtaatgcgagtaggcttgtagtgagtcatgcctactctctcagcaacagacttaggcatgaggttgatgcttgatcccagatcacacaaagagcggctgaatctgcttgtggagatagagcaatcaagaannnnnnnnnnnnnnnnnnnnnnnttcgtagttgttagaccgggagtaannnnnnnnnnnnnnnnnnnnnnnnnnnnnnnnnnnggatactgcaaatcgatctagaagaagtcgatgaagatgcatggtactacaaggttttctctgaaaacctttgcggacaggcgctgatgtggttcacatagctggaaccaggatctattggtaattttaacgagctgtcagccgtgtttttaaaggaatattccatccttatggataaaagcacttcggacaccgatatatgaaacctgtcgcaaggaccaaacaagtcatctcgtagtttcattacaaagtttaaaggagtgctctcaaaacttccaagggtgtcacaccaatcccgcgttatcggctcttcgaaaaggattgtggcatgattcgagattcgaagaagatctaatacttcagtaagtgctatcaaaaagcataggcgaaatgttctacttaaaacaatgtgaagcgaggaagtctattttcaaggtgcctcgatctcgttggaagaagaagaaacttgtcacctcgaaagaccgcatgatgtcgccttagtcattaccctagttgtcgccaacttcgaagtgtcaagaattctcattgacacgggtagctcggtagacttaaatttttctaagcacattggaaagaatgagaattagttggaccgaagtgatttggcacccatctcctttagtagcatatacaagcgagtcagtcatgtctctcgggacaataaggttaccagttctagctggaaaagtttcaaagatcgtcgattttgttgtgttcaataggccatcaacctacacattatcctgcgaagaaggaaattgttctggaagcgtcacgaatatgttatttaacttgccatcggatgaaggttcaatagcaattaacgaagcctgcaaagaagggaattgttcctaggtttccaagcggacaaaaagtagatgatgtcgtggttgaagtgacactggacaaagatcaacccgaccagagagtttgaattggagcaacattgactgacgaactaaaagaagctttgttgctacttttgaagaaaaatcaaacttggaagttacatgtggacgaatcttcgtcaaaacaaggatccagaataggaattaagttggaatcacctactttggaaatcctcgaatagtcattccgcctactattcactgcctcaaataatgaagcagagtatgaggccttgatcgtcgggctttgattggcacaaagaatcagagctgaggaagtaatcatttattgtgactcgcaactagtagttaaccagttcaatggagactatgaagccaagatttcaatgatggaagtacatcttgaagtggtcaaggatttattcaaaaaaatttaaaaattcgagttagtccgaatacctagaggagagaatacaactgtagatacggttgccgcattggcgttaacatcggattcttagttgaagaggatcatcccggtggaatgcatcacggagaggagcatcaaagaagaaaaaaaacttattgtcacgaggtcttgtggggaagaacatgcccgagctgaacctgaagtggaattgccacctatcaagaaaagaaaatcaaagaagtcaaacacgtctgaatccaaaaggattcaggataaacttagagcaaaataatacccggcaaaacaactagtaacttacttgaagagcttgtcgtctcgggtgaagaagtaattctcgagcccaacgaacatcctgaacctgaaccgcggacatttcacaagacaaatcaaaattacgctaaggattggagggagccaattaagcattacatcttaacaggcgaactcccgaaaaacaagtggcaagcaagaaaaatgagaatcattagcccaacattttgtttagccaaaagtgctttgtacacgcgaggtgtcaatgacccttaccttctatgcatttctggatccgaagtcaaaattgtcttgagcgaagtgaatgaagggctgtgtggaagtcatttgtcaggaagggctacgactttcaagatacagagactgggatattattggcgtactatgattacagattatgttaagttttcccaaaggtgtaagcgttgtcatcttcatgcactttagtccatcaaccttcgaagttgttctcttctatctctgcctcgtatccgttcatgaggtggtcaatggatatcattggaccattgcataagtcaacctaaggcgtacaatatctcttaattttgacggattacttctcaaactggattgaagctagagcatatctcaatatcaaggattcaacggtgaaaattttcatttagaagaatattatatgtcggcatggtgtcctgtacgagatagttactgataacggaccacagttcaattcgcttgagtttgaagctatttgtttggattggggtatcaaagttagttactctaccccgccgtatccgcaaggaaatggtctagccgaagctgcaaacaagactattttgagcaatctcaaaaacgcctaagtcatctaaagggaggatggtatgatgagcttcaacccattttgtgggcttaccgtacgactcttagatggtcacggggaaaacccattttctttggtatacgggatggaggcagtggttccgccaaactcaacgttccccgattctgcaaaccgaaacacctttaaacgaagcagaaaactcattaatgctcgacgattcgctagatacatcaatgacggcgagattaactttgatcg

SEQ ID NO: 166124 - DNA, 1428 bp, Arabidopsis thaliana landsberg; identical to SEQ ID NO: 23089

SEQ ID NO: 166125 - DNA, 732 bp, Arabidopsis thaliana landsberg
atgttcgaggattatctttctgcaaaatatccatgcttgcccgaaaaagaactctacgcgagaagagcggaagaatatcatctatgggttaaagaatatgtaagtctacatcaattttggttcattcgaaaggtgatcatttaatatatactaattgatattgtttatctattctgtaggtaacatattgaacactacttctccatttcatacttgggttcaagagattgtgcaaggacctttgaaaaaggttaaaacttggccaatgtatttcacaagaggatatttgtttcatacgcaaaatcacggcgctggacaaaagacatgtaactatgggatatgtgttaaaggtgaaaattatgctgattcatctgatgaagcgaatttctacggtaccttaactgatatcatagaactcgagtatgagggcatcgtcaatttgaggatcacactgtttaaatgtaagtggtatgacccaaatatcgggagaggcactcgacgaagccatggtggggttgtagacgttctatctacgagaaaatacaataaatacgagccatttattcttggtatgtaattttgaagtccaaaatacggttctttgttaattattaataatcttgtttgatatatgtatatagcatctcaagcagatcaagtttgttatattccgtatccatatacgaagaaaccaaagaacatttggctcaatgttttaaaaggctctagagt

SEQ ID NO: 166126 - DNA, 288 bp, Arabidopsis thaliana landsberg
ttctgtgtggacgacaaagcattgaatagagtaacagtacctgacaagcttcctgttttaatgatagatctgttgctagatgagtttaatggggccaaaaatcgtctcaatattggactttggaataggatatcatcatatatactaatatagagaagacaacgtttagaactcatgatggacattatgagtttgttgtgatgtcatttggtattacaaatatgcacatgttacattccaagcattgatgaatgaactttcaagaccttatttcaggaaattcatttt

SEQ ID NO: 166127 - DNA, 1383 bp, Arabidopsis thaliana landsberg
tggaagatgcaaattccaagaaacacgaacgtggaaagaagttctgattcacttgcatgggtgtgtttcacagtgtagttcacatgaaagtatgtctggcaaataaacttgcgaaagtttggaccgagttgagaggagcatacaaccttacagatggtagcagatgaactccaagctgttttaagaaactagttaatatgtgaaaatccctgacgatatatgtgacgacacagccaaaaatctcacaaatcctctgtttccaccgaaaaacaggggaacctcatggtccttttcttgaaatatttacttacatgatagatattcttaaaacatgcatggagggtttaatcaagcaaggccatgtatacatcacgtacgtactcactaatgtttattttcaatactcaatgttaccgggcatctgttcacttattaattacacacacatatatcagctaaaagtttttgattttgggagtgcacaaaagtgttagtgaagtctaatttatttctaccaaacaaaagactcttaattaattagtgatttagttttttgctagtctatgcctaaataatgtcgtgtcaggtgaaaggaggagacaatatttcttacatttgttcaagatactatcgtgccccaaaggccaaagctcacaacccgtagacatatctatggtccacaggttgtgtgatggctgaaactgcttcttggataggttggagcactacttttgcaatacctatatgatttttgttctcggtatgcagcctctgtttcctggcaatagtggagtcgatcagcttgtcgaaatcgaaggaatgaaaaacctcacccttgcacaaggaatgctactaatagtgtatccattatcacctaatatgaggatactttcatagtttgtttgaaatcagcatcggaagctctaaaatccatgaataaagatgttctttgatgagctaagagacccaaacactcgtgtgccagatagtcgccatcttcctccgccgatgatgacgagtccaaaaaaaaaaaagacctagaaagtgattcataccagaaccaaccacatgaagtttggttcagtttgatctgtataacaatgaatttagacctaaatgttaaaataaataaaacaagaaagcaacaatggaaatcaaacttgtaaaagttcttcttgttcactagattcagcaaaagtctctcaagttatggtgatcaaactgggaacataaacagaggactgagacctacattgcactccatctatcttaatctttttgcacagatctcccctcacaatatagacccaagcttgtataggtttcgagctaggacaacacagaaccaagctcttgccatagacatcattatcgacaaagtaa

SEQ ID NO: 166128 - DNA, 1251 bp, Arabidopsis thaliana landsberg
agtttgatgacgcctggtgattcgtaatggatgcgtccatttttcatggggattgtcccaaataaccagaacttaaagttattttttgaactaatctatttatcgcctaaggaggcttcattttcgaacaagtatttgcttgaggaggcttttaaaccttcataactatgatcccaagttttttttttatagaaagcggatttgcaaaatccgttcctttaagtatttgttggccatgtggctaagtttcaagattttcaggttgatcagacttttctctttaaacgtgagaaccaagctcatttttggttgcgaattccccacctcgggtttaatcaattaggtttatttactaggcttgggccttaactattcttctttatacttaatgagccttttgtatttaatgtgatggttgccacttcccttctcaagaaacaggaaaaagcttcacgcctttgaggcaataattgctttttctcgatttccaaaaatggtttaaaccatttggacacgccacaattattaaatttgtggttccaaagaaaaccctaactctctataaataagaatacaaactatcactaaatttttcaagcatgatctcaaaaatttacttggtaaatacttcaatgatggagaacgaaggagcttccaccgtttgtcctctcgaccccgacagcccgttgttcctgtccgacgacggctttgagccagccggcgttctcttccctcacgctgctttccatttcccatcggaggacgaaaaagaggcataagacttcatggacaaggtaaggtcttaaccttcttctttttttaaaaaaatcttcttcttaactctatgctgaacaattcccgtactaggtcgttgataaacatcaccgcttgtgcgacgagaggcagcgtttgggcctcaatagacagacgctcgagccccgagttgctcgagtgaaaaggaaggtgagagccaaggagagcgatccctttcaatgagaatggaggaactttgactgcgtggctaagatcccgaccatgctccggatgtatctccgtgcgcagggtcaagttcccggtcccgtgaacactcctgtcaaggtgatcccatgcgagagcgaagacgacgacgaggaagagcccaacaactcctagaagcgggtaaaaaattacttcgaggcggaagtcaagaatgaggcatcgacttcgaaccgtgaactggcgataaaggagccttaaatgtcccccgaactc

SEQ ID NO: 166129 - DNA, 509 bp, Arabidopsis thaliana landsberg
aagctataagacatttgacatcccaaaaccaaaaaacattgcttgtcatgctattctgttctgttctccaatgttgtcatcagcaaagcataataagatcaacaaccatagtgccttttcaatttcctcttcatcatcatcattatcaacatcatcctccctaggccataacaaatctcaagtcaccatggaagaagtatggaaagaaatcaaccttggttcacttcactaccatcggcaactaaacattggtcatgaaccaatgttaaagaaccaaaaccctaataactccatctttcaagatttcctcaacatgcctctgaatcaaccaccaccaccaccaccaccaccttcctcttccaccattgtcactgctctctatggctctctgcctcttccgcctcctgccactgtcctcagcttaaactccggtgttggattcgagtttcttgataccacagaaaatcttcttgcttctaaccctcgctcctttaggaatctgcaaagtt

SEQ ID NO: 166130 - DNA, 587 bp, Arabidopsis thaliana landsberg
ctcactctggcgttcccgatcccgtgcgggggggagcgatgggggcgtgcctgtacgtgacgcgggtggaacggaggggatggagcgcgaaggatcgctcgcagctcggggaactggtcggcctggtgcgcgccgagctggagcttcgggtggaagcggcggagcggcgggcgctggaaaacctggtgcggatgctgggaaaggccgtcgagaacatgcagctcggcgtgacgatcacggatgcgaacggtcggatggactacacgaatccggcggaagcccggatgcacggatacgaggtggcggagctggtgggagagcatgcgcgggttctcggtccgcctgagctgtgccgggcgatggacccgcaggacgtgaaggacacctcgagctggacgcgggagagtgtcaacatcaggcgggacgggagtcgcttcccggtgctcctctggtccgacatggtgctcgacgcggatgggcagtgcatcggcttcgtcacctgctcccaccccctcactgagcggaagcaggcggagctggcaacaaagagtttgcgctgcgcgacccgctgacggggctcccgaatc

SEQ ID NO: 166131 - DNA, 249 bp, Arabidopsis thaliana landsberg
atagaaggctacaacaacaatttgtatgatatcgtatagtttagcggcttatccggttgacaaatatcttcggattggtgaaaatacttcaatgttatgtttggaaaattttattgaaggaatcatatatttgttcagggatgcgtacctaagaagacccactcgagaagatctcatacgactactccatattagagagatacgtggatttcccgggatgataggaagcccttattgtaagccctggag

SEQ ID NO: 166132 - DNA, 2629 bp, Arabidopsis thaliana landsberg
gtagcttctcacgcaaaacaagtgttttacatgcgtgaagatgactcgtcaacttggcatgttgcaatgagaggtccgtcgagaagattcagagaggaagagagtgacgatgttactcttgacattgggccattgcccacaacagttgacatcgatgttgacttggaagtagctgagaatgagagaagtgattgtgaagggatttacattcgagtgatgattttttgcctgtctttgaagtgagagaagtgactttgttttaactttgagtgatgattgtgtgtctgtttgagtgttgattgtctgtcggtttgtgtgttcattatctgtctgttattgtgtttcacttattaatggaattaatgctctttttttcttttttctcagtgatttacagtgggacaacagaagaaaaagcgtggaagacaatctaaaaaagcttctcctaagaaatgcaatgacgatgaggtgaagtatgtgggtacaatagagccaacagatgtagaacaaactaatcaagttccagcagaaaacattgaggaagctgtcaacaatgtacagacagaaaaagaagctgaagttcaagcaacagtataacaaggagataaagaccctgatgtggaagaacctgaaggcgagcttgaattatctggagatgaagatgcagttcaacctaagaccaagaggcaacgtggaccaactaggatgaaagatattgctaaggatccaaatgcaagagtcagcgtggagtacaccatgatgggagagcctatcggtaaaggctcagttaagttagcatcatatgcaggcgcattggtccgagaacacgtccctatcacaattgatcgctggacaaaaataggtgaagatatcaggacacttctctggacacttcactctttttttgtaatatttgactatatgtccttatcactatatcaatctctttttttctgtaattgattgaaggcaaggtttgaactagatgaggagtatcaaaaggttccagtgcttaagcagatgggatgtttgtggaggtcctggaaatctaggcaagtaatcaagtttagagaagcaaagacaatccagcagaggatgaatctgcgacctaaaaatgtttctccatttgagtggagaaaattcgtgaaagagcaaaatgagccctgaatgtaaggtatgtttttagaaaaaaaactaagtttatttattatatagaaagttactaattaacaatcatttttaggttataagcgataactacaaggaaagaaggcgcaaccgaattcttcatacttgtagtcgcaaagggatggttagactagtagaagattgttatgttttttattgcttagagtttttattaaacttactactaatagtggcatgttgtgttgttcagaaaactggtagtgcggaccagctgaagtgacgaggctaaaggtctgggttaagtcacagaccaagaaagatggaacaccagtgaatacgaatgcggctgaaaaattgtgagtatgtgatggtttggaagttgtgacagtttgtgctggtttggaaattgtgatggcttgataaaatttggtttgtgatggttttgaaattgtgatggcttgaaaaattttggtttgtgatggttttgaaattgtgatggtttgtgatgtttgcaaaaaaggcagctgagattgttagcagtggtcctcaatcaaatgggaagaatgaagcacaagattcacttagccaactgttagggcctgacaatcctgggagactgagggcgatgggaagaaatatgaacaaaaccaaactagcttgtttccaagtaaaaaacaaatgtatggctgaaatgcaatagaagcaggaccctctccagtagaaggtcactgagttacaagaagtgattgacaaaataaagaaccaggtaaacacttatctatttatacataaagctgattagtcggttagtacatatatttgattttgtttttttttttggtatagagacaatcacttgaagttggtgaaaccttaactgcaagagtaagtcacttctatttgatacttttaatctcttgatacataattaggtgataataccctattgatttcttatagagagtgtgaacaaaagatcacaacctaattagtgtatcttgattccgcagttaacatggaaattatggagaaagttgttggtcaaatgatagcttggcctgttgctatgtgtgttaacctagaggaagagctcaatccagaagacattgcaccactggtaaaatgttatatatttagagtcataccaatatatttgtaaatgttaagttcacatactcatattattggttcaatgtgtttgacagggaccaagacccacctctggaaacaagtgcgaactactggatttgtcttcgaatgacgttgttgttgcagaaggacgttggtagacaaaagaccaaaacgcattagttaatgggcttcctgtcggacctgctgcaatgaaagtatttatggatgtaatacttcaccctgagacgtttatatggaggccaacgatgcaggtgacataccttgaggactgtttacagtcttttgtagcatggcctgtgtaatacccctgaccaggactaggactaag

SEQ ID NO: 166133 - DNA, 1310 bp, Arabidopsis thaliana landsberg
ggggaagaaaaagaagaagagcagatatgccgtttgtctcatccaggtcatcctcacaccctctctcgtcgagacggcaccgacccacccgatggttgttttgcaggcggctatgaatcaggcgcctatgaatcattgggtggtttagaaaagttctatcactactgtaccacatgtgatgtagcgttccataaatattgtacaaaagaagcctcgaaagataacacacccttatcacccacagcaatctctcagtttcagtgttatagaccgtgaaggtagagttctatatgatcgcgatcgtcatgagtacaacaatggcaagatatactttggtgtcggcacacccttatcatggtaacaccttcgataactgcacttggtgtggggaaaatttgagaggcggtacctttttctaccgatgttctatatgtagcttttgcttgtgtcccctttgttctttcaagtttccgcttccaaccatctcaaacccaaaaaaccaccaccattcactcattttccttcctcggcctcttttggttccatgtgatgtgtgtggattggtagaaagatcagacccaagttatgtttgttttcaatgcaattatgtggtccatgagagttgtatagacttaccatgcgtcataaaaatcacccgtcaccctcatcgtcttttttacactccttttctttcaccctccatttcatcctgtcttctttgctacaagacaattgatatcaagtatggtcagtattcttgcaatcatgaagattgctcttatgtagcccattccaaatgtgctacacatgaaacagtatgggatgggagagaactcgaatgggaacctgaagaaattggtgaaactgaagatgttgcgccattcaagagagttggtgaccatttgataaagtacttttttcatgaacatcatctaaagcttgagaagtacaatggtgttcgagacgcggacaagcaatgtcaagcgtgcatccttcatatcgactctcgcgatttctacaactgcatgcaatgtaattattttcttcacgaggtatgcgccaatcttcctcgaaaactagatcatgcattgcataatcaccctcttttcctcgacccggctccaccaaaggactttgaatccatagattgtttcgtttgtcgacgaccgttcgctggtttcagttacaagtgttacaaagacaattgtgaggatgaatatggcataaagtatcaggtagtttttggatgcttcttgattcctaaaaatttaaaccgtgtttgccatgaacatcccttattcctccctttc

SEQ ID NO: 166134 - DNA, 920 bp, Arabidopsis thaliana landsberg
caattactacgatccgtctttgaaacgtgctcgtagatctctgttgtcgtcgagagggatcttcgtcgttgaaggagatctaaacgacgcgaagctgatagcaaagcttttcgatgtggttgctttcactcacgtgatgcatctcgctgctcaagctggtgttagatacgctttggagaatcctcaatcgtatgttcatagcaacatcgccggacttgtgaatcttctcgagatttgcaaagcggcgaatcctcagccggcgattgtttgggcttcatcgagctccgtttatggactcaacgagaaagttccattctctgaatctgaccggacggatcaaccggcgagtctctacgccgcaacgaaaaaagccggcgaagaaatcacccacacttataaccatatttacggtcttgccattaccggtttaagattcttcacggtttacggaccatggggtagaccggatatggcttacttctccttcaccagaaacatcctacaaggtaaaccgatcacaatctaccggggcaaaaacccgggtcgatttagcccgggatttcacatacatcgacgatatagtgaaaggatgtttaggatctctggattcatcgggtaaaagtaccgggtcgggtggtaaaaaacgtggagcagcaccgtaccggatatttaacctgggaaacacatctccggttacagtaccgaatctggtggatatattggagaagcatctaaaggtgaaagcgaagaggaacttcgtggagatgccaggaaacggcgacgtaccgttcacacatgctaatattagctcagcccgaaatgaattcgggtataaaccgacaaccgatttggaaaccgggttgaagaagttcgttagatggtatctttcttattacggatacaatactaaagccaagctt

SEQ ID NO: 166135 - DNA, 997 bp, Arabidopsis thaliana landsberg
atggttggtggtggtaaaggcaaatcatcaagaggtcgaggtcgaggtagggaatcgacgccgaaggcaaaagttttccatggtaaaaatcctctcggtcgtgggagtgaagtcggaagctcttctcaatcctcaaaccctaattctgcgacgctctcctttacacattcaaatagaagccgtccttcccaatatccacgggcgacacgaccccaaaaatcaccacctcaaacgacacaaaccccaactcttgcttgttctcaaaagcaatctagctctcaacaaccgcctcttattcgtcgaaagcaacaatagccttctgctcgtcaatatcagattcctcatcttcaagaactgcctgctcaagatccaccggagacacatatttaggaggaagttcgatgggccttacttcagttggaagattactccaatagcctataagagagatacttcagaaattttactgtaatgtcataaatacctttcattatgttattgtttactttgacttactcttactatctttgctaacttagctgcttgttatgtagagaaagtattattgggatcaaggcattattgagcttgttaaagaaggtttcttggttatagccaagaaagggatgaaagggattgtcagtcaagcaaagtagagtggtgaacaaccaccgtggattcatggaacactttggaaacagatgtgggtgcattggaacactgaagatgctcaactgaaaagtgatacagcttcaaactgtagaaacacagatcgtggaggtcttggagtgcacaaacagttagccggtcagaaatcttttgtgcaagttcatcaagaaatggtaagagttgtctttccatccaaacagttcacttaacagctttcttttattaccttcacataagcttgtctttgtctgtttgattttctttgtcaggaggaacgtttgaagcgtcctgtatcatatggggaagtgtttatgcaaacacataccag

SEQ ID NO: 166136 - DNA, 292 bp, Arabidopsis thaliana landsberg
  unsure (1)..(292): unsure at all n locations
gctgactgtgacggcaatgatctnnnnnnnnnnnnnnnnnnnnnnnnnnnnnnnnnnnnnnnnnnncgacgaacgtcccgaggatgacccgagcggcgagatcgacgaggtggaaggagattacggctacttcgctccgcacagcatctggccgttcctgctggcgatcacggcctccatcgcgatgttcggtgtcgccatcggctggtggctggtgctgctcgacgtgccgctcgccacgttcgcgctcatcggctggtcgttcgagcacttccacgactgagccggcgcg

SEQ ID NO: 166137 - DNA, 1094 bp, Arabidopsis thaliana landsberg
  unsure (1)..(1094): unsure at all n locations
aaacgggtgggtccaaattaaacagggtggcctccctcaacatttaagggacgcttcacatccccatcgacaacgtcaccagcccctgccacccctccactatatcggtcacacttccaccgtttccacctccaaaaaaaacgttttcgcatcacttccacctcaaaacgcaacatgggttgcaaccaaattcactagatcactcaggagcttaaactccctcgagtatccagctagggttccaacaaccgtggaacattccttgttcttcacggtaggtcttggtgcaaacccttgccagagttgcaacaacggtgttcgcttagtggccggaataaacaacgtaacgtttaccatgcctaaaaccgctttactccaggctcatttctttaacatttccggcgtatttaccgacgacttcccggcgaaaccttccaatccgtatgactataccgcaccagtaaagctcggcgttaatgctgcgacgatgaaagggacaaagctttacaggcttccatacaacgcgacggtgcaaattgttctgcagaatacagcaatgatcttgtccgataaccatccgtttcatcttcacgggtttaacttcttcgaagtagatngaggtttggggaattttaacccggaaaaagatccgaaagcgtttaacttggtggatccggtagagagaaacaccgttggagttccagccggtggttggactgccataagattcatcgccgacaatccaggtaattaaatacaatttaacataatgcctagaaatttttttttattaggaattttttcttcttttctttaatgcataaaaaaagttgttataatttagtttttggctttttcaatttacgaattgttttttagtgtttattattcggtccaacttgctaaagtattgattttgggggtaattaatttgtttatttggttacacatatgaaggggtatggttcatgcattgtcacttggagttacatacaacttggggattaaagatggcattcgtcgttgacaatggtcacggccctgaccagtcattgcttcctccacccgctgatcttcccaaatgttagaatata

SEQ ID NO: 166138 - DNA, 1406 bp, Arabidopsis thaliana landsberg
atacttaatgaaaggagatggaaagaagtaactgctacatttgtctttcctccaactgcaacaaacgcatcatatgttctgcgcaaatactacttctcgctgctgaacaattatgagcaaatctatttcttcagatctaatggtcagattcctccaggtttgttcataaaaacctctttaactattttaccaaattttcaaatatttttcagtttcttctctgttttgtaacacacatatcttctgtagactctatgcagagtccatctgctagaccatgctttattcagggagccattagaccttcacaagaacttcaagctctaacctttaccccacagcccaagatcaatactgcagaattcctcggaggtctcaacttttttctctctttgcttctataaatgttccaactgagaaactgtgacttataaatctgagtaaaatcctttttccttttgatgttattgtttcaggatcacttgctggatcaaatgtggttggagtgatcgatggaaaattcgaaagtggttaccttgtaactgtaacaattggatcagagcagcttaaaggagttctgtatcagcttcttcctcagaacacagtttcttatcaaactccgcaacagagtcatggtgtcctcccgaacactctgaacatttctgccaatcctcagggggttgcaggaggagtaacaaaacgccgtaggagaagaaagaaatcagagatcaaaagacgtgatcctgatcatccaaaacccaacagaagtggttataacttctttttcgcagagcagcacgcgagacttaaaccgcttcatcctggtaaggatagggatatcagcaggatgattggtgagctatggaacaagctgaatgaagacgaaaaattggtatttcacacactgatctttgaattcttatcaaactctgttacgtatatcgagtttttgtctcatgatctgtttgattttcttttatttctagatttaccaagggaaggcaatggaggacaaagagcgatacagaactgaaatggaagattacagagagaaaaaaaagaatggacagctcataagcaacgctgttccgctgcaacagagacttccggagcaaaacgtagacatggctgaagctgaccttccaattgatgaagtcgaagaagatgacgaagaaggtgattcaagcggatcctcaggcgaaagcgagccacatgatgatcagagcatagaaactgatcctgaattggaagagccatctctgaatccctcaggtccaaacctaaaccctaatccgactgagatagtggtggctcctaaggagaaaaacggcgatgttgtgatggaaacatctccattgaagaaagccgatgagccaactgtggcggtgactgctgagcagaactga

SEQ ID NO: 166139 - DNA, 1205 bp, Arabidopsis thaliana landsberg
taatctatacgataattaattgcaggggttcatagatgatacccggatctagaggagtcaagatcgccgtcagtgtcctcctgagtacaagtacgctagcgtcttgttcagagtctacgacactaatctaaatcggcgtgttgacaaccaggagtttcgtcgatacattaatgctaaggagcttgagctatacaggattttccaagccattgatgttgagcataatggatgcattttgcctgaggagctttgggaggctcttgttaagaccggtatgttactgttccatttatactgttactttttgctattgatcatcatgtaaagtttgtacctttatgagagatttgtggattttgattgtttatggtgaagttgctatattggcattgtgttgagatgttagaacgtgtttgattgtttatgttatttcattggattgttgagtatcaccaacctatataagccctacagttttgttcttgtaggcattgagatcaatgatgaggaactcgctcgttttgtggagcatgttgataaggacaacaatggaactataacgtttgaagagtggagagattttcttttgttatatcctcatgaagccacccttgaaaacatatatcatcattgggaaagggtgtgcttgatagatattggggagcaagctgttataccggatggtataagtaaacatgtgaaaagaagcagattacttctcgctggaggactagccggagctgtttctagaactgcaactgcgcctcttgatcgtctgaaggttgttttgcaagttcaaagggcacatgcaggggtcctcccgacaattaagaagatatggagagaagataagttgatgggtttctttagaggtaatgggttaaatgtcatgaaggttgctcctgaaagtgccattaagttttgtgcttacgaaatgctaaaacccatgattggaggggaggatggtgatattggtacaagtgggagacttatggcaggtggaatggctggtgcattggctcaaaccgctatttaccctatggatctcgtgaagactcggttacagacttgtgtcagtgaaggtggaaaggcacctaagttgtggaagcttacaaaagatatatgggttcgggagggacctcgggctttctacaagggtcagttccttctcttcttgggattgttccttatacaggaattgacct

SEQ ID NO: 166140 - DNA, 479 bp, Arabidopsis thaliana landsberg
ttcagaaaactgcttggagtgaagaagaagatcaaattttgattgaagcacacaaagtacttggtaccaaatgggtcgagatcgcacagcaacttccggggaggagcgataacaatattaagaaccattggaacaccacaaagcgtcgggtgcaaaataaaagaggtggaactgtcaaccctgtcggcaataacatccttgaaaactacataaggtgtatcacaatcaacaacgaagattttcttaagaccgatggatcttatggtgaaccgacaaacattgagagtgatgatgactctaaagatatgttatatggggagatgaatttgagtctagagactataacgacgcagaccaccaaaccattgaccaatgcttctacaacattaccttatgttccgatgccagaagagaattatactgtggaggattgtgaatcactggaggacattctagaggtgctgcgttggtgggaataa

SEQ ID NO: 166141 - DNA, 351 bp, Arabidopsis thaliana landsberg
cttacaatttcactgcagccggaaaacttgcttatagatgctcaaggaaatctgaaagtctctgattttggattgagtgcgttgtcccgacaagtcagggtaatcactgagtcttatttttctttcttagcatccttttgtttacctgaattctcactgatttgtccttgtcctattctaatgaagaaacctgtagttcaacgacgatgtgtctcattgactgtttatacatatatttaataagctctgaatactgaccattctagattctcagaaaatcaaaacttatttggtcttggcagggtgatggtcttcttcacactgcatgcggaactccaaaaatatgctgct

SEQ ID NO: 166142 - DNA, 3202 bp, Arabidopsis thaliana landsberg; identical to SEQ ID NO: 1741

SEQ ID NO: 166143 - DNA, 3677 bp, Arabidopsis thaliana landsberg
tgaagatctagctatgtttgaacataaagcaatttttttctgttttttgttagccaaaactgaaatatggatgggtaccttattttgatgaaaaggttaatcgtgtgcccgtatagtgttcacaatcatatgtacctagggatgttaaaacgggcttaacatttagggccggtcctagcccactaaataaattaaaagccctaattaaatcaaagtagagaaaaggtttcgggcttcaatggcttaaaacttttttcttttcttaattgtttttttttgtttttgttttttcttcgatataaaattctcttcttcttcttcaaacgctctcttcttcttcttcaatcttttcttcgatctctttctttttttatctcttcttcgattgtgagaaaagttttgatttgtctctctatacctttcatctttcttttttttacactttgatagattctctatttttggaatctgattaatatgtttggggtttaatagtttcagctcaaagaaatctgggttaaagtgtgttagtgttctctaaaggtgattctctaaaggttggtctggaaaaattgaattttgtgtagctatgaacttgtgggttgattcatatttgatttgaaattgtgggtcgattcatttattctcgatacgaataggtacatgtcgagtttctattagtagttcagacatgttttgtatatcaattgcttgagaatttggcctttgttgcttcccgtgctatttgggtttttatctttccccttgttgtatatgatgtgttagaattcataagctgcagattctatctttttggttggatatgtctctgtttgaagttatatatttatagttttgaattcataggatgtggtgatacgtttgtaatctcgtgccatatctttggtttgtcaaagagagtgtgttttaatgtcaatttctgggtaaccaagtttgagcttattccttttgattctgcccggctctctgattttttaaggtgagattcctaagcatgtcaattacttttttttttttttttttaacattctcaattctctcggaaaaaaatcattggagtacaataagtctcatatattgttcagaatgaactaaaagtgttgggctttgggtttttagaattaactaaacgtattgggcctcaaataactattgaaacctcttctgatttgggttttagcttaaacggcgtcgtgttggaagcatatcttgaacggacggcaaaactcggagtcggagatcgtagcggaggaggacggcgaatctttcatcgtctgtcttttctcttcttatacgcgtcagacaagtcttgaacttctgattagcactgtaagcaatcgcaaatagtccggattacatctgaggattcgttgatggcggcgtcgtggcagtgggaaaatgccaccgccggcgccgtggctggatttgccaccgtagctgctatgcaccctcttgatgttgttcgtacgagattccaaggtctgatttttcactcctgcaactgactaaaaactcgaacttttttaactcatcaaatagtttatagtttgattacttgattgaacaacagtcaacgacggaagagggtcaagtctgccgacgtacaagaacactgctcacgctgtcttcaccattgcccgtctcgaggtttcccagattaaactctattcttatccccttttctattgacttctgtctttttcttctatgcaatgtggttgactcatcatctatgatacaacccatttgggttaaatcttctgtagggtttgagagggctttatgcaggcttcttccctgcagttatcggttctactgtttcctggggcttatacttctttttgtgagtgttactttcgtttagcacatatcttcttgcttcatgatttctattcaaacaaatttctgttaggtctttgaatgtttttaagccgtggatcttgttttaaatgttctggaacaaatacattatctctctgtagttatggaagagccaagcagagatacgctagaggcagggacgatgagaaactcagccctgctctccaccttgcttctgctgctgaagcaggggcctcggtgactctaacagacgccataaacatctcatttctcctatgttttttcgatctcagtctcacgggaatgatgctttcaggtctgtttatgcacaaatcctatttggcttgtcaaaacaaggttacagcttcagacacctcttcatcaaactcaaccatactcagggcttttaggtttgcaatatgctgcacacaaaaattcagttttcattgtttcaagtgtttcattctaaatgtttcttttgtgaacttcagatgcctttagaaccatagtgaaagaggaaggacccagggcgctctacaagggtattgtccctggtcttgtactggttagtaactatcctaatctttctcttgtaatgtttgttcgtaaaactactacaagatccacagttttggaactagaaaagatgactattagttgcgaaagaggccttacagattgaatggtttacattttgggttcagcaggtttctcatggtgctattcagttcacagcttatgaggaactccgtaaaatcattgtggatttgaaagaaaggagaagaaagtccgaatccactgacaatctattggtacagagtaattctttttaatggcctacattgcggttcttgagttttataggaactttattcttaatcctccagtatcacggatgtatactattgtaacaaactccactgcaattttttctttagaactcagcagattacgctgcacttggcggctcctccaaagtcgctgcagttctacttacgtatccatttcaagttattcgagcacgattacaggtaccaattgatcgtgtcttcttcagtcttattattgttagctcaaatctaaattcctggaacttccttactttctacctttgatcttctacaatatatgaggatttcataaacatggttcttttcttgttcagcaacgacctagtaccaacggaatcccaagatatatagacagcttacatgtcatcagagaaaccgcgaggtcagggcatattcttggtctcgattatgtctgaaaagatgatctttttggttagtttcactgagtaacacttttgggtctctctctgcagatatgaaggtctcaggggtttctacaggggactaacggctaatcttttgaaaaatgtacctgcgtcttccatcacattcatcgtctatgaaaacgttctgaaattgctaaaacagcatccaacaacaaaagattagatccttcctcttcctttacccttatttcttagactcaacacgcacgcggttgacttgtcactcccaatactaaagaattattctttgatatacatatattaagtgcgttccatggttctaactttgacgatcacagctaaaaataacacaacaaaccgattcaacatgggagagatctaatcttttgttgcgattgcttacagtgctaatcagaagttcaagacttgtctgacgcgtataagaagagaaaagacagacgatgaaagattcgccgtcctcctccgctacgatctccgactccgagttttgccgtccgttcaagatatgcttccaacacgacgccgtttaagctaa

SEQ ID NO: 166144 - DNA, 493 bp, Arabidopsis thaliana landsberg
  unsure (1)..(493): unsure at all n locations
gtcggcgttgctgcggtacttcgagacccggaggangatctttctgcggctgaccgcggacgggtggcgcgagtggtccgcggcgctgcgcgcggggctcgaggagctcgccgccccgacgccggcggccgtggccggagtgttcgcgagcacgctggcggcccgcggcttgttctgcgacctgctggcgcaggcgccgctcaacctggagcgcaacgtctcgctggacgcggtgcgcgccttcaagctcgtcaccctggccgaggtcgacgcgatcgtggccgtggtccggcgcctgctgcccgggctgaccgaactcgacggcgtcgacctcatcgcggccgcggccgcgatgtcaggcgcgttctggcagatggccacgcccgggccgcaggtcgccgcgctgtaccgcagcgacccccggctcgcccacgcggtcgtcgacgacgaaccgcgcgtcgaacggctcctggcggccacgctggagggaatg

SEQ ID NO: 166145 - DNA, 1443 bp, Arabidopsis thaliana landsberg
gaaagcatcccaccggtttaagaactaaccgagcaactgaagccggttattggaaggcgaccgggaaggataaagagatataccgaggcaaatcacttgttgggatgaagaagacacttgttttctatagaggaagagctcctaaaggtcagaaaaccaactgggtgatgcatgagtacaggcttgaaggaaaattctctgcccataacttgccgaaaaccgcaaaggttaacccgaaaaccaaacacttactctgtttatgctctgttttccttttgtttactaattttgtttttgttttggggtttgcagaatgaatgggtgatatgcagggtgttccaaaagagtgctggagggaagaagatcccgatttcgagtctaatccgaatcggttcactcggaaccgactttaacccttcgcttttgccctctttaaccgattcttcgccttacaacgataaaaccaaaacagaaccggtctacgtgccctgcttctccaaccaaacggatcaaaaccaaggaaccacactcaattgcttcagcagccctgttcttaactcgatccaagccgacatttttcacaggattccactctatcaaactcagtccctccaggtttctatgaatctacagagcccggttctcacgcaagaacactcagttctacatgctatgatcgagaacaacagaagacaaagtctcaaaacgatgagtgtctcacaagaaaccggagtttcaactgacatgaacactgatatctcatcggattttgaatttggtaagagacggtttgattctcaagaagatccgtcttcctctactggaccggttgatcttgaacctttctggaattactgaagatgattcaagattctcatgtccattaattaactgtggtgtgttaaagtttgtataggctattgtcatatactctcatatcagcttccactatatattataacaatttaaagaaacttaaaaatatgatttgacatatgtctaaagtattataatacaattttgtacctctacgatgtttataatcaaatgtatattttagaactaatatcatttttaggctagaattgagattccattgttttcatcctcatggaaaaatttagttctacgccaaaatttatcactaatattttaaaatcacataataaccatccttttgagccttttaattttacatagatttatgcaaattttaaaaatatgaaattttgagatgttagacgacacatcgttttttgtttgtttgttaacatttatcaattatcttagaatttaatatctactaatttgattggtcaatggtcttggagatcaaataattgtttttcaacgttccatttccttcgcttgtgctttcatttgtagatgtgaagaggtggtgtatattccatttttggtgcatgttaaaaaccggtcattgtc

SEQ ID NO: 166146 - DNA, 354 bp, Arabidopsis thaliana landsberg
atgaccgagcgcctgggtgcgctggaaaccctgctctggctgggcgtcggcgaggccgaatcggccgatttccgccagcgtttcgccagccatccgctggtactcaacaaatggttctcggcgcacgcccgcgtgcccggcgaagatgcgctcaagcgcatcgaggcgttgctggccgacccggccttcaccctgcgcaaccccaaccgcgcgcgtgccgtgctcggcgtgtgggcgcaggccaaccccagcggcttccaccgcgccgacggcgccggctacagtctgctcgccgaacaactggcggccatggatcggctcaacccgcaattggccgcgcgcgtagccaccgct

SEQ ID NO: 166147 - DNA, 603 bp, Arabidopsis thaliana landsberg; identical to SEQ ID NO: 14234

SEQ ID NO: 166148 - DNA, 556 bp, Arabidopsis thaliana landsberg
gagaccagacgcatgacgagtgtgagtgtcgagcgggagggtgccgtcgcctctttcatcttgtccagcccggccctgaacctggccctgaaggaggggctgctcgcgtccctgcgggccgtcgccgccgacgaccaggtgcgtgccgtgatcctgaccgggacccggccgggccttctgcgtcggccaggacctggccgagcacgccaccgcgcttgaccaagacccggcgacggcgctcgacacggtgcgggagcactacaacccgatcgtcaccgccctcatgaccatgcctaagccggtcgtggccgccgtcaacgggacctgcgtcggggccggcctcagcctggcgctcgcgtgcgacttcgtcgtcatggccgagggcacggtgctcggaacaacgttcaccggcatcgggctgagctgcgactccgggctttccttgacgctcccggcggccgtcggcctcgagcgggcccggatcctgctgctggtgccgactaccttcagggccgagaaggccgtctatggggaactgcgttcgacctggtgcccg

SEQ ID NO: 166149 - DNA, 425 bp, Arabidopsis thaliana landsberg
atggaccgcgccatcgacttctacttcgatttcacctcgccctattcgtacctggccgccacccagatcgaggacctggccgcccgccacggccgcacggtgcgctggcatcccgtgctgctggccgggctcaccgaggcgacgggtgtcaagctcacgcccttcgtgccgatcaagttcgcatatgcgctgaaggacctggcgcgcggcgcgcggctgcgcggcgtgccgttcgccatcccgccggactttcccaagctgtggctcaatccgccgcgcgccttcctctgggtgcagggcgcgtatggcgatgccaaggcgcgcgcgtttgcgcagcgcgtgttcgccagggccttcggcgaaggcgtcgaaatcaaagacgtggaggtgctggccgcggtaggggagcggctgggcatctgccc

SEQ ID NO: 166150 - DNA, 541 bp, Arabidopsis thaliana landsberg
atggacggcagcaaggtgtgggatgctttcatttacggtcagatcgaagccatccgcaactattgcgaaaccgacgtcgccaatacctatctcgtttatctgcgtttccagcgcatgcgcggcatccttaatgaggaagcctacatgcgcgaaatcgagctggtgcgcgcgacgctcgccgcttacgaagcaacgcactggcaggaattcctgcaagcctggtcacagtaacggcaggccgcagggaacagcagcttcacctcaggtaggccatacgttccatgatcgagcaaaccaaaatcctgctgtggcgattgttcgcgatcatcgcgctgctgctgggcctgatcggcgccttcctgcccgtggtgccgaccgtacccttcatcctgcttgcggcctgggccggtagccagggctggccgcagctggagcactatctgctgacccatcgtcgcttcggcccacccatccgccactggcgcgaattcggtgccatctcccgtcgcgccaaggcgctggcgaccatcatgatgtgcgg

SEQ ID NO: 166151 - DNA, 541 bp, Arabidopsis thaliana landsberg
tcgcatggctcgagtctgccgtcggcgcgaacccccgaactgttcgcggacgacgtggcgcggcttctcgatcatgccaagatcgatcgcgcgattctgtgcggggcctcgatggggggttatgtcgcgttcgaattcgagcgccgccatcgcgatcgtctcaccggcctgatcctgtgcggaacgcgggcggacgccgattcgccgacaaaggtcgccgaccgccggaaactggcgcaggagacgatgcagcgcgggtcggacgtcgtcgccgaagccttctcgccgaaactgctggcgaagcagacgcgcgaggctctttggcacaaggaagcggagatcgtgaagacgctgcgccgtcagcatccgaccgccatcgcggcgacgtcgctggggctgggcgagcgtgcggacatgacctcccgtctgtcgtcgatcgacctgccgacgctggtcgtctcgggcgaagaggaaatgcaaaagccgcccgacgtgatgcgggcgatggcagacgccattccaggcgccgaattcgtcgcga

SEQ ID NO: 166152 - DNA, 1059 bp, Arabidopsis thaliana landsberg
  unsure (1)..(1059): unsure at all n locations
gttgtaagtactctttgccctttgctacttaaatgcaatttaaagcttgctcgtcttgaagtttgtttgccaattctctccatcaacaggcttgtcagtttctccgtgttataacattctattcgactcagcttcctggccctaactatcactgtcgagaggtaaaagctaaataaaggtctactaaagagggattcatccatattcatgtgtttattctggtgagtctcttgtgttaacttacagggttctgagcttgccaggttgccaaggccacataacgttcttgaggttctcttgctcaactgtgagttctaatcatttctccttcccttaatacaatttttggacgtatgtttcttctagttcgtatgtgatgatacgctgatcttttcagttcctcgtggtgtgatatacggatgtggagacctgattttctcatcgcacatgatattcacactagtctttgtccgcacttaccagaaatacggttctaaaaggtacaaagtttctctagtcacatggtaaaacaataaccggacaaaataatagcttgtaaatgtctctctcacaggttcataaagctgttaggttgggtcattgccatcttgcaaagcctcttgattattgcgtcccgtaaacattacactgttgatgtggttgttgcgtggtatactgtgaacttggttgtcttcttcctcgacaagaaattaccaggtctgatcttttacttgagtgtttacttgcataaaacccacaaattttcttatatgattttgttttannnnnnnnnnnnnnnnnnnnnnnnnnncattgctccctgtgatctcaaaagacagaaccaaagaagagagtcacaaactcttgaatgggaacggtgttgatcctgcagatcgggtacgcatttgaatttgtattcagtgataaatccgactgaaaccccaataattgatgttaatgtgtataaatttccttgtggtatttcagagaccgagggctcaagtgaatggcaaagacagcaatggaggtcacactgataatgctactaatggcacatga

SEQ ID NO: 166153 - DNA, 515 bp, Arabidopsis thaliana landsberg
gcatgtgttgatcggcagcctgtacacgttgcaggggcaggatttgaccggtccggcgatgcgcaaggtgaccgacgcgggctttacgcaaaagcagtggaacgcgctggccgcgtcgacctggatttcaaccggcaaggtggcatccgggcgcgtggtgtatgcgttcatggacacgcaatgtccgtattgccatcgcctgtggcaggccgcgcagccgtacttggcggccaagagtgtcgagttgcgcgtcattccggtggcggtgatttcgcagaccagcctgccgaatgccgccgccgtgctgagcgcggccgatccgatcaaggcctgggccgaacacgagacgcatcccggtcaggccgtgccggtgagcggcgcgccggcgtccaacgtgtacgccaagctgggcgccaacaaccagctgatgacgcggctgggcttttacggcacgccgggcgtggtctacaaggaagcgcgtggccagatccacgtcgtgcgcggcctgccgcggg

SEQ ID NO: 166154 - DNA, 2570 bp, Arabidopsis thaliana landsberg
ttgaggaaactggacctgaagcgtttccctgataaggaacttccagtgtggctttggcctcagaaccttctctacctggaaaagctccaccttggaagctcgaagcgcctaaaaggattcggtgccttaccaggagagccaacaaagtgtcatgttaaggtcttacgtctcacgtccctgctaaagctaaaagtggaatggagagagctgaagaaactctacttcccaaatctgagattgttggagagctatgagtgtcccagaattacattctgtccctgtgatcgcaacggaatctggagatctgataagaacgatggtgcaacgacatctctttaggatccaaaactctcattttgattcttgttttaagaagacttactttttgtgtgattgtgttgttggtttcccatttttatttattttcagtttctttcatgattgttccttcctcttttgatgagctatagttgcttttgattaatggtttgaaagggattgttttcaccattcttccgatgtgtcaatgtattgtttagtttcttaaagtttttgttttactttgatttgtgaacaaactaaataagtaaatatggatagctaaaccaatgcaaaaagcaaaatagttgacgaagtaaacgacaaacgagattaactgatgaaaaatgacaaaagacaataccatttttatattcatcgataagagatttggaatttgaaattttcttgcaacaaaggaaattaaaaaaataaagaccagaagacttctggtttaaagaaagtcaacgactgaataaatctcagtctctctgaatccaaacattcatcacaatcattaatcagaagaagaagaagaagaagaagatggtacaggtgattcccacacatatcaaaaatgtctgggacgagtggaacatcagaggaattgtaattctcagtctctcgattcagacaattctcatcatcttagcaccattgaggaaaagaacaccaaacaggttcctggctttagtcctgtggttatcttatctcttagcagattggtctgcaaactttgtgattggacttattgccaagaatcaagggaaagaactgaagccagatgatcctcctcaagatcagaagctcatggctttgtgggcaccgttcttgctcttacatcttggtggaccagacacaatcactgcatactctcttgaggacaatgctctttggcacagacactttcttggcctggctttacaggctgtttcaggtgcctatgtggttatccaatctctacctaattctctttgggtgatcatactgcttttgttcatcgctgggaccttaaaatatctggagaggacgatcgccttgtatctcgcaagctcagacaagttcaggggttcaatgcttgagattcctgattcggattctaacgagaccaaccgcccgagaaaggaagacgactcgatgcctactgaaaactacatgctgtatggtaggcaaaagagaccattacggctagaaaaccccggtactttgacacacctcgagatccttcagtttgctttctggtttttcaataacttcaagagtctattggtaaataacatctttagctctgagcagcgagacgagagcagggaattcttcaagaatctacaagacgaagaagctttgaggattttggaggtggagctcggttttatctatgaaggtttatacacaaaagtctcggttcttcatacctgggttggagctttgactcgaaccatagccttgggatcacttctgtcagcatttggcatctttcattacagaaccaagaagagccaccagtttcatggagctgatatcgtgatcacctacactttgttcttagttggaatagctctggatcttatatctctcctcatgatcttgccctcagactggacatttgctgtcatcagtaggataaacgaagacgaagtagacagcggctcatggatagaccccgcactcaagtggttcctcggttggaagcagctgcactggaagacgcaaaaatgctgcggaggagtggaacatgaggtgcttaatacgccgtttctaatccaaagatgggcaggaagcatcaagctgttcaacttcattgcatactctgtgaaagcagatataaagaggatacatgacgtcaaaggtagaacacgtcggcttgtgtggaagactatactttaccctctcatttacgttaccaacatcttcaagaaattgtgcaaaaagatcgctaattggaatgatgatcttcacaagtatattagagatgtcatcggacagtggtccgaagaaaatccagtagctcattatgctatcattattgttgagttctgcttcatgatacctcacttctttacgtttattggtaactacatgaccaacttcctccgcatcaatgatctgctggatgagatcaatctaatgagatctgtacacagtgaacccttgacaaaagatctgtggggattcatatttactgagcttaaatccagactgcagcgtccacacatggaaagaagaaaaacaaaagccgtgaggaaaggatg

SEQ ID NO: 166155 - DNA, 2132 bp, Arabidopsis thaliana landsberg; identical to SEQ ID NO: 20103

SEQ ID NO: 166156 - DNA, 3151 bp, Arabidopsis thaliana landsberg
aaggaacgtgtgaggtggcctccccgtatccgtaatgagccttgttttggggagcctgtgtcagatcatttcttctgcattcatcacaaggaaggaatctcttttgagatcatgtttctagtaaattcggtattgcacaggggtgtctttaaccagtttcagttgactgagcgattctttgatcttctaagaaaccaacccaaggacgtcaatatagcttctctcaagcatctctgtacctataaacgaccagtttttgatgcgtacaagaggttgaagcttgttcaggaatggattcagaaaaatccaaagcttttagggagtcatgaacaatctgaggatatctctgagatcagaagactagtaattaccccaaccagagcctattgcctacccccagaagttgagctctccaacagggtactcaggagatacaaagctgttgctgaaagatttttgcgggtaactttcatggatgaaagtatgcagaccataaattcgaatgttctctcttactttgttgctcctattgtgaaggatttgacatcaagttctttctcccagaagacctacgtttttaaaagagtgaagagcatattaaccgatgggtttaaactatgtggtagaaaatacagttttctagcattctcagccaatcaactgagagaccgctctgcatggttctttgctgaagacgggaaaacacgtgtgtcagatataaaaacatggatggggaagttcaaagacaagaatgtggcaaaatgtgctgctaggatgggcctgtgcttctcctccacatatgccactgtagatgtcatgcctcacgaggttgacactgaggttccagatattgagagaaatgggtatgttttctctgacggaattggtacaatcacacctgacctcgctgacgaagtaatggacaaacttaagttggatgtgcactacagcccttgtgcttatcagatacgttaacgcaggtttcaaaggggttgttgctcgttgaccatcaaaaagtgatggaatcaggctagcccttcgagacagtatgaacaagttcttttccaaacatacgatcttggagatctgttcctggacgaggtttcaacctgggttcttaaatcggcagataattacccttctatccgtactaggtgttccggatgaaatattctgggatatgcaggaatccatgctctataaactgaaccgcatccttgatgatacagatgtggcatttgaagttctcacggcatcatgtgctgaacagggaaacactgcagctatcatgcttagtgcaggtttcaaaccaaaaaccgagccgcatctacgcgggatgttgtcttcagtcagaattgcacaactctggggtctcagagaaaaatctcgtatttttgttacttcaggaaggtggctaatgggttgcctagacgaagcagggatacttgaacatggccaatgctttattcaagtctctaaaccgtctatagaaaattgtttctccaaacatgggtctcgttttaaggagacaaagacagatctggaagtagttaaaggctatgtagccattgctaagaatccttgtcttcacccaggggatgtaaggattttagaagctgttgatgtaccccagctgcatcacatgtatgactgccttattttccctcagaaaggtgataggccgcatacaaacgaagcttctggcagtgaccttgacggggacctgtactttgtggcttgggatcagaaactcatccctcccaacaggaaaagctatccggccatgcattatgatgcagctgaagagaagagtttaggccgtgctgtcaaccaccaggtcaatatctacttccccactttttttctgttagctgagatgatgacgcttaagataaaatggacaagtgattccagtataactctctgatatttctggaagtggtggaaactttgtttttggatgcttgtagtgattacttttgcttgcttctgagttcatagattgcgtggcataggttgttaacagcatactgtgttcatcctgtaggagctaagatgatgacatttaagaaaactttgtcatatattgttgattctgatttgtatttttcgcatgccttgctgtgtctgtgactgtttagttaccatcaagggcagtatcatgatgctagtagcttctgccaatgtagttatgaattctttgttattttttcttgctgtgcttgccaagtcttgggtaattgattgcttttgttacaggacataatcgatttctttgcaagaaacttggcgaatgagcagttgggcacaatttgcaatgcacacgtcgttcatgctgatagaagtgagtatggagccatggacgaagaatgtttgctactggcagaactagctgccactgcagttgatttcccaaagacagggaaaattgtgtcaatgcccttccacctaaaaccaaaactctacccagatttcatgggaaaagaagactaccaaacttacaagtcgaacaaaatcttgggtcggctttacagacgggtaaaagaggtttatgatgaagatgcagaagcttcctcagaagaaagcacagacccaagtgccatcccttatgacgctgttcttgaaataccgggatttgaagatttgatccctgaggcatggggtcacaaatgttcgtacgacgggcaactcattggtcttcttgggcaatacaaggtgcagaaagaggaagagattgtgacgggtcacatctggtccatgcccaaatacacaagcaagaaacaaggcgaactgaaagaaagactgaagcattcttataattcccttaaaaaggagttcaggaaagtatttgaggaaacaatccctgaccatgaaaatttcagcgaggaggaaaaaaacatcttgtatgagaagaaggcttcagcttggtatcatgtaacttaccatcccgagtgggtgaagaagtctttagagctgcaagatccagatgagtccagtcatgcggcgatgctgagttttgcttggattgcagctgattatcttgcaagaatcaaaatccggtcacgggaaatgggaagtatcgactcagccaagcctgttgattctttggctaagtttcttgctcagcgtctctaaaaggttatgtttaatg

SEQ ID NO: 166157 - DNA, 713 bp, Arabidopsis thaliana landsberg
cgtcgtaacgacaacatcttgaggtattggggttggtttaacgatcacatatcatcgaacggcgcacgtttcaggtttgaaatatatgacgttagatctgattcatggaaggttcttgatgacgtccttgatgaccgcttcccaccagtaagtgtcgtgtctttaaagggaaacacttactggtttggttctaataaaaaggacttcttacgtagttttgattttacaacagagagatttaatcatattggtcttccgccatctcgagatcatggttttatggctctatcagttgttggagaagaacaactctcagtgttacaagagattgagacatcaaagatggagatatttgtaaccaataaagttggttctgaagaagctgctttgttgaggagcaaatcctttatagaggatttacccattggcggagattgttctgaggttttcgcgagtcttttaattaacgaggagaagaaagtggccttgtgttgtaatttagatttcgagaccgacgggaacttgatattcactattggagaagacaattaatattactcataaatcccttatgctacaaacaagccatggtggttatgtagattctctgaaaaatctacaaaaaaatcggggtggtttccatttatttacaattatgtaccaagtttgagtcacattttgtacgaggagattgagagtcaaaaagagaagaa

SEQ ID NO: 166158 - DNA, 2367 bp, Arabidopsis thaliana landsberg
  unsure (1)..(2367): unsure at all n locations
aatcctttcttcttttggcagtgtgaaccaattgtctattttaacgtcttgataataataagctaagtggtaacctcccacttgaagtaatcaatcgtacaaagttgtcagagatatcactctctcacaatcagttcacaggcacgcttcctcctaacatcacttcactctccatcttggagtccttttcggcaagtggaaacaatttcgttggaactatcccttcctctctcttcaccattccttctataactcttatttttttggacaataaccaactcagcggcactcttgagtttgggaatatatcttcaccgtctaatttactagtgttacaacttggcggtaacaacttgagaggtccaatccctacatctatttccagattagtcaaccttaggacacttgacctttcccatttcaacatccaaggccaagttgactttaatatcttctcgcatctcaagttgctaggaaacctttacctatcccattccaacaccaccactacaattgacttgaatgcagtcttatcatgtttcaagatgctcatttcattggatctctcaggcaaccatgttttagtcacaaacaaaagttcagtttctgaccctcctttgggattgataggctctttgaacttatcaggatgcggtatcaccgagtttccagatatcctaagaacgcaacgccaaatgaggacgctagacatttgcaacaacaaaatcaaaggccaagtgcctagctggttactattacagttggagtacatgcatatctccaacaacaatttcatcggtttcgaaagatcaacgaaacttgaaaaaaccgtagtcccaaaaccatctatgaagcacttttttggctccaataacaatttcagtggaaagattccatctttcatatgctcgttgcgctctctaatcattctcgatttatctaacaacaacttcagtggtgcaatccctccttgtgtgggaaaattcaagagtactctttcagatcttaacctacgtcggaatcgtcttagtggaagtcttccaaagactataataaaaagtttaaggtctcttgatgtgagtcataacgaactggagggaaagcttccaagatctttgatccacttctctactcttgaagttttgaacgtggaaagcaacagaatcaacgacacgtttccgttctggttgacttctcaaccanagcgacaagttctagtccttcgctccaatgcattccatggaccaatacatgaagcctcgttccttaagttacgaatcatcgacatatcgcataatcatttcaatggaactttgccatcagattattttgtgaagtggagtgctatgtcatcacttgggacagacgaagatcggtcgaatgcaaactacatgggatcaggctattaccaagattcaatggttttgatgaataaaggtgtagagtcggagctgatacgtatcctcacaatctacacagcactcgacttttcgggaaacaaatttgaaggagagattccaaagtccatcggtctattgaaagagcttctcgtgctcaacttgtcaaacaatgctttcaccggccacatcccttcatcaatggggaacctgacagctctcgagtcactggatgtatcccgaaacaagctttcaggagaaattccacaagaactagggaacctctcgtaccttgcgtacatgaacttttctcataaccagcttgtcggtcaagtaccaggaggcacccagtttcgaacgcaatccgcttcgtcttttgaagaaaaccttggactttgtggtcgtcctctcgaagaatgtagagttgtccatgagccgacgccttcaggggaatcagaaacattggaatcagaacaagtcttgagttggattgcagctgccatagggttcacacctggtatcgtgcttggattgaccattgggcacatcgtgctttcctccaaaccgcgttggttcttcaaggtgttgtacatcaacaacagtcgtagacgcagacgaactcgttctgaggtaccttttcccttaacgttttgttctctataacttgaaacctttcaatagaatcaatcgttgcactatcagaattgaattttgatcatccttcttaactttgatttgcaaataagaaatcctaaatcacggaattgaagacgttcgttcgagaagaagaagatggaggaataaagcaggaggatcgttatgtgaattcgaaattgggctgataaaatgggcttgcttacataatttaggcccattaatgaaagacgtcggcgaagaaagcaacgttgtacggagaaagtaataattacaagaagaaaacgaagacattcatggacattaatcatggaag

SEQ ID NO: 166159 - DNA, 280 bp, Arabidopsis thaliana landsberg
cgcagctgcgaagtgcgcaatacggctactccctgcgccaggccttggcccagcgcggcatgccgatcgtaggagtgtgacgctgtatcccctgctccggcggctggaaaagcaggggctgctggcctccgagtggcgcatcgacgatggcccgccgcgccgctactaccgcctgaacgacgccggcgaggcgctgctcgccaatctcacgaccgtgtggagcgacctcgtcgccaccatgggcggcctgctgaagggagcggaacatgaacccgaatga

SEQ ID NO: 166160 - DNA, 2076 bp, Arabidopsis thaliana landsberg
gccattggtacgagtaggcgagaatccgattttataaaggctagtgaagcgaataacaattccttggaacctcaattggctgatcacggcgaacacacagcgatagagatgaccgggacagaccgaccgggcctcttctcagagatatttgctgctttcgcggacttacattgcaacgtcatggaagctcatgcttggagccacaacgctcgtttggcttgcattgcctatgtctctgacgacaatactcacactcccattgatgacccgagccgcttggcttccattgaggaccacctaagtactgtgatccgtgccacagcggatcccgcctccaactctacacacgtgggtcacaaggaaaacgagactgatgggtttcttgcaggacaaggcaaagggtgtatgaatagcaacatggagagacggttgcatcagctaatgttatctgtgagagactttgacgaaccgttttgtgagccttcttcgttgtcattattgtcgtccaagttagagtactgcgatcataaggagaggaagacaactatagtttcgattgggaattgcgaagaaagaggatactctattgtcacagtgaaatctaaggatcgaagaaggctcatgtttgatacaatttgtactttggttgatatgcaatacgttatctttcacgccgctctccggtctgatggagctgatgcttttcaagtagggcaagaatatatatagcttccttgaaaccattagacccttagggtttgatgttaatatcttggtatgaaaattgtaggaatacttcataagacacatagatggaagggcattgaacacggaaggcgagaaagaacgggtgattaaatgcttggaggctgcaatagaacgccgcgtttgcgaggtatgttaacatttctctatgtgttaaccagaagagatcaatccacaatgactaactttgagatgtctcagacagaagaatattagaggaacattcaccaaactgtttgggttctatttaagaatggtaaacaatttgggtgtgtggtctatggcttaatgcagggcgtgaagttggagttatgcgcagagaacagagtaggcttactctctgacatcactcgtgtactacgtgagaatggtttaaccgttgtccgtgcagacgtggagactcaaggccaaaagtctctcaatgctttttacgtcagagatatttccggcaacaaaatcgatatggagtttgtggagtcagtgaagaaagagatgagaccaatccaccttgaggtcaagaatgaagacacaaaaatagacacagttggatcggatgaaccgacagcctcagcctcagccacaccgcaaccgcaaccacaaccgcaccgtttctcgcttggtgacatccttcgatcacagatggaacgcctttctctcaacttcgtcccaaccaaatgattgaaagttagtaattacgagtatggtataaagatttagatcatctatatttcttagaaagttgcaacaattctttattcattaactaataacaacaaatctatctagacttttaaggtttactacatttctgagatatgagttacaaaatctaacagaactttaccttacgtaagcttcaagttaagtctacgtaaccaaatggaatgaagagtcaagtgaaatgcatcaaatctctgaggaggatcgttaagctcgaaatgtctcctcacatacctcaagttacttttaagccattcatatttctcattggagatcgacatgagaatctccttcaacctcggaatctctgaaacgtcgaccagtacagagaaagtctcccaacgaagaacatcagtgaatggtaacacgaagttaaccgagagaatgacggggatacactcagagtagatggcttcgatgactcgaggactagctacctcatacccactgggacaaaaacagaactttgaacttctcatgaaatcatagtagtttaagtgtttaggaaggtattcataaacaggcatatccaggtcacgctgtttccagtgttttaaaagaatcggtctaaccggaccgtgggcttcgcct

SEQ ID NO: 166161 - DNA, 3390 bp, Arabidopsis thaliana landsberg
atgaggcgtggcgatgacgtgaagctttttaaattgaagaccatcggtgacgaggtgaagacgtgaagcctaagatgggaatgttggtggaatcgtcctggaaacgacgatggacgtaaaatcggtcacaaaggtggctgatctgatagccgcagacatgcatctttgggctacagccaggacgtgcttgtcgcagaaaaacagtaataactcttgttaaacgtaatcaattgaggcaaggatgaatccgttagaaagataagccttgtagcttcaaaatgatgtgcagatcgactcctggttccttttagatcgccgggaaatcgatctgaaagcagacagatcgggtgtagacggatctgtgtctcgataaacaacgcatgcttgagagaaaaacctataactctcggaagacagcaccaaatggagcaaaatcgatcttgttggaaagataagcctcagagcttcatgatgatattaagatagcctcttgatgttttctgaatcgttgggagtttgctttctaatccggttgctcccacagttcgaatctgcgatttgacatgtgtcatatgtttcattgaaacagtgataacgcttagtaaacagctcggaattggatgaggtcggtctctattgaaagataagcctcggggctcagttgatgctttgattccgaggtcaacagatcggatatagatcgatctgtattttgtcagtcttctgcagataaacggcagtatctccgagaaaacagaccctaacgaagtgagctggggcttgttaaaaagaggagcctcagcctatgcaatgtgcttttcaagatcatcactaagacgatggtagagcgtctgaaacctttaatgacaaatctgattggtccggctcaagctagttttatccccgggagagtaagtacggataatatagtgttcgttcaagaagcagtccattccatgagaagaaaaaaaggggtaaagggctggatgcttttgaagttggatttggagaaggcttatgataggatccgatgggattatctggaggatacacttatttctgcggggttccccgaagtttgggtaagatggataatgtgctgtgtgtcgggcccggagatgagtttgttgtggaatggagagagaacagactccttcaagccgttacggggcctccgccagggtgatcccttatctccgtatttgtttgtgctatgtatggagaggctttgtcacttgattgagcgatcgattgataacaaacagtggaagcccattagtttgtctcaaggcggtcccaagttatctcatatctgttttgctgacgatctaattttatttgcggaggcttcagtaatgcagataagagtgattcggaaggtgctggagacattttgtatagcctctggtcaaaagattagcctggagaagtcaaaaatatttttttcagggaatgtctcacgcgatctgagcaaactgataagtgaggagagcgggattaaagcaacaaaagacttgggtaaatatcttgggatgccagtacttcataaacgcatcaataaggatactttcagtgaatttttggagaaggtctcttcccgtttgtcgggttggaaggagaactttgagttttgcgggacggatgacgcttaccaaagctgtattatcatctataccggtccatacaatgagttctattgcgccaccacaatcgactattactcgattggacaaagcttctcgttcctttctctggggaagcacggctgagaagagaaaacaacacttggtgtcttggaaaaaggtctgcttacctaagaaagatgggggtttgggcattcgcaatgcgaaattgatgaacaaggctcttattgctaaggttggttggcgtctgctgcaggaccagtcgagtctttgggctgaggtcttaagaaaaaagtataaaattggcgatctccgggattgtcagtggctgcgtaagtaggggacttggtcatctacttggagaagcattgcagcagggcttgtggatgtgatatcgcgggggatttgctgggttcctggtgatggacatcgtattcgtttttggcgtgatatctgggtatcagggaaacctttatgggaagatgggcagggcgtggttccggcgaacttggagacagagtcagtgcggagtttgtggaaggatgatagtggctgggatatcagtaggatcagtccgtatgtttcagagagccgatgtctagagctacgggcagtcgtattggatcatgtgacaagggcgagagacagaatctcctggaatgagagtcagaatggccaattcagtgtatcgtccgcttataatatgctgagttgggatgatagtccacgccctaatatggagaaattctttaatcggatatggagagttaaggtcccagaacgtgtgagagctttcttctggttagtggacaatcaagggattatgacagatgcagagcgttatcgaaggcatattggtgagtcggagatttgtcagatttgtaaagggggagtagagacaactttacacattctcagagattgtctagctatgtcagggatctagactagaattgtgcctcagaggaagcggcgtgcgttcttcgataagactttgtttgaatgggtgtttgataatctgcaagaagaaacccctttccaatagagctcttggtccacggtgtttgctatggcggtttggtggggatggaagtggagatgcggtaacatttttggtgagaaaaggaaatgcagggatagagttcagttcatcaaggatgtcgcgaaggaagtatttgtggcgaatgcaaggactacagttcttaacggggttccgacaagagtggagaggcagattggatgggtcgcacctagtacggattggtataaggtgaacacagacggtgcttctcgtggaaacccggggttagcgacggcgggtggtgtgatacgggatggagctggaaattggtgtggaggctttgcgcttaatatcgggagatgctcagcgcctttagcggagctgtggggggtttattatggcctttacctagcttggactaaggcgttgactcgtgtggagctcgaagtttattcggagttggtagttggctttctcaagacagggatcggtgatcaacatccgctgtcgttcctggtgcggttgtgccatggcttattatcgaaggactggattgtccgaattactcacgtgtatagggaagctaatcgtcttgccgatggataagcgaactatgctttctctttactcctatgtttgcatttgttggagtctaggcccgatgttgttagttctattttgttagatgatgtagcgggggtttcgtacccgagacatgtccaagtg

SEQ ID NO: 166162 - DNA, 3452 bp, Arabidopsis thaliana landsberg
atgagaggtgttttggttgattggttagtggaagttgctgaagagtataaacttggatctgaaacactttatctcactgtctcacatattgatagattcttgtctttaaagactgttaacaagcaaaagctacagcttgttggagtttctgctatgcttattgcttcgtaagtgttttatgattcttcctctcttgtgtttgttgtcattgtttatgtatggaagctaatggaagtattgaaatgttgtaggaagtatgaagagataagtcctcctaaagtggatgatttttgttacattacggataatacgttttcgaaacaagatgttgtgaagatggaagctgatatacttcttgctcttcagtttgagttgggaagaccaacgattaatacttttatgaggttagatttgtgtgtattgctgatgattacttattggatcgtcttagtttcattggtctgattctgtgtgttggtgtttgtgtagacggtttactagagttgcacaagacgatttcaaagttccacatttgcagctagagcctctttgttgctatttgtcagaattgagtatattagattataagactgtgaagtttgtgccgtctctgttggctgcttctgctgtttttctcgctcggttcatcatccgtccgaaacaacatccttgggtaagcatatttgtctcagtctctttcaggttttagtctgctgtggtcattgtttagaatgagacactaatgatttatggttgtgaatatgtaaacagaaccaaatgttagaagagtacacaaagtacaaagcggctgatctacaagtgtgtgttggaatcatacatgacttgtatttgagcagaagaggaggtgctttacaagctgttagagagaaatataagcaccataaggtacttaaacattacacattgataaaatcatttgaataagcaaagctttcttgatacttaatgttgcttcttctcggtacagttccaatgcgttgcgaccatgcctgtttcaccagagctgccggttaccttttgggaggatgttaccatttgatctgaggttatgctatcttaagcaaatgttacggagctggattaccgaatcttgtttcaaatagtataatggacacagatcttcaagtgaagctagaagagtaagaaatatagaagtgaaggcaggagcaaataagtctgcgttatgtgaagatgtgtgatgtattattgaaatctcttcttttttatttacaaaattttagtgtgaaattcggaataatataattttatacaattatgcaatatgatataagtatttatgtgacatgatcttattttgtttaagcattgagcctacaacggtatgtttaacttaatgaaaatcctagagggctaaaactctagaagacatgttgttatttaaagaaactaataaaatctcaagaacaaaagaaaagaacagattgtctatgagattgataatcaagtttcctaaagagagattaaacttgagaaacaacaaacaagggagctttagcgatgacttgaaaagtttcggtgtgaagatccaaagacaaatccatggtttcaactttcaccctcgtgtgaaccagtgaagtgagccatcaacatacacaggatcttgggtgtgagaaaccagataaggggatgcaggacaacgtacctccaagtgttggttgcaaaatcaaaaacttcacaagttgtagcgttgtcgtttaggcctaactcagcggaataagcaaatcaaatcgaaattataattagggttctactttacaattttctccaaagtaaaattacaagttttagattaaaaaaagataattatatgtaattactttttgagatttttaatcaagtaaaaaaaggtaatttctctaaattaacacgttttggaacgattttttttttaatttcctttttttaattacttgggatttcgtgttcaacaagttattgttttgggctttggtttaattttccttttttttttagtctgtctcatctctcatctgaattctgaaacctggttgttttaggatagagtcttctactctatatataggacttagtgtaagatttattgttgttctttcgaagatgtgttcttgtttttcgataaatatggtgtctaagaaagataaacagattcattccgaccataaccctcaagatgcttccccggtagagtgggcggaaattcgacataagctacttgcgtttcaagagaacattcaatcaggctctgacattgacgctaggtctgatgatccacagatgtgtggactttatgtctcagatatctacgagtatctccgtgaattagaggtacgtaataagatctcctacttgctctgtttttggacttagaacattgacaagtttcaataggtcaatttagtatactttatctgaagagtttctatgattgttctctgtttggacttagaatttgtggatatgttctgaagatttgtgtttttggtttggtgaatattcaggtgaagccaaagctaagacctttacatgattacattgaaaagattcaagaagatataacaccaagcaagagaggtgttttggtagattggttagtggaagttgctgaagagttcgaactcgtgtctgaaacactctatctcactgtctcttacattgatagattcttgtcattaaagatggttaacgagcactggcttcagcttgtgggagtttctgcaatgtttatcgcttcgtaagtgtttttgatcctcttgtattactctctttgctattcattgtcatgttgaaacttacatatggagtggcttctcttttttggcatttgatataaataggaagtatgaagagaaacgtcgccctaaagtggaggatttttgttacattacggctaatacttatacgaaacaagatgtgttgaagatggaagaggaaatacttctcgcgcttgagtttgaactaggaaggcctacgacaaatacttttctaaggttagaattgtgatgaataatactgacttttggttgtatcttatggttctttgttctcatcttttgttgtgtttgtgcagacggttcataagggttgcacaagaagatttcaaagtgccaaacttgcagctagagcctctttgttgctatctgtcagaactaagtatgttagattatagttgtgtgaagtttgttccatctttgttggctgcttctgctgtctttctcgctcgattcatcatccttcctaaccaacatccttgggtaagaacttttgtctcaatctctctttttcaggtttatatgttgagttaatcttttgaatgagacactaataatctatggcttgtaatgtaaaacagagtcaaatgttggaagaatgcacaaagtacaaagcggctgatctaaagtgtgtgtggagatcatgcttgacttgtacct

SEQ ID NO: 166163 - DNA, 3891 bp, Arabidopsis thaliana landsberg
gtttgagtttgatgaactggtgcttcagaggcgttctatctcctagggatcacatggtaatcacgaatgagcaatttacatttctgtgtgcttataatatttcttgcaggtcttatcgcaatggtagctataaaattcttcccttttcaatttaacttgagtctccatgaatggaagtttcagtgcttcccatacctgaaagagatttttctttttactaggttaacacatggggttactcgacagttaacttttttgctccgatgagccgatatgctagtggtgagggagaccctattaaagcttcgaaagagtttaaagaaatggtcaaagccttgcattctgctggtatagaggtagcaattcccttgtattgctccgttttcttggggtcgatgcagtttgttccttgttgaactttttattgtaattgattattcttcagaagtattcttacaagttttctctgcaggtcattttggacgtagtttataatcacaccaacgaagcagatgacaaatacccttataccacttcatttcgtggcatagacaacaaggtgagtcataagaggattaacattcatgtcggtttatttattttcttatcttaaaactctaagcagtgagatctattatgcaggtttattacatgcttgatccaaacaaccaactgcttaacttttctggctgtggtaatttattttaaagtttatattgcagactttacttttcaaaaattccgtacttgaaatgaaagtttggtttacagtttgctgtagtatgtgtgctcaacgtttcttttgctttctgtctccagggaatacactgaactgtaaccatccagttgttatggaactcatacttgatagcttaaggcactggtatggacaaaatctatgttagcagccactgtaactaattggaccaaatatcttgcagtttatcctggacatgacactgatatgaaagaattgcttgttgatttttctatcttcttgacagtcattgtggttacttcacatagttaatcattctggttctgctttcttctctttacttaaccgcagggtcactgaatatcacgtggatggtttccggtttgatcttgctagtgtgctttgccgagcaacagatggatctccactcagtgctcccccactgataagggtaggttttaatgcattgagcttgcatattcagaaaataaaatagaaaatcttgtgccataatgttcattttgtaatttcttattgatcaaggcaattgccaaggattctgttctgtcaagatgtaaaataattgcagagccttgggattgtggaggattatatctagtcgggaagtttccaaattgggataggtaaccgttttagcttcataactagcttaagttgatgactcccaatagtactatacattgtagttccttccaaagttctgtggttattaactttgtgtaactggtatggctactggtggatttttcccaagtcaggtgggctgagtggaatgggatgtaccgggatgatgttagaagatttatcaaggtattcaacattggagtctttttcacctgatctttggaaaggcatgacttattgcagatgcactctaatcttccacattgttagggtgacagtggcatgaaaggaagctttgctactcgggtttctggatcttccgatctttaccaggttattatattttgtattcattctgaactttattcagtgaacacttagatgcattaactgcagtagaatccaagtaggtttaatgatatcatcgcactttccctcttctcttatataggttaaccagaggaagccttaccatggtgtaaattttgtgatcgcacatgatggattcacattgcgagatcttgtatcgtacaactttaaggtactttttgatttccaatgtattgattttaaaacatgaatgagtcagcgctttatgtatctcttctgtatgatagcacaatgaggccaatggagaaggaggaaatgatggatgtaatgacaatcatagctggaactgtggttttgaaggtacaattaaaagagtctcgcttcacaatattcaagcattgatcgtttctctgtataatattcttattacagcattcaagtttaataatctgtttattgacaggggaaactggtgatgctcacatcaaatctttacgtactcggcaaatgaagaactttcatttagctttgatgatttctcaggtgcgtatttgccaacatacactcgtttaaatactgtctaaaattctaaatgcatatgaaaccgatggtgatcaatgatcagggaacaccaatgatgctaatgggagacgaatatggacatacacggtatggtaacaacaatagctacggacatgatacctcccttaacaatttccagtggaaagaggcaagtcttacgcctcgcgttttgtcttccctgtttactacggattcctccatgaactgaaatcatttttttttattaaatccagctcgacgcaaagaagccagaaccagttcatgtttttctcggaggtgatcaagttccgacattcacaccatgtactcaagcatgaaaatttcctcacccaagtaactaacttcctcttggtttcatctattccttggatttttgagtgctactctaattttcaatgattgtctaaagggtgagattacatggcatgaagataattgggacaacagtgagagcaagttcctagctttcacgtaagacacaaaagtcccaaagtttcttacctaactgtgttatagtactctacagagttatcagatttcagattaataagtgactcttcttgcagtctccatgacggtataggtggccgtgacatctatgtggcattcaacgcccacgactactttgtcaaggctctgattccacagccaccaccgggaaaacaatggttccgtgtggtcagtctttctttcttttgtcttctttggttctctaattctatgactgattcaatgtcatgtttccgcaggctgacacaaacctcgagtcgccggatgattttgtgagggaaggtgtggccggtgtggctgatacctacaatgtggccccattctcttcaatccttctccagtccaagtaagataagcactcacacgataacgcacggtagaggaaaaataaggtttatgagttatgagtaaaaaagatccatgactccatcagtctcttgtaaaagttgattacatgtagaataataaaatgtccgacatttccaatcacaaataaagatatatttagagcaatggtacatttttttctaatcatggaaataccaaatatatgtagtgatattattaacttaattttagttaaatgtattatctatataatgtaaaagtggataatctgacgcgaagagttcgtacccatccacatcctatcaactatgtcaacaatgtccttcaacattggcttatttgagtcaatttagtattttagtataaatgtctgacaaaaataaaaaaaatcatgtaaaatttgataatctaaataaatatcataaatcttaatgattttgggttttacaacccttacttcataatcgagtttaaatagtccatagtatttgatctgcaagatttagtacatttgacattatcgaaaaacacatttcaacagaattttgaatttattcaagcttcaaaccatatcctccacaaaatgtgataaatttgtcaaaaatttttatataggatttgtttttataacaaattgtgaataataataaaagaagtcaccccatttctgtctttcaacttaaggtgactcaccacctacttaccacattgatattgtcatcttcgaagaatccaaactattttttcttctaatccaa

SEQ ID NO: 166164 - DNA, 531 bp, Arabidopsis thaliana landsberg
tctccacgacagcagaatcggtgtcctcttggaggttaattgtgagactgattttgtctcacgtggcgacattttcaaggaacttgttgatgatctggcgatgcaggtaactccaagtttctagctgaaacattttcttcgttttgctataactgagaacataatttgacctgacatgtaggtggctgcgtgtcctcaagtagagtatcttgtaacagaagatgtttcagaagaaattgtgaagaaagaaaaagagatagagatgcaaaaggaagatcttttgtcgaaaccggaacaaataagggagaagatagtggacggtcggataaagaaaaggctagattcacttgcattgcttgagcaaccatacattaaagacgataaggtgatagttaaggatcttgtaaagcagaggattgcaaccattggagaaaacatcaaagtgaagagatttgtaggtacactctcggagaaggccttgagaagaaaagccaggactttgctgctgaggttgctgcccaaactgcagct

SEQ ID NO: 166165 - DNA, 2290 bp, Arabidopsis thaliana landsberg
atgacgatgtccgatcttccgccagatttggtcgaggaaatactttctagggttccggcgacatctgtgaaaaagttacgatctacttgcacacaatggaacgctatattcaaagatgaaagattcactgagaagcactttagtaaagcatcaaaggagtctatggttctcatgttgaaggagcatagggtttgcccggtgaaagtcaatctcaacaagtcgtgatggtttgttgttatgcaccatcaaggataatagactcgtggtttggaatccgtgtttgggggaaaccaagtggatccaactcaaagttgattaccggagatacgtctccaagttttgtctagggtatatccaaaacaacgaatctcgccgtagctataaaatcttgcggagttagtatagttacgatgacaaatcatcaccgcgccaaagagatttgggatttgaaatatacgagtttatctctgattcgtcatggagagttcttaatgacgtcaatcacgaattcgttataggaagtagcgtgtctttgaagggaaatacttacttgcttgcttatgatgttgaagaaaattctagagttttactaatgtttgattttacaacagagagattcaaacgtctacgccttccgcatttccaagatgttggtaatatggatctatcagctgttagagaagaacaactctcaatattacattggactcgtaatacatcaaagatggagatttggataactaataacattgatactgatgctacattgttgtggagactgcacttacacactcaagtcttctcacgtaattgtgttcgagtcttctcaagtctatatatcgacaaggagaagaaagttgtcttgtgttgtaatgttaatgatgatgcgaccagcaagaacatagtatacattatcggagaggacaatggatattacacagaaatccctttcctactccctataaacatacattgggttctacttgaccgtaataaaaaatggtattcatctattttcaattatgttccgcgtttggttcaaatctataatggtcatctcttatttttttcttaattaagtatctgtttttgaacaatgtagagtttttttttctaaccaaaaataaaaattaatttgattcgatgatgagtttttagtggtaaaaatgttgtttaatacacaaatttttaaaaatggttatttaatacgtgaataatttaattatggataggttttggtaccttatttatggttcctttctacatagcgtgaaatacgtgaagttcaatcggcccaagagttgtgggctaaggcctaaaacctctgttttataaaaacaaataatggtttagggcaaacgtgagaaaaacaaaacaaaaccctaatctctctgtttacagggacgagaccgagtctttcttcttcgttgggagatcagatcacaaatagggaaccattgatgatgtcgaatcttcctttggatttggtagaggaaatactctctagggttccagccacatctctcaaacgattacgatcgacttgtagacaatggaacgctttattgaaagaccgaagattcacagagaagcactttcgtaaagcaccaaaggagtctctagttctcatgttgaaagaaataagcgtcaatctcaacgttactcctccatctatagagtttaaagatgcacttggcttaaaggattcccattctaattcagaacaagttgatatagtccaagttcttcactgcgatggtttgttgttatgcaccaccaaggacaatagacacgtggtttggaatccgtgtttgggggaaacccattggatccaattcaaagttgattacgggagagtctactccagctttgctctaggatatatccaaaacaacgaatcttgccgtagctacaaaatcttgtggaggtggaaaagtaacgattacaaatcatcaccgcgtcaaagagggtttgaaatatacgagtttatctctgataaatggagggttattgatgacgtcaatcacgactctttggtcaatcacaactatttaggacgttgctgtcgcgtgtctttgaagggaaatacttactggcttgttgatgatgttgaagacaattctagatctttacttatgtttgactttaaaacagagagatttaaacgtctatgccttccgcatttcgaaaatgttgctcacatggttctatcatttgttagagaagaaccattttagtcataaattggtggccgtctacaccatagtttgagatctggttcacccaataa

SEQ ID NO: 166166 - DNA, 402 bp, Arabidopsis thaliana landsberg
atgagccagttgcagtgcttacgcgctcgggattacccgcgcatgccttggaagaatggtggcggtttcacggaagagatcacccgcgattcgggggatggtctggacggtttcggctggcggctttccattgccgatatcgaagcatcaggcggattttccagcttcgccggctaccagcggatcatcacggtgttgcagggtgacggcatgcgcctcagtgtcgatggtgtcgcatcgcggccattgttaccgttcgatgcgttcgccttcgatggccacagccaggtgagctgtcacctgctgggtgggccgattcgccctttcaacctcatctatgctccggagaagtaaaagggcacgcctgcagtggttcaatggctgcacccgattgttcagtcc

SEQ ID NO: 166167 - DNA, 2070 bp, Arabidopsis thaliana landsberg
aatcgctcgactttgagttgaagtgaaggagaaagttatagttcaatccacaaaggaggaaattgatggtttcattaactgtattttgacaagttctttacgaccaagtaatatattctataaggtagagggagaaatcgatctgccaagtgaaaacatggaagaagccgaagttaataatatatctttagatggtgaagatgatgaaagtgtattcgattgctgcaacgattctgatggaaccgatgtgtctgcattggagctggcggttggacaatgttttgaaacaaaagagcacttgaagaaatgtttgaagatacttgtcgttttacagaaatttgattttgatgttggtaaatcgactctacaaatttatatagtcaactactgggttaaaggatgtcggtggagggttcgagtgtaggcgactctacaaagtttcatgtgatattatttaagttggaacatatatgttatgttacagattgtttcatcacgcgcccaacacacaaaatacttggattgctctataagaattacgttggtaggattggacctaaggttctcccaatgcacgttgtcgaagcattcactaaacaatttcaaatcaaggtacgatttccaatttcttggctttctttgtttatgaattacaccttgttttcaaccaactaatcactaaagtcaatacattttgttagatggattactggaaggcttatcggacactaagatctgtccgagaattggttaggggtacaccagaaagtggttacgagcaacttccggtatacttgtacatactaaggagggaaaatcctggaaccttcacgcgacttgaagtggatgaaacacagcgatttaagtacttgtttcttgcgtttggtgcaagtattttaggattccctttcatgaggaaagtggtggttgttgacggtacttttttacagggaaaatacttagggacacttcttacaacaacaactcaaggtggtaactttcagatatacccgattgcttttgccgttgttgatactgaaaatgatgcctcatgggaatggttttttagacaactcagcagtgtgattcagaatgatgaaagtctcgccattatttctgacaggcaccactccattaaaaaagcaataatgatagtgtatcctaagtctagccgggaatctgtacataccacttgtacaagaatatattagtttgctttaaaggttgggatgcatttggtttggcaaagaaggcagcaaacgcttacagattagtcaattttgaaaggatatttgatcagttttaggtttgaatcctgctcttcatgcttagcttcaaagagctgatgtacgtttgtggactcgtgtgcatttccctggtgataggtacaacttgcttacaagtaacattgcggattcaatgaataaggtcatgtcacccgcgagtagccttcctattgtacaactgaaggaatgatgcattgaatttttctacatatcttcctcgtggagtagagaagatcttgcaggtttcatttctaatacaaacacaatttatatacatccgtatattggtgattatagctaactaatgacaatgtattttctgtagagtcgtgtagagtatgccaaattgctaagtgtgcaagacatagatgcaaatcaagtacaagttatgtttggagcatctctgcatgttgttaatttgaaagacaagatatgctcgtgtcgcaggtttgatctagaaaagattccatgtgcccacgcgattgcagctgctgtaaaacgaaaactttctcagatatcattgtgtcatccttactttcagaagaattatttatgcaagtcctatgctaatgccatcatgcccaggaactttgatataactgttcccgaaaatgtcgtgtcgaagatatgtttaccaccagaagctcgtcaacaaccaggtagaccaaagaaatagagaattaagtctacattggagattgctatggagaagaagaaggctagaaaacaacacacttgtgacaattgcaagcaaattggacacaatcgtaagacatgcaaggct

SEQ ID NO: 166168 - DNA, 669 bp, Arabidopsis thaliana landsberg
atggaaggtgtaggatcgagattgagccggacgtcatcgagatacagtggtccggcggcgacggcggtgttcagtggccgtgtaaggaaatggaagaagaagtgggtacgtgtctcaacctcatccgtcggtgttttcagagcatctaaatccaacggtcgtaacaacagcaacaacagtaactcaccacaccatctacttctccataagtggactccacttacctcagcgacggttactgcctccgacgctaatggttccggtgagacggaggagccgcctaagcgaagattcagatacgctccagtaagttttttttctttcccaaatcattaaattagggttttagttgtgtgggattagtggaaaatgattgattttgtgtagattgcgatgcttgagcatagagaaaaagtgatttctaaggattctgaaattgaagagactgaagaattcgacactgaatctccattacctaaagctgttgagctagacatgaacctaacagactcggaccaaactaaggtaagcttcatttaaaattcagcaatgtaatgaaagtgttgccttttgttcatacttgtgttttatatacttactctgcaggaagcagaaactggtaatttgaatctgggactgtgtctgaattctgaagggactgaagaatga

SEQ ID NO: 166169 - DNA, 784 bp, Arabidopsis thaliana landsberg
cctttctcattagtcataacaaaaatgacaagaatcattgatgtttccctgttttgcttcttcttattctctcttggagccatgtcccaaccttctcaaaatctaactgattgcaaccaatttcccgacacttatcaatcaaaccgcaacaccgtcctctccactcttcgtaatcattcctccctcggaagctattacttcaatgccacggccggtctaagcccaaacacagtctatggcatgttcctgtgcataggaaacataagcaaaacatcttgttcaaactgtgtccattccgcaacgttagaaatggataaatcctgtgaatctcatgacacatctttcatgttctctgacgagtgtatggttcggtactcggataattctttcttttcactcgtagaagattcacctgccacctttagttactctcagaatgattctttgagttatccgcaattttacaatcaaacacttcctggaaaattagacgagcttatcctcaaagccccctcatctttttcgtcaccggttccatattttgtggaagataaagaacatgtgactcaagtggaaggttcgtatgatttagaggcaatggctcagtgtagtcctgatcttgatccaagcaactgcaccgtgtgcttgggacttgtggtcgaaaaattctccgaatgttgcagccaatctcgttgggctcggatccactttcctaaatgtcttctgaggtatgacatctctgctttgcaaccaaacctaacgagtcttggcgttacaacaaaag

SEQ ID NO: 166170 - DNA, 1273 bp, Arabidopsis thaliana landsberg
cggtacggagctgaacgtgaacaaactcggttttgtcaccggttttgtacgtgaaaccaatatggacaagtctattttgaaccgtgttagtgaattatttgatgaccggaggcctcatctaggtcttggaagagcctctaagacagcttctacgactttcttatcgttatgtgaggtaacgtaaattgcatagtttaaataacgttttcagtggtattcattttttttgttttgttttctacaactcatatgatataatacaataaaagcgttattacaaactaatacacttactatactagtaacatggaaacatcattttaataacttctcaaaaaatcccattcctttcttactaaatcatttagtgaccactatttttggacctattttacacattaaaacagattcacgcactggttatgcatagccaaaagattgagttggagccagttccggtgattttcaacgacggacgtacgactcgtgaagcggccaacaccagccacagctctcctcatcctcatttggatcccatttggaatggttctttctcccatccggatcctttccgggttcatcctcccaatgtggatcagaactcatgccatgagtatattgggctgccaaatcatcgtcaagggaaagcctcctcagccacgaggagcaggaaactccggtgttctctttgtatgtaatcatagaaccctaatggaccctgttgtaatatccaccgtgttgggacgcagcgtcatggctgttgtatactctctttcacggttttccaaactcgtctctcccattcccatcgtgcgaatacaaagaatccgagatgttgatgcgaagactatcaagctagagctgtccaaaggagacctagtgatttgtcccgaaggatcaacttgtcgccaaccgtttttgttaagatttagcgcgctttttgcggagttaacggacatgatagtgcccgtggcagtaaactgtagggttggattcttccatgcgaacactgtgagaggctggaactgtatggacatgatattctttttcatgaaccccagaccgggttacgaggttacgttcttgaacaagcttccagtggagggtggaggccacgtgtttatccgggaaaaagccgtatgatgtggcgaaccatgttcagagaatcttggcggacacgttagggttcgagagcactaacttgacgaggaaggataagtataaagttctcactggaaaggatgggacggtgccgcatgtgtcgtttcaggac

SEQ ID NO: 166171 - DNA, 1241 bp, Arabidopsis thaliana landsberg
atgtttctgcttagaagaagaatctctaaaggttaaaaacggagttggaagcaatggattcataagtgtcactagtttcggagctattggcgatggaaagactgatgatactaaggtgtttatttatagaatcatcactatttgtatcaaagtggtatgtataacctttgttgttatgtgtatcaatatatttcaggcttttcttaaagcatgggaagctgtatgcaaaggaggacacaatagaaagattcttgtgcctcaagggaaaaccttcatgcttaagcctcttacattcatcggtccatgcaagtcttcgaccatctccttatcggtatatatatatatatatacttgtctctttctcttgtttcaaattatattggaaaatccagccctaatgtgaaaaatgatttcaatagtgatcgattttagcttatgagtagacaataactcgaaccaatgtttaaataatttggtgatttatttacattagataagaggtaatcttgtggcaccgggttacacttggtatgcgggaagatacccaacatggattagttttgacagtatcaatggtcttgttgtcaccggaggtggtaccatcgacggtcgtggttctttgtggtggggcaacgttaataatcgcccctgcgtaagtccatttgcaagatcctcacaaccataaatatgaacttcgatcaaatgtttattctcagttattaatgatgtttctttttcttccttgcttttcttaggcaatgcacttcaacaactgtaatggtcttcggatatctaatctccggcatttgaacagccctcggaaccatgtaggtctaagttgttcacagaacatagaggtcacgggtttaaggatgacagcgcctggtgatagtcccaacacggatggtattgacatatcgaactgtataggagtccacatacatgactcagtgattgccactggagatgactgcatcgccattaatagcggttcctcttatatcaacataaccggcatttcttgtggccctggtcacggtatcaggtgatttctaaattcacagattcacaaacaatcatcatataatatacagaaaggtacatgctaaatcatgtatggtatggatttgatattatagcgtaggaagtcttggagtaactggagattttgaaactgttgaagaagtgagggtaaagaactgcacttttacaaaaacacagaacggtgtgcgaatcaagac

SEQ ID NO: 166172 - DNA, 1810 bp, Arabidopsis thaliana landsberg
aggccaacccggagaaaatcgcggccatcaccaacatggggcctatcaaagacttgaaaggagtacaaagggtcatgggatgccttgcggctctgagcccgttcatctcgcgcctcggcgaaagaggcctacccttgtatcgcctcctaaggaagaccgagcgcttctcttggacccccgaggccgaggaagccctcggaaacttaaaggcactccttacaagtgcgcccatcttggtgcccaccgctgcaggagaagccctcttgatctacatagccgcaactactcaggtggtcagcgccgcaatcgtagtcgagagacgagaagaaggacatgcactgctcgtccagaggccggtctacttcatcagcgaagtgctatccgagaccaaagtccgctacccgcagatccagaagctgctctacgcagtgattctgacacggcgaaagttgcgacactacttcgagtcccatccggtgactgtggtatcatccttccccctgggagagatcatccagtctagagaggccttgggtaggatagcaaaatgggcagtggaactcatgggcgagacaatctcgttcgctccttggaaggccataaaatcccaagtcttggcggacttcgttgctgaatggtcgacacccaattgccaacggctccgatccaaccggaactctggaccattacttcgatgggtcgctgatgaaaataggagccggcgcgggcctgctcttcatctcacccctcgggaagcatctctgctacgtgtgcgcctccatttcccggcgtcaaacaacgtggccgagtacgaggctctgcttaatgggttgtgcatcgccatcgagctaggggtttggcgcctcgacgcttgtggcgactcgcagcttgtcatcgaccaagtcatgaagaactcccactgtcgcgacccgaagatggaggcatactgcgacgaagttcggcgcctggaagacaagttctacggctggaactcaaccatatcgctcgacggtacaacgagactgcggatgagctggctaaaatagcctcggggcggatgacggttcccccgaatgtcttctccagagacatacatcaaccctccgtcaagatcgatgacacgcccgagcccgaggaggcctcggccacagcccgaggaaccctcggccgccaagggtgaggccctgcgcgtcgagggagagcggaatggggtcacgctaaacccgaactagcaggccccatacctggaatatctcctccgacgagagctgcccctcgacaaggccgaagctcggcgtactcgcggcgcgccaagtcgttcgtcttactgggtgatgaaaaagagctctaccaccgcacgccctcgggcattctccaacgatgcatatccgtcgcccaaggacaggagctgttgcaagaaatacactcagggggcttgcggtcatcacgcagcgccctgagcccttgttggaaacgctttccgacagggtttctactggtcgaccgcggtggccgacgccactagaattgtccgcacctgccaagggtgtcagttctacgcaaggcagacgcacctacccgctcaggctctgcaaacaatacccatcacctggccgtttgctgtgtggggtctgaacctcgtcggtcccttgcagaaggcacccgggggtacacgcacctactggtcgccatcgacaaattctccaagtggatcgaggtccaacccctaaacagcatcaggtccaaacaggcggtggcattcttcaccaacatcatccatcactttagggtcctgaactacatcatcacg

SEQ ID NO: 166173 - DNA, 1191 bp, Arabidopsis thaliana landsberg
ctagacaacttatgaaactatagttggattgcgcatttctcgctaatcaagtcttttatgttgaataaacaagtttaccgattgttatcttatcaaattgatgcagtgttagttcatcaggaactctaagagatggtccgttaactaaaagcactttggagaaattgaagaaaatgtttcgtacaaatgtcccaaagtcttatgtcgaaaatgttgggtatagagctgtacacaaaatgggattttgtgttgaagaaaccaaagagttgtatcacgtgaaggtggttttgttatttcttatgttagagattcatgattgtgtctgtaatttcattttaattcttttgtggttttggtttctgattttctaggtctcagacaacactcgtcctgatgtaaccatttcatgtaaatgtatggtggaccaacaaaataaacgactcaatttctataagataagtccttttcatctcccctacttaccacattttaagtgaatcatattgaagcttttgtttggtttttattcaggctgagcttaatgctttgaggcacttaaatcttgacgtctcatgccttgatcaagatcttgacatgaggttgatggttgactcaaaaaggacattaaccaatctctctgtgagttgactttgtctaatccatatttagtatccaagagaatgagttgaagaatattagcaagtggtgtagattaaaatgtgaaacatggttcttcgattgtatccaggagaatgagattacgaatcttaaagaattgactgattcagcggtggtagatccaactgtgaaaggtgggttaaagtggccacttgggaaatcttcttgtgcggatcgatacattgtttgtggtgtttggcatactgtaactactacgtacataaaccagactatgaggcttcaaatccgagaggctgatcgatatgatttcagaactggagttggaggaacctcaagtgaagtgaatttcaaactaaaagcattaagtactatactactaaaggtattttttgtttagacatggtcttttaattgtagtgatagtcaacaagtgacaatagttatgtttacaatttcaggaggaagatgtggagaggaaatgtgtttcagacatgctgaaagattgtctgaaagcggtttgggaatactttttgaaagaagtttagtgttagt

SEQ ID NO: 166174 - DNA, 934 bp, Arabidopsis thaliana landsberg
catctcctccagcatctttcgcggacacaatcaggactttcgtccctcccggaattgccattgctccctttgacaaaatgaaggctgttaaccgggagaactatcttcgttttgccaaaaagctagcagttgatcttcggaaatattcagtttaacacgcaagtcggagttttaaccaaaccttatgacttttgcagataatcttggagttcaactccaccttttgtagccacgaagactagctctccaacaaagagagtgaaattgacgttttcaaaaggacagaagaggaaaatgctggtttcttggataaggccaaaaaagttctgagccggatgaaagctgccgaagcgaggattcatagcctcgaggtgaccaatatcgacctatccgcaaaactcgagttaggcaaaaatgcctactttgctgctatcgagaatgagaggcgagctagagctaatctcaaagtctgcgaggagaagctgaagaaactcgaggaagagcagtccgcgatgttgaacgctgcgaggaaggaggaaaggagaaaagttcaggctcagttccatgacttttcttcgaaatacgggagcttgttcaaggagtccgaagaggttgaagcactgaaggtctcagttgcggagaccagagtgaagcaggaactactttaagagataaaaaagggggagttggaatcagttcgagccgatgaagttaagtacccagagaaggctgctgaaccaaagaccccccaacctgacctggttgaactcacttctctcctggacgacacccctccctagacagtcgcggagacaaccactcctgacgaggttttggtcaacaatgaacaggttctaacaagaattctgctttgcaacccgggatggcggtaatgttcccagtagatgttcagaaagactcccaaacagcggag

SEQ ID NO: 166175 - DNA, 2327 bp, Arabidopsis thaliana landsberg
cgcacatcattcaatctccccctcgaaacatcttcttcagaagatgattttcaatcaaatacaatatctcgttggaattaataaccataatcttaatgatcaaaattatatggttttcaataggcttataaatatcattatcttgtgatattttatcatagattattgtcatcgtattacttatgataactctgtaggagttttaatgattttcaaaataaatattagtttgattaatatattttgacaaatgtgagagtcgaaactcgcacaatcgaaattgtatttagggttccttcaaagaacggatctctgtgatattctcaaagaacaacagaattgttgattaccggggatggtgttcttgattttattattgagataatgttgatttgatcgtacaagtgtttcgaaatatagataataagtgtattgccttcaaagtcaaagcgttttttgatggcctgaagttgagagcgtttttgtgcgtatcccttttgtttgttctctgaggtgcttttatagggtccgagaatatcacctctcgcgatattctcggaagattcctctttatctttatcttgttgaaggagattgtttttatcttccgaggattctgggatttctgtatccggtgatatcttcgaagattatctcttccggggttttcggaggtgaagtgttttgaacttacatcggctaagtcttttgaagtttttcctcgtctaacccgagacctttccgagccgtgattaagttgtcctcgggtcatgatcgagatgctcggtctgcggtattcgaagttacgagtctgaaacggagataacgctggctaatctgagaaattttctcgagatccggcgggtgccaaaatccgaagtggaccggtactacatttccccctctaagggaaagaaaattatcgatgggttccagagcaaagacgagccatataccgatcacttcttctttgtagccattgaagacgcttcatcttcttcacgacgtttcttgtcctactagctcggagtcttccgaccatcgcactcaatttttcgtagatatgcaatcgacaaagctttctttgcaggaggtctatgccaagaagaaagaggataaggagaggcgattggcggaggcgaggcgccttgttaatgcgggattgatctcgccgcgggccgatcctgaggcgacccaagatgggaatgttattcccgatgctgccgcgccggttgatgcggggttgatcttgccgcgggctgctcctaaggcgtcccgagatgggaacattattcccgatactgccgtgccggttgacgcggcacccgctgaggctcagggaactaagccgtctattggtgcgcccgaggcggttgtggtgttacctgtaagtgacaaagtggcgggtaagcgcgttcgggttgacgatgaatcgtcaaagaagaagaagaagaaaaagaagacatctggctccgaggcggagaaaatactcccgatcttcgaagatcgtactgcctcggccaatctgctcgggggatgtgttggccccttgcttcctcctccagatactcttcttgaatctcggaagtatgccgagacggcatctcattttctgcgggtatgagctttgttacttgtaacttgttttggtgttgtcattgtaaatctaacttttcccatttccagctgtcgcttcgatgaaccggatggtacattcgtatgattcggctatgcggagcaacatggaggtggctggtaagttagccgaggcggagtctcggattcaggccatcgagcgagagaaaaacgaggcactctgcggaactgcgcgcagcggaggctggaaaggcagcaggtcgagagagatgccgctttgtgaatgaagagaaatggaagcaagatgagtcagcataatctcgaggcgaagtgtgagatcgtccgtcgtaagcggagtgtatccgaggagagagggcttcgtgacagcgaggtggctcaggccaggtaggcgacgaggcggagttgccgagacctgatattgccaaaataaggaccgccgagcacaaagtatcgctccttgatgagtcaatgaccgattcatgtacttgtctcaagcgcgagccaacgcgcagctgatcgaggcgctcgaaggtggcggagttctggagagagagagggagcaggtcgatgagtggttaaaagatttcgctgatgctgaggttaatcttaatcgcttcatggccgagctgaaagatgatctcaaagctccagctcccgagtccgctcctctgagtccgggtggtcataggtcggtcgagtcattaaccgac

SEQ ID NO: 166176 - DNA, 1144 bp, Arabidopsis thaliana landsberg
agaatatcgaaccttaatagaaatgacgaagaaagaagaagagcatgtcgtagaggtaagaagaaaaagaaggaaaaactcagattaccgtgtcttaaactaaagaaccctatggcaaaatgataagacatggaagcaaaaaacaactctctgatttatcgacaatcatttaactttagttcacttttagcagttcaacaaagactacaaggagatttagttaagaaagctctcactggtaggcctactacaagtgttttaactcgaaaaatatttagaaccaataatgtaatatcccggttttaggaatatgataatgcatgcaaagaggtttagaatatttgatttggctacttcagttatctttttggtcaaacgttcaaagagagctccacaattaagtacgtttgggctcgagtaatttcaggatgggtcaccttccgggaactggtttttaaaactgtgtgagtgaggaaaaaagacgggaaaatattttgtggtgatttgtagggttggtaaataagtctttaaacctcccggatgtagcaggcaaaccatcgacaaaggttgggcccatgggctcgagagaagacgtgagtggtatgggcgatcgaggtgttacagtggtatcagagccagatccagataagtgcggagtcaagaaggctctcaccgtcggggtgacggtcatggtgcgcaacgaggacgttgggatctataatgtgggtgaactgtaacacctcgattttatgaatatggtggtgcatgcacaaaggtttaaaaaaatgatttggccagctatgtcactaaagtgcacttatcattttggttaaacgtcttgagagaacttaacagttaagcttgtttgagttagaataattttaggataagataaccttccgagaaatgattgtcggaatcatgtgagtaagaacaaaacacgagagttggaataagtttttaaggcaattctcacaaatagcacaaaaataagttttgtatccaaatttagcacattatttccaaagttccaaaaatagcacaaatttaatagaaacaaatattcttaatttttgtggtgattcaaaatagtgtcaaaatcgcctaaaaactaatccataatccaaaattataagttataatc

SEQ ID NO: 166177 - DNA, 642 bp, Arabidopsis thaliana landsberg
ccatgagataaaaaagcatttccatacaccttatggagtatgctactgcaagaactcttcccatacaccttggtcgccgtttcacactgatgatcctccaagggcttcaatatgtacatcgaggtgactttgttcaggggaccttcgcagcggtaatgttttactctttcatagctatgaaggattagaggcaaaactcagcgactttagaaaatccaaacgaattaataatactagctggtggagccctgtaaatcgccacttatgataaaacttgatcatgtcactagagtccatttctcatggtatcacgaacgaagcacttgacgtatgggctgtgggtacttagttgataggtgatcttagatgaccaacatgtaactattttgcaatgttggagagtaaaaatcaaccacggctctcttaaccggaagagtgggcgtcaattggattaacatattctcaatgctctgcaagaaatagataaaaaaatttaaaaatttgactttattagttatattttccttggtataccggataactcgcttcgctgaccgataaaaccgaaccatgacctaaattgcgctccaaattttagcagtccctttcttcatttccttcctctgcttcttctccggtgga

SEQ ID NO: 166178 - DNA, 1086 bp, Arabidopsis thaliana landsberg
ttgattttttctttttcggtttcaagggttcaagttttggtgttgtctccatcaagagagctggcttcacaaacagagaagactatacaggctattggggcacataccaatattcaggcgcatgcctgtattggtggtaagagcatcggagaagatatcaagaagctagagcgtggtgtccatgctgtgtccgggacacctggtcgagtttacgatatgataaagagaggaagtttacaaactaaagctgtgaaacttttggttctggatgaatcagatgaaatgctgagtaaaggtttgaaagaccagatttatgacgtttacagatctcttccacacgatattcaggtttcgatctcaattgttcaaacagtagtaataattagtagattctagtttctatggtaatatgaagctaatacggttggtttataggtttgcttgatttctgctactcttcctcaagagattttggagatgacagaaaagtttatgacagatcctgtgaggattcttgtgaagcctgatgaattgactcttgaagtaggtttttccttctgccatttttatgctttaagtattagttttatcatgaaatgcatcaacctttggttttatagggaatcaaacaatactatgttgatgttgataaagaagagtggaaattcgatactctttgcgatctttatggaagacttactattaaccaagctattatcttctgcaacacaagacaaaaggtaaaagactcttgttcttaagctctggtccctccacttttgtcgataatattatacctttgatctgcgttttttatatatatgaaaggttgattggcttactgagaagatgaggagtagcaatttcatagtctcatcaatgcatggagacaaacgtcaaaaggagagagatgatattatgaaccagtttcggtcatttaaaagccgtgttttaatcgcctcagatgtatgggcacgagggatcgacgttcaaactgtatgatctctctttctctcattctctgtcttttaactatcaatgtcacaaagaaactctcatgttgacattaaaaactctttatgtaac

SEQ ID NO: 166179 - DNA, 466 bp, Arabidopsis thaliana landsberg
cgagatgatcggtgccaattccggtgtcggcttccaggtgatgaacgcgcaatacaatttccagatcccggtgatgttcgcggcaatcctgctgctggcatttctcggcctggccgccaacgtcgtcctcgaaaccctgcaggcccggctttgccgctggtcgaaggtcagggattgagcagcgaccgcctgcctcacaatgcaatccattcaaccagcggagcttaaaatgctgatttcccgtcgtaatctcggccgcaccgcggtcgccgccggcctgctcatcgcagccccagccttctccgccgaaccggagcaggtcgagatccgctatctctcgagccagggcggtctctccgcccacgaactcccctacgcgctcggctacttcaaggataccggcatcacgctcaagaatatcggttatgcccagggcggcccggcctcgctcttcgccctcgcgtcg

SEQ ID NO: 166180 - DNA, 1774 bp, Arabidopsis thaliana landsberg
  unsure (1)..(1774): unsure at all n locations
nnnnnnnnnnnnnnnnnnnnnntgatcttgttggtgatgtcgattccgaagctgaagaaagagatgagtttcacatggaagaactgctaaaagagtggactgacgaaccaccaattcgccacgatatgtacccggagagtgatgatgaagaaatcattagggaacaatggaagataagtgtcactaggaatcaatgtcagtctgctagaaagaaggctttgcaatggattgagaaggagtacgatgatcagtttgcaagattaagggattatgcgactgagatacttgaagcaaacaaggattcacgggttgaagttgaatgtctcacgagtgatgatggtaaagacatgttcaataggttctatgtatgctttgacagtcttagaaggacatggaaggagtcttgtaggcctctaataggcattgatggttgttttctaaagaataaggttaagggacagttacttgtagcctaaggtagggatgcaaacaatcgcatatatcctatagcttggggggttgttaaagtagagaacacagataactgggtgtggtttatgaagctgctgaaagaagacttcagattaagtgatggtgaaggcttcatcatgatattagataggcaaaaggtagcttagtgtcatttgtgtctgtttagtgttagctaatgtttgtcttattaccaacgtgttgttggcctagtggtaaatcttccaggtggaggtgctgggtttgaggcacgtagggagggatctcttctccaaaggagatgaatttaacctggtgtgggtctcgcctctcggagatgtagggcctttagacctgaacttccagatattcccaaaaaaaaatgtttgtcttattgtttcaggtttaatagcagcggttcaacttgagttacccaagatagagcaccggatgtgtgtacaacacatttatgggaactcgaagaagatttatggcagtaaaacaatgataaaaccactgctatggaatttggcttggtcttacaatgagaaagagtataagcagcatttggagaagatacggtgctatgacactaaagtctatgagtctgtgatgaagacaaaaccaaggagttgggttagggcattccagaagataggcagcttctgtgaagacgttgacaacaactcagtggagtctttcaacggatctttgaacaaggcaagagagaagccatttgttgcgatgttagagacaatcagaagaatggctatggtgaggattgccaaaagatctgttgaatcccatactcacacaggttagctactctattaagccttgttctttgcagattcttaacatgtgatatagccttgactccctttaaagcatatatttctcttactttgtaggtgtttgtacaccttatgttacaaagttcttagctggtgagcacaaagtcgctgctgctgcgaaggtgtctccaagtaccaatgggatgtatgaagtgaggcatggtggagatcttcaccgtgtagacttgcaggcttacacttgtacctgcataaagtggcaaatttgtggcatcccatgtgagcatgcatatagggtcatcatccacaagaagcttgaaccagagaactttgtatgttgctggtttaggacagcaatgtggaggaagaattacacggatggcctttttccacaaaggggccctaagttctggcccgacacttatggtatgagagtgtatgtaaatccaacagcttaaggcggagtagacaagaaaatgacaaaggctgtggat

SEQ ID NO: 166181 - DNA, 3182 bp, Arabidopsis thaliana landsberg
gaacaatgccgacacagctcaattgcttctccatgtttcaactggtgagtcttttgttatggatgattatatctttgtattaggatcctgtaagacagtattatcttattatagtactatcaaaaaattgttaattattttaactaactcaagttggtaattacaaaaaatattatttaatatgtaatgcttataaatttatggaaattttaataaaaatttctgtgttaaaattattcaactgtttatattctatgatatagttcttgaaatttaatatcttacttctatcttttttattttagcttatgtttgcggagaaaaaccaggtctcctacctgaaaaaccgttcgtcatggaagagatttgtaatgagaatggtcttcaattggatataaatctcgaaagggagctgatgaaacaaagattgaaagaactcaatgaacaaggttgttcagaagaagacactactttctacatgaaagaactcggcatggaaaggtgttgttgatgattgaaatatccttacatgctactactcatcagaatggaatgaaatatagtttggtattatgttaatgattaattagggcaaagcttcatggatggccaaacacatatgttttcaccaaatcgatgggagagatgcttcttggtaaccataaagaaaatattcctctcgtcattatccgtcccacgatgatcactagcactctttttgaaccatttcctggttggattgaaggactaaagtaaatctatcatcaattacgatttttagttttgattcaaaaatttaaacatactttgtcgttagtctaaggcagaactttcatttatgattgaataactcaagatttctaactaacctctctagatttttcctagctacaatttttctcacagtagtgatacatttgtatgtagaactgtcgacagcgtgattattgcatatggaaagggagtgctcaagtgttttcttgtcgatgtaaactcggtttgcgatatggtaagttgctaccatgactaaagatttgtattttcctaacagtcacatatcttaaataggggtgggcatttcgaattgggtttggttcggttcaatttatttaggtctagtaaaactctaactaaaatcaaccgaaattagtttgggttggtttgtgtttggataagtttatgttcggttctttttggttttattttggttcaaaaaatcaattatcgtaaaaaagcaagattctttagttcattgttgtttgaactttgaatttgataatatattaaagtaagcaacaagtttaagttgtaagtttaaaatgaataattcaaataaaccatgaaaagaattacatatttagttatttacaatattattaatataattagttaatcaaataaacacactaagttatcggttcagttttgttttaaaccgcacctaaccgacccatttggattgagaaaaaaacataaccgaatggtttgattctaaactttggtttggtttgggttggtttggtttggttcagttcgattaggttaaaatgttcacctctaatcttaagtatagatttctcatcctccttatttatgagtttattatttaaatataataatattaactaaaattaaataaaactcaaactcttataggtatcctaattatttttattgggtatgatatgaaaaacagataccagcggatatggtggcaaacgcgatgatcacagctgcagccacacatgctggaggttcaatggttcacatggtgtaccaagttggttcatctcaccaaaacccaataacatatggagagatccgtgaaattttgttttgttactttaccaaaaactcgttgcgcagtcgcaatggctcgctgataactgtctcaaaaatgaagctgataccaactatggctttgttcagcctctacatgaccatacgttacaaactacctctccaggtactaataagaatgagagggattttaaattactttagtatatttacgctaattatgatcaaacttataattactttctaacgaagaaaactaaatgtttttttcatagataatattttggtaatgtatagtgttatgatattaattctttcttttttcctccatcagttattaaaattggttcatataatatatccttcaagggaaggagacaaatacaaaaacaaaaaccgcaagatcgatatggtgatgagattggtaaagctttacgagccttacgtactcttcaagggcatgtacgtagaatatccctattatttttctagtgtgaaattttaactctctattagtcacaaaattaaatttcaaaggatggtttatatatttacataaatcaatttgtttttccagattcaacgataggaatactaaaaacttatgcgccaagcagaaagaagaggacaccagaaattcagaaaatttgatgtttgatttcgaccctaaaatcattaaatggaaagattatcttataaatgtacacattcctggcctcatcactcacgtgcttaagaagtaaaacacatacaaattttcttttctttttcaaatgtatcaccaataagttaagaccgtatttatttgtactgcaaccgtaatgatgcatatattttgtaactacgtatgtgttgttctcatataatcttattgtttcaaattaaataaatgtttttgtttgagttatgatttaacattttatatcgggaagacgagaaatcctaaatcgccaaggcttcgataagacgttggttcaccccctcttagctttcttgaacagaaactttaaataaaatattgattcattgaacggaaaatggaaaatgtcttcttcttttaattgaatggaacacttgtgctgcaagcaacaattttaaaccggtgatcgcagctgtgcaaagctaccgaggagcagtataaaatgctctgcgatcaccggtttgaagtatagaacgctaccgaggagcttcgcaacatatcgcacaacaggactcctgatatgtgttatcttcgttgtgcacgacttatatgttccagtagctatcgtgttccaaaagtcatcagcaactttgggaactcaaccggttctcctttcgtaaatccatacatgtcgcagatctcaaacaatgtcttgctgtactgctgtttgttgagagagaat

SEQ ID NO: 166182 - DNA, 1251 bp, Arabidopsis thaliana landsberg; identical to SEQ ID NO: 30872

SEQ ID NO: 166183 - DNA, 589 bp, Arabidopsis thaliana landsberg
  unsure (1)..(589): unsure at all n locations
cgacagatattctctttttgcctgccgtacatgaaatttacccggaaggtaccggacaattgagggttttcaatttcggctctttggaaacgatcctggaaggtgctttccggcccgggcatttccagggggtgggccaggtcatgcagcaactattagagatcatccggccggatttgctttttatggggcagaaagattatcaacaaacaatgattatcaataaattaatagatatacttaaaattaaagtaaagttaatctccagccctgttttgcgtgaagccgacggattggccatgagcagccggaacttacggctttcggaaaatgcccgcaggaaagcgcccgtgatccatgaaacacttcttttcgtcaaagaaaatttcctgaaaataccctttccaaatctgacggaacaagcggcccgccatattgaagatgccggcctcaaggttgattacctcgttatcnnnnnnnnnnnnnnnnnnnnnatactggagcgcccggtcagcgtaccgatgtctgcctggcggcggcatggctggacggcgtccggctcattgacaatgtttttctttaattttgc

SEQ ID NO: 166184 - DNA, 2538 bp, Arabidopsis thaliana landsberg
  unsure (1)..(2538): unsure at all n locations
gtcgagcactattagaatctttttacttcatccaacccggatcctgtccttgtccagaaaagtgtagaagaagccattcaacctaaaatctcagaggaagataatctgcaacttcaaaagatccctgatttacttgaaatcaaggaggctctctttgacattcattcggagaaggctccaggcccggatggattttcagcctgtttcttccaaacaaattggaataccgtgggacttgctctctcaaatgaattcagaaccagcacacttcaccataatgttaatgagacctttgtcaggctcattcccaaaatacaagcaccaaagaaagtagcagactacaaaccaattgcactttgcaatgtctactttaaaataatctccaagattcttacccagagactaaagcctttgctccacaagctagtgtctgacaaccaatctgcttttctagctgggagagctatagcagataatgtactcataacgcatgaaacgcttcacttccttaagacctcgggtgctattaagaactgttcaatggctgtgaagacgggtatgtctaaagcatatgacagagtagnnnnnnnnnnnnnnnnnnngattcttcaaaggatgggttttgcaagctgctggattgattggatcttggagtgcacatctactgtgacttactcctttctcatcaatagccagcctttggaaaaagtagttccatcaagaggtataagacagggagaccctctctccccttatatctttattctgtgtggtgaggcgttatcaggtttgtgtcgtcaagctcaggtttcaaaacacatgtcacaacacagccccagagtcaatcatcttctatttgcagacgatacaatgttcttttgcaaaacaaagaagaaggattgcattgctttgttgaccattctacaaaaatatgaagatgtttcggggcagctcatcaacacccaaaaatcttctgtcttcttttccaggagaaccccatatgaaacccagcttcaggtcaaacaatggctgagtattatcaacgatggaggtctgggtaagtatttgggactccctgaacactttgggagaaagaagaaagatctgttctcctccattgttgatcgcattcgacaaaagttaatcagttggtctagcagattcctctctggagcaggcaagatggttatgctaaaaagcgttttggcttcaatccctaactataccatgtcctgcttccaacttccactgtctctctctgcaagagaattcaatccaccctcactcgcttctggtgggattccaacaatcagaaaaagatgtgttggatctcctgggacaagatgactgctttaaaaaaggatggagggctaggctttcaggacattcaggcttttaatgaagccatgctagctaagataagctggagaatactgcaaaatccccaaagtctactctcaaaaattctgttagggaagtactgccatgaggaaagtattttacaggtgacttgtgtaaaatcttgttctcatggttggcgaagcatcctcatcggaagagacattcttgtgaaacaactgggctggattccattgaatgagcagactcagcctatgggaccagcccctctgacctcaagaaactggcgagtaagggacctctttatctctaattctttggtatgggatgaaggaaacatcaagcgaactttcccagtgctagcagatcatattctcagtatcaaaccaagccaactgcagggaaaagatagacaagtctggttacttaatccggatggatactactcaacaaaatccagttatcatgtggcacgacaagctctaaaggatctgtcaacaaaaccgtcaactggtttagtgtgatttggtccgtgaaaacctctccgaaagttaaatttttcttatggaaagcttttaatgaagcctgccaacaggagaacagcttatgtctaggaaaatctttgttgaatcttcctgcagtaaatgcagagagcttgaatctattgaccatatcctttttgcttgtcccttcgcccagagagtatggaaattggcacctatcgatagtgctcaattgcctccactctctaatgttaaggaaagcttggattggtggaaaaagaagatttgtcttcctcccacaggattaggcagcggaccccattacccttggacttgctggaatctgtggacagctagaaacaagctaacctttgaaaagcttatgttttctgagcaggaaatcatgattaaggccatcttggatgcaaaagagtggtagtgtgcttaacaaaagaaacttatgcctccacctcagctcttcccgaccagacagcataagacaagagaagagatccgctccactttgattatcaactctgatgcagcgtactgttcccaagctcaaactgcaggattaggatggactttgttacccagtcccgcatgtcgtccctctaaacactctacctgtagtaagcatgtgtcttctctgcttgttacggaggctctggctgct

SEQ ID NO: 166185 - DNA, 6170 bp, Arabidopsis thaliana landsberg
  unsure (1)..(6170): unsure at all n locations
atgaagaagctcgagactcaaatagtgcaaaactctgagtcggtcaaaaggcagcccggcacacttccaggaaggactgaggaaaatcctaaaggatattgcaacattgtagccggcaaagccgagtccttagtaacacctaccgatccccacaagaacgtggtctgcgatccaaagaacgttgtaaaggggaagcccgaatgctacccattacggaagcttcctaaaggcaaagaccctaggcaagtgtggcagagaagatcggactgcgagatttatctacatccaaccttaatctagtcttcggagattcgtcccaaaagactcccaacggattactccacgaccttctgctagtcgtaggggattgcatagtcgcgatagacttttacgtgttagatatagacaaggagatcgacaagccattattcttgcgacgaacttttctcgcaactataggtgcctgattgatcacaaccgcaagaaaaccatattcaccaaggtcaacaaaaaatcgtctatccaacaatctcaaaggcgatctcatacccggtaattcctctgcctgacaatcttgttggtcctgataccaacaaggtggagaatggcaaccgtgaagctcgacagagggcccaaaatctgaagtccaaaccgcctaaacggcctaacatctcaaagatgaaaatcttcattcctctggagcatagaagggaaggcaaagaacatatccaagatatgataaagcaaactaaataagttttcctacaaggtaaggtttctaaaactccatctagaagaaaacttaacataaaagcgcggcgggatatcaagatatcaaggacgccaaaggagaagcaatccttgaagctcctccctattgaacccaatgggttcccaaacgtcaagccacgacgttaaacaagtgcgctgaataagagggaacccactaggtatatacacttcttaaggatttaaaatttacttttgcttttaatctttaaagtatttgtttaaaatttacttttgcttttgatctttaaggacttggccacgggcgagagtccaaatttcggaaatttgcccgaatgcatggacaattaaccttaattgcccaaaacacaatagactatcaaggggaaaagatgggcaagtttgggcatgaacgggcaagtttgggcaccagtgggcaagtttgggcaaaaacggccgtgccgcaggcgaagtttgccccgccatgcgttgaccgaccgttgaccgcgcctaggacgcgtggctcggctgacttggggcctaagcaaagttaaggtcccaaagccgaaaactctgcccgaatcgttacacgcattccattgattactgagtgagttctggataatggtttaagtttcataatcatattctcatgcatccttgattgattttgtgagttatatgaatcatgtgaatggttacattggattgcatatgtgatctttagattcttctgctattgtttatggttgagaggttgtgttgaggtattgatgattctatgagtgatttaacaatatgtttcataatatcttaaactttggggtcttggtacgtggtgcttgtggtaggaggcaaagaccataagcgtgccaagattgtgatatgtctgaccttcttagtgaactgtgctatcgtggggtcttgtaacgatgtcacttgatcgccatgaagtgcgaaaaactcggagacacggggctagctaccctggccgagtgtctacaagacggtatagcgtttggtactgatgctccagttgcatacctttgtggttgtaacacaggagatcacgggagtgtgtgtgtttggtgttgggtttgaagacagcatatcgggctgtttaaaacttaataaaactggagtcttaatgcatttgcgtgattttgtagtttgtttcgacaagctacctttcattgtcattctctgttgcgtggttcatgttgggtattcgggttggggtaaactaatgtctattgcagggaatccatagctcactgagtaatctaagattactcatgattttacgtattttgcaggaaacccatagtgggggatagagggcatgggggacaataggaaacccggagtgggtttgtgccttttgtaaaacaagtatgtttctattatgtaccgtgcttttggcactaagccttggccataaaacttataaatgtttggtaacatgttgtaaaatttatacttatgaaataaatcgggtttcttgtacaaatttacgagtaatgacttataatgacttagtccgacttggcacaacacttaacatcgtaaaggttagcaagcctaaacgatattctaagtgggagagtggtcgtcaatacgccggccaagggttgggattggttcccgaacctcggttggatgttgatgatcaatctcaatgtggcgttttcggggcgcccgagacttgtctgttcatagagcgtctcacgggcgttacaggcagccccgcagcgatccttaaagggcccaagagaggtcagggaaaccgcgaggcagatgatgacgagccagaagctgctcgggggagaatcttcacgattttgggcgattcggctttttgtcaggacaaaacagcctcaatcaaagcttatcagaggaagaccgactcaatccgtaacttgacacgaccgttcaacggaccagatgacgaagtcactttccatgagagcgatactaacggcttggatcggccgctcaatgatcccttggtcattacactgactatcggggatttcaacgtcgagcgaatttaaatcgatacagggactacgctggacatcattttctgacgaccccgcgagaaatgaagatcggtatgaccctaatcgtaccgactccacgacctgtgcttggtttctctggtgagaccactatgaccctcgacaccatcaaattaccagtccgagccaaagagttaacaaaaattgtcgatttctctgttacggattagccaaccatttacaatgcaattatcagcatgccatggttaaatcaattccgacccgtcacctcgacttaccatctctgaatgaaatttcccacaagcaactgcatgaagaccatctgggggaatcagaaaaatgcctgaatttgcttcatggtagagcacaaactcagaaaccccgtcatcgaatcaacagccgaggcgaatcacgaaaaggctaagctgggtcgagctgaagaaaaagcaatctccgagcagttatagcaattaaagatcgaggaggctcggaaatcaacaaagcctgaggtgtgtttgtctcgatgatcgaggaggcctagtaaacaacatagcaattaaagattgaggaggcccagtaatatctatttgtctcgaagacgaaaaccccgagcggtgcgtggaaattggtggagacttaggcgaagaactaacagctgagctgacttccttcctcaaggataacgtcagcacttttgcctggttgtcgtaggatttgcttggagtgagcgtcaaaatcgtatcacacaagctcaacgttgatccaacctttaaacctattaagcaaaagagaagaaaattgggtcgggaacgagcggaagctgtgaaagccgaggtagaaaaactttaaagaatctactctataaccgaggcaaaataccccgattggctcacaaatcaagtagtggtaaaaaagaagaacggcaagtggagattctgcatcgacttcactgacctgaacaaagcctttccgtaggatagtttcccactgtcgcacatcgaccgcctcgtagagtcaacctcaggaaacacattgttatcattcatggacgcttttgctggatacaaccaaataatgatgaatcctgaggaccaagagaaaacggtattctacacggaacaaggtattttttgctaccgagtgatgccattcggacttaaaaacctcgggacttaagatcttcgccttgcagatcaggaaaacgatggaagtgtacgttgatgacaccttggtaaaatccatggaagaaaaagaacaattagcccatttgcgcaaatgttttcaacagctcaacctctataacgttaagcttaatccgaccaagtgtcgtttcagggtaagatccggcaaattcttgagatatctagtcacccaactcggcattgaggaaaacccgaagcaaatcgaggcattattgggaatggcatcacctaagaacaaacgcgaagtgcagcatttaaccggaagagtcgcagctcttaatcaatttatctcgcggtctaccgacaaatgcctggatttctacgatgtgcttcggggaaacaaaaaatttgaatggacgacccgatgtgaggaggcttttcaagaactcaagaagtatctggcgagcccactgatcctcgcaaaacctgtaatcgggaaaccactctatttgtatgtcgtcgtgtcagacactatggccagcggagttttagttcgggaggactgagcaaacagaaacctatcttttatgtctcgtagacatttaccggcgcggaatctcgctacccgcaaaaggagaagctagctttagcagttgtaatatcggctcggaaactacgaccctatttccaatcctaatccatcgtgatgatgggttccatgccactttgcgctatactgcatagtccaagcgagcaaggttgtttggcttactgggcgaccgaactcagtgaatatgacatcgaatatcgaaacaagacctgcgcaaaatctcaagtcttcgccgactttatcgttgaactaccaacaaaggaagctcgggaaaatccgtttgatacaacttggctccttcacgtggacggctcattgtcaaagaaggatcgggcgtgggcatccgtctcacttcacccacaggcgaaagtgcctaggatgaaagctcagtcttgggctgtgattaagaatggatagaccccctcagaagctatatatccgaggggagtgtgcctttggataagtgggaagctcgaaagttgaaagctcaagctgcgcgtttcgttttggtcaaggagaaactcttcaagtggcgattatccgggtctttaatgacttgcgtggaaaaagaagcttctcgcaaagtcatgaaaaaaatccacggaggctcatccggaaatcattccggaggaaaggccctagccatcagaataaaacgccacggctacttgtggcaaacaatgatcaaagattgcgagaaattctctagacgatgcaaaaaatgcaaaagacacactcccatgatcaaccaaccagccgagctcctttcgtcgatcgcctcgccatattcattaatgcattggtcgatggacataggtcccatgcatgcctcaaaacagaaaaagttaatcctcgtcctgactgattacttctctaaatggatagaggcagaatcatatgtcagcatcaaagacgctcaagtcgaaaacttcgtgtggaagcacatcctatgtcgccacgggatctcatacgaattgtcacagacaacgactcgcaatttatttcggttgtttccaaagattatgcgataaatggggaattaggctcaacaaatcaacaccgggataaacccaggggaacaaccaagctgaggcggcgaacaaaacgattctcgacagtctgaaaaaacgactcaacaccaaaaagggtttgtgggccgacgaactcgaaggaatactatgttcgcatcaatcaacgcctcgtcgagccacgggagaaactccgttcgtactagtctacggaacggaatgtgtagttcccgcgaaaatgacggtaccgagtctgcgtagaagcctgtttcccgagcacgagtcaaataatactcaaagcatgctcgacgagttagatctgatcaatgagcgaagagattcagccttgatgcaaatacaaaattacaagaatgaaacggctcggtactacaattcgaacgttcagcagccaagatttcacgaagcagatcgggttctccgcaaagtctttcaaaacgctgggaagctcgaggcaaactgggacagaccatacttaatctcgaaagttgtccgacccagcggttacgaactnnnnnnnnnnnnnnnnnnnnccattccaagatcctggaacgcaatgcacctcaggagatactacaac

SEQ ID NO: 166186 - DNA, 3728 bp, Arabidopsis thaliana landsberg
atgcaactaatagtccaagaagatcttccatctacgaccccaaaactgatttctaacgccgataggggtctagataaagcccctaagattgagctaaagccacttcttttagggctaacgtacgaatttcttggtaaaaaatcttcctaccctgtttttgttaatgcctctttaagtcacgcagaactcaccctattgctaagcaagctgcgcatatatcgcaaagctcttggcaactctcttgatgatattacaggtatgcatagaatctatctcgaggatgagactaagtcttcagttgagcattagagaagactaaatccgaatatgaaagaagtggttaagaaagagattatgaaactgttggaagcagggattatctatccgatttcagatagcagttgggttagtccagttcatgtggttcctaagaagggaggtgttacagtagtcaagaatgagaaagaggagttgattcttactcggacaatcacaggacatcggatgtgcatctattacagaaagctgaatgctgctaccaggaaagaccatttccccttaccatttatcgatcagatgttggagaggttagcaaatcataagtactattgcttccttgatggatactcaggattctttcagatcccgattcatccagatgacaaggagaaaacgactttcacctgcccctatggtacatttgcttatcggagaatgcccttcggtctttgtaatgctcctacgacattttagagaggtatgatgtctatcttcacagagatgattgaggatatcatggaggttttcatggatgatttttcagtttatggatcatcgtttgaggattgtagagaatctctgcaaagtgttagcgagatgtgaggagaaacatttagttttgaattgggagaaatgtcacttcatggtacaggatggaatagttctcggacacaggatttctgagcatggtatagaagttgatagagctaagattgaggtcatgacaagtcttcaagcgcctgataatgttaaagcagtgaggagtttccttggacatgttggtttctacaggagattcatcaaatacttcatcagaatcgcaagaccattgactgctttactttgtaaagaagttaaatttgagtttacacaagagtgtcatgatgcctttaagcagataaaacaagccttgatcagccaccagattgggatttaccttttaaggtaatgtgtgatgcgagtgattttgcagttggagctgttttaggacagaggaaggataataagcttcatgccatctactatgcaagtagaactcttgatgatgtccaaaggaattatgcaactatagaggacttgttagctgtggtgtttgctttcgagaaattcagatcttatatcgttggatccaaggtcattgttcacacagatcatgctgccttgaagtatttgatgcaaaagaaggatgctaagccaagacttttgagatggattttgcttcttcaagaatttgacatagaggttagagataagaaaggagttaagaatggtgtagctgatcatttgtcacgcattaggattgacgatgacgtccctataaacgatttcttgcctgaaaagaacatatacatgattgatacatctgaagaagatgactgcaaacatgataggttgcagaatcgagcttcactatcgatcgacactcccattatgttgatcgacactcacatttcagaggaagtagacagtcaaagttgtgcgatggtgtcgatcgataccattgcacttgtcgatcgacacccttctaaatagacaagaaattggtcaccaactgagaattgcgccgtcacagcggtcgagaaggattacctgtggtatgctaatattgttaattacgtagctgcaaatgtggaacctgataatttcacagattacaacaagaagtgattcctaagagagattagacgatattattgggatgaactttatcataggtaattagcgacaacataaaaggtagcttagtagtcgctgaatcaaataacatgactatttggcgactaaaacacgtagtcggtaatccatgcgtcgctaaattaattagtcgccaaatcgtgcgactgttaggcgacattattgccactatatagtgacactttggcgactctttagtgactgatatatcgactgttttgccactacatggcaactgttttgtttaagtattggtgacttaattgaaacaatctgacgattgattacaggtgtaattatctattttacattctattttatgaaatactaatgttaagaaattgtatttaacaaacaaagttgtatttaacaaacaagctttatttaacatacaaagaaccttgattcaaacacacaacattcctcaaacacattcacaacataataatattcaagctaaacacaacataattcaagtttgtaagtttgataagaaaagaaactaaaagaaggggaaaatagatgttcactcctggggtggatcttgtgaagcagtagcagtttggacatcctctgtttgatcttctaaagcagaagcagtagcaccagcagactcgaggaatgcgagaaacttggggtctctttctgtcaagtacttcttaaccatcctcaagtgtttgatctcttcttgttgctcattagcatcacgcttgatatctgcttgctcagctttcacccgcaatgcctctgcctcacgatgtgcctggagagtcgcttgttcttctatcttgcagttggcttcctcaagctgtgactgcaaggtagtgaaagcagaactgcagcctgggtacttccgctttccattgatgtacctccctaagcttctcattctaaagtatacccatctctcgtttgtgacagttgactgcaaacaaaagacaagaggattattgtagaaaagatgaagcaagtgataatataaaaaaaagacaagaggatcaagaccattacctgaaggaagacctcatcatcctcctcttgagatagttctaatcgacgggaagtaccatcagacccttcatcattctcacgggcagccaacttagcttccttgttcttcaaatatgcctcatgaatttcctgcgccttcttatcaacaaaagtcccatcttttttggtatgagtcttaacgaatacctcaccaatagtaggtggtcttcctagctcaattttctgaaatgttgttcacaaaacaattcagactcttaataaaaatcattcattaaataaataaatgtaacttaccatctcttgctcaatctgtaagaaagactttggccccgatacatgtttgtgaggaccaagaccattacggtcagacattcgagctactgatgtggttgaacttctggcaatggcttcttctgtgtctcaatacgcacacatttccttccacaatgtcttctcaatccatggcggtcgctcattggcacgtcttgcgcaagccttagaaaccatgtccttcatacgcgtttgacatattttaaagaactattattcaactacaccggtcactgatggatgccatgtgtgtgtactctacaaaacaagaggagagtttgatgttagtgatcaaacaaccaaaccaaaccaaatgtaagagattaataggagatagaagttactttattgcgaattcgaggaagtatatgtgtcttctttcagtaggtacacagctccaactgtaaaatggc

SEQ ID NO: 166187 - DNA, 552 bp, Arabidopsis thaliana landsberg
atgaagcaagcttcttcttcttcgtcatgtaatccaacaagtttaacaaacagacttaaaataatctttaagaaagcagaagagctttcgattctctgtgctattgacgtttgcgtcatctattacggaccagacggtgatctgagaacatggcctaaggatagagagacagtgaaaaatatggctttgaggtataaagaggacagaaaacgcaagaagtgcctcaatcttcatgagttcctcgagaaagagaagatgaaggacaaagacaagtataaagggaagacgaattatgtgaagaaccctaattggtatccaaactttgatcattactctcctcaacaactctctcaattgattcagtccttagaacgaacactttctactctccaaaaaaggcttcgtattgttgagtcgcagaaaaaacagaacacaaactcggtgcatcagagtttaacaccatcgtatctgaaccagacacaacacttggatcacaagcaagttctcgctgtatatgtacaaccatggagatgctactctctcacaactccc

SEQ ID NO: 166188 - DNA, 3511 bp, Arabidopsis thaliana landsberg
acttagtcagaagtgtttttaatgtaaaccattgcaactgtagtaggaactcttgtgatcagcaacacaaaaaggtatctagactttaagcatgttgtcacaatatagtgctgtgaactcttttgtttatacttaaaaattttgtaggaattgaaatgaatgagtccaaaatgcaaatcgcagtattcgttattgtatggaacaaagtagtctttagacaatagttgggggagctgacatgtgattttttggctttgatgtctgtttcttggccagatcaacataatatttctatgtcattcacttatgtgggctaattccttatgtttggtctgatttgaactctctttgtttaaagccacaggtggaaatttgaatgtagcgcaaaatccaggatctctgaaagcgacattgcctttggaatcaggaaaagtagctactatggtgagcgagaagcagaatgcagcatattttggaccagcaggagacaagtattctagtacatcgcgggatagtgatagtggagaggaatcttcttattcagaaagggaatctatccctttctcaagaacgaaatcgggcatgttgctaagaccagcacatgtaagaaagacgctagcaaagtttgaagaatcaaaacagtcagcggttgttcaatctgcaactcgaaagaaaagcggattggctgttgaggaggaaccacaaactcaaaacgcgtttctttcagaacagaatgctagtaaaccttttgatgctgaagattctatcatcaagggtattactaacaagtttgaaaaagctttatcatcggaaccaccaactgatgaagcgaatcgtaggttccctgttctcagactttagtttcatgtagctttcagatattttaatctatcttttgaatatctctgcaaccttgcctcaggtatgttccttaaaccacctcgtatccataggtcatcaaatagcaagtacaatgacacaagacgagcaatgtctgctgatccggcaacttttggcaaaggtgggatggagaactcaggagacgtagaggatattcccagcaaaactgaaagagttctttcacgagaaaaacctggcgatgaacagaaaagtaagttcttgattcaaaaattaaaactgactaatatatggccattttttctattaaagcaaacgccaaatcttatgcaaccttaatgtgactggctttgtgtcaaatatgagtgaacaaaaagacagcccacgatgccaaaagacatctattaggaagagctactagactatatctagttactatagattgctactatctaaatctttagctactgttagaacttgcttcgaattcttcatcatccgtagtctgtggttcacgtacttggttttgagacaatgatcaattagtaattgaccggtataaaatttctgttctgtagacactgagtaccctagcggcagcagagaattgaaccctgtgaagattgttgaaggaggttaggaaattaaaacttttgctgtttctgttttttcttcttagcatttaagttggctggctacagtttccttataaattgatatgtctacagtaaatgttgtctcggggaggacacgctccttagttgagaagtttgagagaggagaaaaaactactcatactgaaggagccagtacaacaatagaacagaacaataatgcagtgcaggaagatccgcgtaagacatcaagacagacaggtgaaactcctgtcatatcaacacgacgagctaggagtactccagccagagtgatgcctattgttctcaatcgggatagtaacgtgacatctgatgagcctcctttaacacaaccagctaggacttcttcatttccagtgatgcctgtgatactcaatcaagcttctaatgtcacatatgatgagccttctgtagcgttaacacaagaatctagaacttctcatgcccgtatattgcctgtgacattcaatcaggcgacaaatattacatctgaggaggcttctgtaacattaaggcgccaacgcaggaattctgcagcacgagtaaggcctgtgtcactcagtcaggcaacatctcatgagtgtcctgtaacatcagtacgtccattaaggacttctccagcccgtgtaatgcccacgaaactaaatcaatctgttaacatgacatctgatacatctcatatagcatccatgcaccgagttagtccaacacaaatgttggctacacccactgtgattgatcaagtggctgatatgacattggatgagacacatgcaacacaaattcaaccagcttgcgataacatgcctcaggtactttgcaatgattagcctaggcaacttattttttactttgaaagagtactgtatacatgacaaacgtaattgattgtttggtttgtggctttgtgcagaaggaagagccgaatatatctgatagggaagatgatagtgacataactgaaaatcttatgctaacccataacgagttcttaagcactcttcaatcgaggttgacaaagttacaagtaagcattcttgcttcttttctgttcttttccctgaccattatttgttttagtattagtttgcaagtggttgacttctaaacatgcagattgtaagacatttttgggagcgtagcgatgttaaaggcgcaattggggcattaagaaaactgacagatcagtctgtgggtatctcagattctcggtagattacttttgtttttgatgtttgtatgtttagataagctaactcatagatgttgggacaggttcaagcagatgtgatcagtattctaactgaaaaaatagaattctcacatggatatgtttctcaattggtccctgtcctcacaagcttattgggtagcaggacagagaggtaaacatatcataccaaatttccaccttagaccatatttttttgcttctgagctataacgatttcatgacttggtttctaaatgagagtaacgactgtgcaggccggtaaatgtctccttggatatgctcttgaagcttgtagcagtgttcggtacagttatacgctcaactgtttcagctccacggattgtcggcgttgatcttcatgcaaatgaaaggtatttgagctaacaccactctctggaatctcatttagtttgctacgctgattctcattcaccaataaaagtaaataaaccacaatgcaggctagaaatttgccaaatttgttctgcgggactgcacaagattcaaagaattcttccagttctcgcaaggtaaacatcctaagcatgctactttcatcacattcctaatgactttaagcgatagaagagtaacttttggaaatcgaattcttcacatatttcccttgttttggctctcttttctttttgctatgaatatagaagaggcggtctaataacaagaaaggctcaagaactaaacctagttcttcaagaaccatagcggcaagcaaaaccaagaattgatcatacaagcggtccac

SEQ ID NO: 166189 - DNA, 760 bp, Arabidopsis thaliana landsberg
atgaaaaaaaaaatcaacctggtaagcgaatccgacggcggatatgccacgtatacaccactgccgccaaaatgaaaacagagtgctcgaatccaacggcggatcaacacgtctactagtatatatacatacacaatttaaactgattcttgttcagagactctagaaaataattcagcaacaaaatggattctttacacgttcttagaccctttcttcttattttcattgtttttattcatcttcctcgcacaactacatcaaagtcagaaccaaaagtcattaccatcgatgtaagccaagctcagaaccttcttgattctggctacacgtttcttgatgtcaggtaaatctttaaacctttcagattcagtcatgcctttattgtctggtgatttctgaaattttaagagctgttaaacacagaactgttgaagagttcaagaaaggccgtgttgattcagaaaatgtcttcaatgttccttactggttatatactccacaagttcaagagattaaccctaatttcttgaaacatgtttcatctctctgtaaccaaaccgatcatcttgtcgtggtaataacagagtcttgtcctgatcatgtgaaagtatatttcaattatgttcactagatctgaatctagaaactcttgttatgatcttgttttgtagggatgtaaatctggagttagatcattacatgctaccaaatttcttgtttcttccgtaagtaccaaaagattcaagattaaaatacc

SEQ ID NO: 166190 - DNA, 472 bp, Arabidopsis thaliana landsberg
atgaacaagcgtaagattgatggattcatggctaagattgacgcagcccacaatctagttgtggaggatgtcgattatgttggtagaagaagttttcagaataagagatttgaacaccaacaaggcgacaaaggattttgtgggaatggtccggctagctacactcaaaagtctcagttccagcagcctttttcagaatagctatagtttcaacttcacaagaaactatgatcttgcttcttaccaagccccctccccccctctccacccgcaccaagaagcaagatagaatcaatgttggaacatattctcgaaggtcagcagaagatcttaaaaagagctatccctatatgaattgagagtggtctggcatgctgcttcgatgggaagtgaagatgagatccgaacgttgaggagagtgatgacgaatttgtagtcgcaaaggcagtgtcgaccacaccaacccatggta

SEQ ID NO: 166191 - DNA, 602 bp, Arabidopsis thaliana landsberg
gtcccaagctcaaaggtgtggcaaagagaggccgcatattctgtaaacgaaggtggtcaaaagtgaatgacgctgtgaacaagtttgtaggcagctacttggctgctagcaaacaacaaacaagtggtcaaaatgatgatgatgtggtgtctttggcacatcagatcttttcaaaagattatggctgcaagtttacttgtgagcatgcttggagggagcttagatatgatcaaaagtggattgctcagtctactcatgggaaagcaaagagaagaaaatgtgaagctgactctgaacctgttagcgttgaagacaaggaagctcgtcccattggtgttaaggcggcaaaagccgcagccaaagccaaaggcaaagccaagctaagtccggtagaaggtgaagaaaccaatgctttgaaggagatacaaagtatatgggagataaaagagaaagatcacgctgccaaagagaagctaatcattattaaagacaagaaaaataggactaagttgcttgagcgtctgttagggaaaacagaacctctatctgacatagagattgaacttaagaacaagttaatcaatgagttgttggcttgagtt

SEQ ID NO: 166192 - DNA, 229 bp, Arabidopsis thaliana landsberg
acctagtccctccaatgtctccaaatccaaacactaaggctacagttatccatcttctcaaggcaacaacttcaagagggagctcctccaatgttgtcgaagctccaagaagacttggcctgggctctcaatgacatacttatggtacctggcagggaaatgtggaccaccgtactatctcctattactcgaccaaagactgaatggtatgttctcttcctcaacctaa

SEQ ID NO: 166193 - DNA, 1203 bp, Arabidopsis thaliana landsberg
atgaaagaaagtagccggaagcaaggagctgcgtcaccgtgtgctgcgtgtaagcttttgcggcggcggtgcgctcaagattgcgttttctcgccgtattttccggccgatgagcctcagaaatttgctaatgttcatagagtgttcggtgctagcaacgtcaacaagatgcttcaggtttctttcttcttcttcttcttaagaataactaaaacgtccttaatcatatgttgggttaggttaattacgatgattttcttgtttcttatgttagatgagacattactatcatttccataactttttattgacaactaccacatgggccgacccgtttatattataagtttagggatttaaaaacaaaattgttgaattttaagaatttaggaatatgttacatttattagctgatgttgaattttaacaatattaacttttgttagctattgttaatgatttgatttacatttcttagctagctaatgtagaatctacatttgagatggattatataatttatatagtcttgcgagattagttggtctagtggctaacaaaatgttttaaaaactcaacaggaattaccaatccaccagcgaggggacgctgtgagcagcatggtttacgaggctaatgcaagagtgcgggatccggtttacggttgcgttggggcaatttcatccctccagcaacaaatagatgtgttgcaagctcagctagctctagctcaggctgaggtggtgcatctacgtgtacgccagtcgactaatttcccagggcacggactatgcccggatagtccgagtagcagcgggtcaccgtcttcgaagcaagtgagtccgcaggacaacaagggcatgtttagccatatggacattgtggatgaagccagtttgggagagtctatgtggtcttgctagtcaataatgctctctttctgctactgctatttcctcttccttttttgggaaatttcgggattattatatattaaatttaggggtaggatatgaaaatgctctgttttgactacagagtgaaattattaacatgatatagatacataaatatactaaatatatttatatattataaatctctctccatataccccttagtatttgtaactttgtaataaaagggaaaatgggatttggtgtatgtgtaggacctttggatcatgatccggtagggttgttt

SEQ ID NO: 166194 - DNA, 380 bp, Arabidopsis thaliana landsberg
  unsure (1)..(380): unsure at all n locations
gattgcaatgctaaggttgtcgttgccacttctcgggatcctattacaagcagaaaactttatttcagttgtccgtatgaaatatcagatgtaagcatcttttgttgagttatgattctttattttatttcttttatttttgtatccctaggaatcaacctcttatttttaagggtctcggtcgaggctgcggtttcaagagatggtggactgttgcattgtgtgacgagtttgacatgataaaagaggagacaattgagatgaagaaggatcaggaagcagccaataagcgcattgaggctcagacgggggagatctttgctatggaaaagaaaaaagaaatcctagagatntagtatgagagcttgaacngaggctgg

SEQ ID NO: 166195 - DNA, 442 bp, Arabidopsis thaliana landsberg
  unsure (1)..(442): unsure at all n locations
tcatgaatattgcggacctttgtaagaccatgagtgccgaaccagggcgttttgccgtgatcacggcnnnnnnnnnnnnnnnnnnnnnnntggaccactcacctcggccttaaaagccgcaggattcgaaattgccatggaaacctcgggcaccaatcccattaagggccatgttgattgggtttgcctttcgcccaaaaagttcaagggccccgttgaagaaaactttgcccgcgcaaatgagctcaaaatcattgcctttaaccgtcatgacttcaagtgggccctggagctcgaaaaaaaggtaagccccggctgcaggcttttcattcagcccgaatgggacaaggccagtgagctattgccggaaattattgactttgtcaaacgtaacccgcaatgccggttgtcgttacagacacacaagaatttaaacataccg

SEQ ID NO: 166196 - DNA, 1456 bp, Arabidopsis thaliana landsberg
attgctgcacccgccatccagcaaatcatctggactgtagagcacacacatttgctgaatactcaccattttggaaaaaatctcaaaattgaaaaattcaagaaggatcagaatcaatagatgattactagtgcctccacccaagaaacatacaagaagaaagtcatccaagaaaagcttgatgatcccggttcgttcactctatcatgctctctaggaccattgacattcaataggtgcctttgtgattttggagcatatgttagccttatgcctctctctacagctaaaaggctagggatcatggaatacaagttctgcaacttagctttactcttagctgatggttctgttgcacatcctcatgatctaatagaaaatctgcctgtcaagattggaaatgttgagatacctactgattttgtggtaatggacatagatgaagaaggaaaggatcgcctgatcctaggcagaccattcttagcttcagctagagcagtattagatgtcatgaatggaaaaattgatgtaaaccttgaaaaaggtatcaagatgaaatttgacatcaacaaggcttcagggaaatcaacacagtaggtcagagttttgggattcaggacatggatgatgatgaagaaccagaaactgaaccctcaccaagagttaactatacttctcaactcagcaagctgaagagaacttttgaccataagaagagagcaatagaaaggttagctcagactgaagatcctacagaagatgactggtatgagatgagaaaaaaatttaaatggcaaagcagagtcatagagggattatcttcaagggtgatgaagctgaaagatcaactatggatgtttcaaaaaagagttaaaaagtttgcaaatactattgatccaaagaagatggaaactgcactagctatcaaggaggacgaagatttcacaacagaatggtttgcaccacaagaccagaaaggaggttcacttagaggaaagaagcctagagagcaagttgatgagtgaggaggaaatccctattccgacttattctccaagagtacctaaaccaaccaccaacccctatgctgaagaagaactcttgattcatgattctgttgctgaagaactcctagagctctaggtggatataaggctccgcaggatacaattggaaagttgactcacaagatggaagagttaagccacaccattctaaaccttcaagaattgtccaggcacaaccccaactttgaagttgaggattggtcaaaggagcctggttcagaagaagaagactactctgcttatcagaaagaagtttattttgaagaaaatcaaatgagtactcatcataccatgtgtcaagagaggatgcagagtatgattcaagcactgaagattcaaccactaaagatgaggacttctctgttcctcatttcaaccttttttatgac

SEQ ID NO: 166197 - DNA, 444 bp, Arabidopsis thaliana landsberg
ataaaaacccataaggcccaacttctgaacctatcattgagttcatctacagttccggatctaggctttctactaaagggaggcaacacgttaggtcactctatcttgcagccgataaatatgagattccgcatgtacgtgacctatgcagaatccaacttataaaatctcttattccttctaatgctcttaacgtccttaagcttgctcaaatcccttttgacaaagacctcaatgatgccaccttggattatatcaaaaccaatataagtacaatttctagctctgatgagttcaaggttttcgttgtcaatcactcaaatcttaccgtggagatagtgaagggttctttgggacaggggtagatcgtgtactatatgtgggaactattgccagttgtgcactagatcgtgtaataatctatttcacatcgatgaaactgaa

SEQ ID NO: 166198 - DNA, 435 bp, Arabidopsis thaliana landsberg
cgatgtgtatggacattgagaagtgaggaagcaaaaattacgaagacgccaagggataatttgaaggcgaaattgccaaagagaagcgtgaaccatatcaagtagaagagggaaaatgtaaacagaaacttcaaatgctgtttactttgaagctagtattttaaaaacattaaaaataggttaaacgctgttaatcgacatttaaataggtttattgtgtatttaccatgagtaaaaattaaattaccatgaggacatgtatctagtactcaaatttaccattgtcaatgatattatcaggacatgtattagaaaacaactaactagaagtggtagtatatataccattgttcactcgtggagccccaaagtctcagccaatctcacggcattgcctttggaccaagctccttgaatcactctcaaaactgattt

SEQ ID NO: 166199 - DNA, 2131 bp, Arabidopsis thaliana landsberg
cgttgccacctctagtcactcgctcaatcaccaccactcaaccccatggttgagtcccaccatcatcgttcacttgataaatcattctgccaccaagtcgagttccaccatcatccaccactcgacatcatactcgactgccagcagagtcagaacaaaccttttgttccctacaatcaaggctttgctcccgaacagcaatttcaggagaactaccagcaaacaccacccaggtttgccccacagcaacaccaaggtccttctgcacctgatgctgacatgaaacaaatgctacaacagctgctccaaggacaagcatctggctccatggagattgctaagaagatatctgaattacaccataagcgacattgtagctacaatgatctgaatgcaaaagtggaggccttgaattccaaagtccgatacttggagggctaatcaacatctacctctactcccaaagttacaggactttcagggaggtcaatacagaatccaaaggagtatgtcacaactcatgttatccctatctgccatgatcgagagctgccaactcgacatatccctacctccatcactgaggacagttaaattcaagaaggggaggatttttgtcagaatgaagctttagttgaaaacgcaacagacaagcccccactcgaccacactactcgatcactagctcctgttgaagaaccagatgttgctaataatatggaaaaagtcttcattcctcatccttacaagcccccacttccatttcttgtttgacacaagaaatagttagaagataagtacagagctatgtttggcaagaacataaaacaagttgaagccaggatacctcttgttgatgctctcacgcgtatcccggattcccaaaaattcctgaaagacttgatcatggagagaattcaagaggttcagaaaacaacagttatgagccatgagtgcaatgcattcatacaggagaaagatgaaccagagaagctaggagaccctggttcatatactctaccatgttccctaggttcatagacattcaataaatgcctttgtgacctaggagcatcagttagactaatcccactctcagtagctaagaggttgggttttaacaaatataaatattgcaatatctccttgattttggctgatgggtctgttagacaacctcatgggttattagaagatttgcctatcaagattggaaatgtggaggtgcctacagacttcatagtgttgaacatggatgttgaaccaaaagatcccttgatcttaggaaggccctttttggctacatctggagcaatcatagatgttaagcaaggaaagattgatcttaatatggggaaggattttaaaatgaagtttgacatcaatgatgctatgaagaagccgacaatagaaggacagaccttcttagttgaggaaaaggatctgctagttgatgaacttctagtggaacttaaagaagcaaataactcaaaaactgttttgaccaagagtggtaaagctggatatcttcctagtgaaactttgagttctgagaagtcattagactcacacaaggcaacagttggctcaaaggttgggtcaaaggtttacaagggcttgatggggtctgacacaaaggttatgaaagctaatgaagtaagttcaacacatgctcgaccaactgattccaccaacaactcgaagaagcctccaacttgccctgaaagctcatgctcgaccaaacaactcatggcaagcacccagacgtcagatgattggttagaactcaaggagagatctaaatggcaggacaaagccatacaagagctaacacatattgtgaaaaagctgaaggatcaaaacaaggagctcaatggaaaagccaaccaagtaccactcaatatcaaggacgcccttgacgatggagccactattcttgtcaacaaagaaggatgtgaattcacatcggaatggtgtagaggagaagactatcttgataaaaaaagaagcttactatgaggacatggcctctgagtacccaattgcagacctgtcaagaaaccctaatgagtatgatgatcactctactcaagaaggagaggagaccacatttcctctctgcaacccaccc

SEQ ID NO: 166200 - DNA, 821 bp, Arabidopsis thaliana landsberg
atggagaaaactgatcagtggtctgatttacctgaagaactcctagatttaattgcaaaccgttattcctccaacattgacgtcctacgtatccgtagcatctgtaaatcctggcgttctgcggttgcgatgtctaaagagcgtcttcagtttcgctttgaacgctaccttcctacctccaacaagaagataaaggctcatctctctcccaccactttcttccgtataactttcccttcttcatgtcctaacaaaggatggctagtaagaactagacaagcctccaaaatgtatcgtaagattactctcttgtgtcctctctctggcaagcgcatcacccgttcccaccaaaccctagaccttttaaaggttggcgtttcagagattcgccaatcttacgagattcaaatattcgatggattgaaggacgaaaagaaagcattagattcagagatattctctaattatatcaagaatagtgacaaaataccatcaggtgtattctttagagttgctttcctagacaatattttttttgcagtcaattaccacgataataaaatatggtgttgtaagaatagagaaggaagtagaagttggacaaaaattaaaaaccaagtcgaagatttctcggacattatacttcacatgggacgtatctatgccgtggacttaaaaggagcaatttggtggattagtttatcacagcttaccattgttcaacagacatcttcaactccgttggactactataaatatgatagttgacaagacaagaggctcgtggaatattgtggagatactatgcattgttcatgagc

SEQ ID NO: 166201 - DNA, 259 bp, Arabidopsis thaliana landsberg
gccagcttaaggtccatatccgtcaaaaggcccaattgctgacgattttacataagctccgcccccctgaccaacatctcataaattgccactcatgctagaggtgaccaaaccccactggactataaaaataccagacgactccccctttaagctccctcatgcactttcctggacctacccttgcgcttacccgatacctgtacaactatttaccttccggaagcgtggcactatcttataatttacactctaacta

SEQ ID NO: 166202 - DNA, 1015 bp, Arabidopsis thaliana landsberg
gtatgctaagtctgtgcattaattttataaataaatattgagagatacaatgataaaataaagtgtgatggattttgcagatgcgagttgctcgacgaaggaatacttggacacagttatagattggatgccgtcaatgaacaatgtaaaactaaaagacattcctagttttatacgtaccactaatcctaacgacataatgctcaacttcgttgtccgtgaggcatgtcgaaccaaacgtgcctctgctatcattctgaacacgtttgatgaccttgaacatgacataatccagtctatgcaatccattttaccaccggtttatccaatcggaccgcttcatctcttagtaaaccgggaggttgaagaagatagtgagattggaaggatgggatcaaatctatggaaagaggagactgagtgcttggaatggcttaacactaagtctcgaaacagcgttgtttatgttaactttgggagcataacaataatgaccacggcacagcttttggagtttgcttggggtttggcggcaacgggaaaggagtttctatgggtgatgcggccggattcagtagccggagaggaggcagtgattccaaaagagtttttagcggagacagctgatcgaagaatgctgacaagttggtgtcctcaggagaaagttctttctcatccggcggtcggagggttcttgacccattgcgggtggaattcgacgttagaaagtctttcatgcggagttccaatggtatgttggccattttttgccgagcaacaaacaaattgtaagttttcttgtgatgaatgggaggttgggattgagatcggtggagatgtcaagaggggagaggttgaggcggtggttagagagctcatggatggagagaaaggaaagaaaatgagagagaaggctgtagagtggcggcgcttggccgagaaagctacaaagcttccgtgtgggtcgtcggtgataaattttgagacgattgtcaacaaggttctcttgggaaag

SEQ ID NO: 166203 - DNA, 621 bp, Arabidopsis thaliana landsberg
  unsure (1)..(621): unsure at all n locations
atgctcattttggttgctcaatataattatgtgggtcttgatntgggttataaaaaggatgggaatggagatgacttttactgagaaaaatctcgatagagatattggtgaaaatgtcaagctttgtggtgttcntgttagtttctggtgctgtgttgttgttgagttcaagctctgtccacgggctgcgatatagacccgtgaggagatattttaatagtagtgatcaatcttccgttttgggttccaacaaaacgtttgaaagtggtggacataacaaagcacgaagagtgcaagaaggtgatgtagaagaaggaggctgcgaaatctgcagaggaagagaaagagactgtggaggttgtaccggtggagaaggaagctgtgaaggttgtaatggagcaggaggaagttcgggagatggtggagcaggaggagaagaaagcggtagagtaggaagaagaggaaatggcaaaggagttgggaaaggacaaggtgacgacggtggaaaagaagattgcaatgaccatgaaaagaataaaggagatgataggaacaacggtgatggtgttggtattggtattggtataggtataggaggtgggcctagccctggtaccggag

SEQ ID NO: 166204 - DNA, 1749 bp, Arabidopsis thaliana landsberg
aaggaaattgtgcaagacattaagagagtcttggataattatgaatcagtgtttcagatgccaaagggacttcctcctgcccgtaatagagagcatgcgatcaccttgcaggatggtacctctccaattaatctgcgtccttacaggcactcttttggtcagaaaaacgagattgaaaagttggtcagagagatgctggactctcaaatcatacgcccgagtataagcccttactctagtcctatcctattagtcaagaagaaagatggcagttggaggttctgcgtggattatagagcactcaacaaggctactataccagatcggtatcctatacctgttatcgaagagctactagatgagctcaaaggtgctgcggtgttctctaagctggatttaaaatcaggatactttcaaataagaatgaaggcggaggatgtcgagaaaacggcgtttaagacccatcaaggccattacgaattcctagtaatgccctttggattgtctaacgcaccctcaacttttcagagcgtgatgaatgatcttttccgtccctatctcaagaaatttgttttggtgttctttgacgacatcttagtctatagcccgggcatgaagactcacgtgaaacacttggagactgtacttcagctgctgaaactccatcaattatctaggtcacaatatatcctcacaaggagtggctgcggatcctgaaaaggtagaagcaatgttaagctggcctcaaccaaaatcagttacggaattgagagggtttctaggcttaaccggttactaccgcagatttgtcaagaactatggcctcatcgcaagacctttgacagatcttttgaagaaagatgggttcttgtggaatgaagcttctactagttcgtttcaggcattgaagaaagctgtcactcaactccctgtcttgatccctaccagattttcagaaggagtttactgtgaaagcatatgcatctggcacaggaattggtgctgtgctctcccaggaaaaaagaccaattgcatttctcagtcaaggtttttcaagccaagaaaggattaaatcagtttacgaaagagagttgttggcgatagtaatggctgttaccaagtggaaacattacctagcaggaaaggagtttgtgataaagactgatcagcggagcttgaaacatctcctagatcaaaaagttgtctcaacaatacagcaaagatgggcttcgaagttgatagggctgaagtataagattgaatacaagccgggtgtggacaacaaggtggctgacgcattgtccaggaaaccccaaactgaattgctcacgcagctaacattacatgctccacacaccatcgatatagcagcacttaaagaagcagtgaaggcagataaagaactgtgtaagctattgctggatatagaacaaggctgtcagaaaaatggagattttactgtggaagatggtgtgctttacaggaaaggttgtcttgtgatacctgcatgaactcccttcattccaaacctactggaaacgttccctacaatcgctgttgggggccatgaaggagctctgaaaacatttaaacgtttgactaaggaggtgtattggacaggcatgagaagtgatgttgttaagttcatcaagggttgccaagtatgtcaggagaacaagtattccacactctcttcagctggattattagctcctttgcctatcccgcaacagacttgggaagacatca

SEQ ID NO: 166205 - DNA, 425 bp, Arabidopsis thaliana landsberg
ggaagctgaagcggcggcttgctggaggaagcgaagatgaagacgacgatgacgaagaggatgattcaggagaaacagaggagatgaaatcatcttcagcttctgagcctattcagacgatgtttctgttgggggggggggaagaaacagatcgacaaatgggattaacaggatcgagatacgccatggatgaagatgaagagtacgaagaagacgaagaagatgagaacaacgaggaagaaggagatagtcatggaggaggagaaggagagcttagttgctgcgtttgcatggtgaaaataaaaggcgcttcttatacaccttgtggtcacacgttttgtaagctctgttctaaagagcttatggctcagaaaggtcactgtcctgtttgcagcagcttcgttctcgagttccttgagatcttt

SEQ ID NO: 166206 - DNA, 604 bp, Arabidopsis thaliana landsberg
atggtgatgatgatgatcaagaaccatgtaagatctataagcttaccatcaagatctcatcctagcacagcagcgatcgaggagtcgctcgacaaatttcttatcactatgaacacgtcgacaatgacgtcgtctgagtcggttcactccggtttatcggggttggaggatctgtacgactgttcggaagatcttctgaagatgggttcgacgcaaagggtgttgtcgtttagtgatgagaagaagaagaagaagaagaaagtgaagggagagtttatggaggaaatgcttgatggatcgttgaggctaatggatatatgcaacgtctcgagggatctcatggttgagactcatgagcatgttcttggtcttcagtcttgtgttaggagaaggaaagatgtcgacgtctcgggatatgtcgggtttaggaaaaacatgaggaaagaagttaagaagcttcttggatctttaaagaacattaatgtagggttatgttcatcatcatcagtgaataatggtgagcaagaagaacatcttgtggtggttgtagacgccatgagacaagtagtttccgttagcgtcgcggtgttgaggtcgtttttgg

SEQ ID NO: 166207 - DNA, 308 bp, Arabidopsis thaliana landsberg
gtgatcgcccttttgcaacgcgtcaccgaagccagcgtcgtcgttgatggtgcaaccattggcgcaatcgacgccgggctgctggtgctggtcgcggtcgagcccggcgacggcgaggcgcaagcccagcgcatctgcgagcgcctgctgggctaccgcgtgttcagcgatgccgaagggcggatgaaccgctcgctgcgcgataccggcggcggcctgctgctggtcccgcagttcacgctggccgccgataaaagcataggcatgcggcccagcttcaccacggcagcggcgccggaggacggccg

SEQ ID NO: 166208 - DNA, 1001 bp, Arabidopsis thaliana landsberg
cttactacgttacacaaaggtccaccaacctcagcctacgttcatcttccgttttgtcgcaaacgctgtcattattgtgactttcctatcttagctctaggcatgtcttcttcttcagccagaccgtctaatgtctacgaggaaggaaaagaagatgacccgagaatcacgaactatgtgaatttgcttgttagagagataacaacgacaaggccggggtttgatacgaacccgaatctagaaacggtgtttttcggtggtgggacgccttctcttgttcctccgaagcttgtttctttgattctggaaacattgagtttgaatttcgggctgagtccagatgctgagatatcaatggagatggatccaggcacgtttgatggtcagaagctgaaggatttgatgaaattgggagttaacagagtgtctttaggagttcaagcttttcaagatgagcttttgaaagcttgtggaagagctcatggtgtctctcaagtgtatgaagcaatagagtttgttaaagaatgtggagttgagaattggagtatggatcttatttcttctctgcctcaccagactttggagatgtgggaagagagtttgagattagctatcgaatcacagcccaatcatgtttctgtatatgatctgcaagtcgaacaaggcacaaagtttggaaatttgtaagtgtacgtagttcaagtttgcttactgatgcttaagaacttgaatgtaatctgaacagaaacgaattgggttcatgaacttgtgtaggtacactccaggacagtcccctcttccttcagaaacacagtctgcagagttttataaaacagcatcatcgatgctccgtggtgcaggttatgaacattatgaagtcagcagttactcgagagacggtttcaagtgcaaacacaacttgatatactggaagaacaagccattctatgctttcggtttaggttcagcgagttatgttggagggttgaggttttcaaggc

SEQ ID NO: 166209 - DNA, 391 bp, Arabidopsis thaliana landsberg
atggttcctcacattgacggacagtttatcagagatgtcgaagccgtgctcaccgctcctgatcgggcgaatctcccagttctaaaccctggattgggtacatgggttgacaaaaccattgttacgtggttcaaattcaatcaccaactatctgtcgcgattgcagatatactccagcgcaactttcaccatgcgtggccgacgtaccggatgattcctaggcaagatggtttttcctcctcacggtaagcatcgagtttttatataaagcacttcctgtaaaccgtagactaaattcttactatttgctctctttgtagtgtatgtaaacctgagattcaggcacacactaacggtgtggacgcagtttaattttgtggcttgaccgttg

SEQ ID NO: 166210 - DNA, 677 bp, Arabidopsis thaliana landsberg
ggagcatcaatggaaatcctcagaacctacatcgcacaagaccgactatgatacttagggaaaccactgtggtgaacctgacacactagatactaaggtctttacgcagggcaaaggcgatagagaacaacacttcatactctggatcgaccccgctagtgatttccacacttactctatcctgtggaacccacaacgcactatgtaagcccaactttataaaaaataaaccacacttactcttttgaatctaatcttgtttgttttttctatctattcagattctccgtggatggaactcccataagagaattcaagaacatggaatcttaaggaactctgtttcctaagaaccagccaatgagaatgtactctagtctatggaacgctgaagaatgggccacaaggggtggtctcgtcaaaaccgactggtctaaagctcccttcactgcttcctaccagtggcttcaacgaagaagcttgcgtcgtgatcaacggctcagtcttcatgccctaacgtgtcaggacaagggagtactggttcgtggttgtctcaggagctagactcgacgggtcaagaacagatgagatgggtacagagtaactacatgatctacaattactgtacggacgctaaaaggttccctcaaggtcttccacgcgagtgcttagctgcg

SEQ ID NO: 166211 - DNA, 1619 bp, Arabidopsis thaliana landsberg
taaaccatccaacacattttctccagcttgtcttgattgaagcttcttatagaacgagggaatgctattgctgcgatgaacatctttaacagatgttttattactgtccggcttgtgattatgctatcaatatagcttgtgtggagaaaccacgacgcttatctgtagaccatcccatgtggcatgagcatactctttctttgtttacaagaaagactcccttgacttgcagcgtttgtgcatcgacacatacaagatgtcctttgtatatatgtcccccttgtgactttgtgatccatcaaagctgtttcaaattaccacgtgtcataaggatatcacgacatcaccatcgtatctctttcactcattcttttgatgaaggagattggttttgcggcgtctgccgtaaaaggatcgacaatgattatggaggctattcttgcatcaaggacagatgtttatatggggcacattcaagatgtgccacacgaacaagtgtgtgggatggtaaagaactcgcgggagagccacaagaaaatgaacaagaacttaagccgtttgtcaggataagcgatggaatcatacagcatttcagtcatgaacatcatcatttgacacttgatgagaacactgacagagattacgacgagaataagctgtgtcaagcatgcatcatgccaatttattttggtaactcctactcttgtttgcaatgtgatttcattctacatgaagaatgtgcaaatctctctcgcagattacatcatccaatacatccacatctactcactttaatatcagataaccctctcagagatgttgggtcttggaataattctgatcgtgattattgttcagcttgtccttcgttgtgtatagctggtttcttctataagtgcagtaaaatagattgcgattttaggctacatgtgcagtgcgccacaatttcagagcctttacttcatccaagtcatatgcatcatttattcctaacatccaaaccaaatgaggaaagaaactgttcggtttgcgccaaagcgccaggcgagtacaccaaggaaaccttcaattgcattgaggaggagtgtgactatgctttgtgtttcaaatgtgctactttaccacaacaagtgaggtataagcatgataaacacatactccctctttcttatgggaagaagacaagtagcatgacgtattggtgtgaagcttgtgagggaaaaataaatccagaagaagggttttataggtgtgatgagtattgttgtgtccacctacacattacatgtttgcttgggaaggacttatacttgaagccaggtttatcgttgttccactccggtgctacagacatagatgttttgcccaacaatcgtatgtctcgacctatttgcaagacctgtaacaagcgttgtccattcaaagtagtcttccagtgttctggatttaaattttgttccaggttttgtttacttcgtggcatttggacaggtttgaccaaaatagcttaatggtttgctttttgtattgataagttaaacacttttatgtccaataaagttaaacacttttatatatttcggaggaaatttaactccaaaagtattttgcgttcaatc

SEQ ID NO: 166212 - DNA, 1412 bp, Arabidopsis thaliana landsberg
atggagcaaacgaaggatctgacatcgttgtccgtaacatagttgataggcacattgaaggcacatgaaaagtgtgtgtcgtctcgtattgaaagcatgaccgaaggagcattgcatgttttatcacgagaaggaaaagtcgttgtgcgactaggagaaatgaagagtaattggcgtgacaacaaaggcaaaaaatggtgtggattttgtaagaaggaaaaccacatggaatcgaattgctggagaaagccaaagacggatcccagcaaagattcaaaggaaagttacaactgtggccaggttggacattttcaagagagagtcgttcaaagaagtatgaactagcacatatgagcgttgaagatgaagaaattgaagatcatatgctatttagtgcaacagaagatgcatcgacaatcaccaaagaagatgtgtggtcagtggttgcacaaatcatattgacgagagaagagagatacttctcaaaacttgataaaagcatcaaggttccaatcaaagttggaaacggagaagtcgttatgattgccggtaaaggagacattacggtgtgcacaagcttcagaaagaaagtgataaggaatgtatttttggtgtcgggactagagaagaatctgctcagtgttccgcaaattatatctgtcggatatagtgttttgtttgagaacaagtgttgcaccaacttggatcgtacgggaaagaagatcatggaaatacagatggtaaataaaagttttccaatcagatggaattcttcacaagaaagtgagttggtgactagtgaagaggaaggaatggagttatggcatcgaagactaggccatgtggggaattcaaggatggaacaaatgcacaacaagaagatggtagatggttttccaaatttccatgtaaacaaagaaatatgtggagtatgcaaacttggaaagcaagtacgagaagcgtttccaacggagtctcaaacaaagacaaaggagaaacttgaaattgttcataccaatgtttgtggcccaatgcaaacagagtctcttaatggaagcagatacttcttgttgttagtagatgactatactcatatggcatggatatactttcttaaacaaaagtctgaagttttttcagtgtttaaaaagtccaaggccttggtgtagacgcagtcgggtaaaaagatcaaaaggattcgatctgatggtggaggtagatttacttcaagcggattcaatgagttttgtgatcaagaagggatcgagagacaagtaactgtgccatatactcaccgcagcaaaatggtgttacaaaacgtatgaactgatccttgatgtagatggcacgaaccttgcttgttgaccaaggtcttcctcacaagctatggatagaggcattatatatgtcaa

SEQ ID NO: 166213 - DNA, 856 bp, Arabidopsis thaliana landsberg
ttacaaaaaaccagaaaacatttgtcaaatgaggagagacaagtgatttttggtgttttactagagaagagtattgatggaaagttggcaaaaactataacaagagaagtttgtaatattttttggtgcttatagcaatggtataaaagatttggaaattaactagataaaaaacagctaatagtgtgaatgtcaatgtatctcatcggaggactggaaattatggtcctaaaagaatctcatttgagccaactcaaattgctaaaattctattaagcaagagaacatccttgaggtcgatgtctatgggtatgaacgtgagtcttacaacattatttaaacgaaaagtagaagcaattttccgacgtcgtactaatagcgtcaaccacatttgaaggaagccaatatgaaaggtagggtacaaaatgtacaacatagttcgcatcaatgaaaaatggttctacatgacgaagaagatgataaatattatgtacttcaagagcaaaaaagatccacatcggacaaatcaaagtaagaattacatctgaaaagtaatgtttctagcagagatggcttgtcaaaggtttgacgagtaaggaaatgagatattttgtggaaattttagaatattttcatttgttactatgcagccaaagaagagtcggagtaaaaacagagatactggaacaatagaattaaaagcataaacttctgttaagagagaagatataaaaacatgattgaatgaaaaagttctaccaattacactaaagaaatgaccatgggaaaattgagaaaagattatctttattcaacaagataatgcaagaacacatattgtgtatggagatcaaga

SEQ ID NO: 166214 - DNA, 819 bp, Arabidopsis thaliana landsberg
atgcatcaccaataaaataaactctaggcttgtagtttggaacccttatagtgggcaaactaggtggatcgaacctagaacttcttaccgcgaatgggacatctacgctctaggatacgagagtaagaacaacgccaaacgaagctacaaaattttgagatatttggatgcttacgaggacatgggcgatatgagtgtagagcctcgaactagagtttgcgagtttgaaatctacagtcttgacactaactcttggaaggtcatcgaggtcactaccgactgggatttatgttttcttcaccgtggcgtgactctcaagggaaatacttattggtttgctcgagagaagatcccaccacccccacgtgaaagagtgatagaagatatcccactaggtgaagcagagataaacgtagagatccctagtttcttactatgttttgattttacaatagagaaatttggatcgcgtctgcctctgccatttcggccttgtgttgatgataccataactctatctagtgttagagaagagaaacttgcggtgttatatcagcgatgggatataacgtggacggggatatggattagtaataagattgagcctaatgcagtgtcgtggagcaagctatttttccaatgggtaggataagaccactcgaggctgcatctggtactttcttcgttgacgaagagaacaaactcgtggtgctttttgataaaggcgagagtatacttaaccccactcgtaacacagcttacatcgttggagaagatggataaatcaaaccagtggatcgcggtgagtcagtacacaaa

SEQ ID NO: 166215 - DNA, 741 bp, Arabidopsis thaliana landsberg
atggggaaaggtggcgcactaagcgaaagcgtgataaagaacatcgttctctcatacagctacgtagcgatatggatcttcttaagcttcacagtaattgtctacaacaaatacatcctcgacaagaagatgtacaattggccattcccgatctcactcacaatgatccacatgtccttttgttcaaccctagcttttctcatcatcaaggttttcaaattcgtcgagccagttaaaatgactcgcgagacttacctgagatccgtcgtaccgatcggtgctttgtacgctctctcactctggttatcgaattccgcttacatttacctatcagtctcctttatccagatgcttaaagctctcatgcctgtagctgtttactcaatcggtgttctgtttaaaaaggaaggattcaaatctgatactatgatgaacatgttatcgatttcgtttggtgttgcgattgctgcttatggtgaagctaggtttgatgtttggggtgtgattcttcagcttggtgctgttgcttttgaagctactcgtttggttttgattcagatcttgttaggagataaagggattaagcttaatcccattacttcgttatattacgttgctccttgatgtttggccttcttgtttattccatggatctacgttgagtttcctgttcttatagatacgtctagcttccacttgagattacacaattttcggagcgaattcgttctgtgggatatg

SEQ ID NO: 166216 - DNA, 726 bp, Arabidopsis thaliana landsberg
gcaaggcgcgacgcgtaactgcatgggcgctgcttggcgcagcccaaggcgcgcgacatggatccggtcgtcgcgatggtcgagggcgtcaaagcgctcggcatggagacgtgcatgacgctaggcatgctctcggacgatgatatcgtccggctgcgtgacgcgggcctcgactattacaatcacaacgtcgatacgtcggaatcctattacgacaagatcatcacgacgcgcacgtacgccgaccggctcgaaacattggcgcgcgtgcgcgacgcgggcatgaaggtctgctcgggcggcatcatcggcatgggcgaagagcgcgaagatcgcgccgacatgctcgtgacgctcgccaacctagaagagcaccccgagagcgttccgatcaacatgctgatcgcaattcccggcacgccactggaaaacgcagaacgcatcgatcccatcgatttcgtgcgcacgatcgccgtcgcacgtatcatgatgccgaagtcgttcgtccgtctttctgccgggcgcaccgaaatgaccgatgaaatgcaggccttgtgttttttcgcgggtgccaattccatttttgtcggcgacacattgctgaccgccgacaatcccggcgaagacaaggacagcctgcttttcgccaagcttggcctcgcccccctcgaactagacgccgatcaatctctggaccatgagcccgcgtcatgcgcgagttgacag

SEQ ID NO: 166217 - DNA, 601 bp, Arabidopsis thaliana landsberg; identical to SEQ ID NO: 22888
  unsure (1)..(601): unsure at all n locations

SEQ ID NO: 166218 - DNA, 585 bp, Arabidopsis thaliana landsberg
aaaatgactctgggactgataaacgcgaatccagtggtgcaagctaagaaggaagggcttgttcgtagagaagatcaatatagagatgatggtgttgatcctcttgaaatatatgatatcctttttctattttgagatcaattttgttttggattttgttctttttggggggtttaatgtatatttttggaatctttgacgaaaatggacaaagtatgtaagagatataagagatccagaacacccttatactttggagcagctaagggttgtctctgaagaatctgtttctgtcagatgccaagctcgatcgcatcctgtcagtttatattacacatcattctttgttgaatcgatttttagagactatcagaagaaagttccaatttttatctctgtattggtaactaatgttgaggccttttttttgtggttacttgcatgatctttaacaataagctggtttgggttatgtgatgaactcaggataacgtttacaccgacgattcagcattgtagtatggcaaatataattggtctgtgtctgagagctaagcttaaagaatgtttgcaacttcattcaag

SEQ ID NO: 166219 - DNA, 1107 bp, Arabidopsis thaliana landsberg; identical to SEQ ID NO: 7242

SEQ ID NO: 166220 - DNA, 948 bp, Arabidopsis thaliana landsberg
cttcccatctttgatcctcaagagttcttggaaatggttagagggaaagccatggggtttgttggtgactccattagcagaaaccaagtccaatctctcttgtgccttctctctagggtaaaaatccaaactaattgtcaatgatcaccagcgaaccaccatctctctaatgtgttgactttttttatttccttgtaggtggaataccctgaagacatttctccttcaccagatacggatttcaaagtatggaactacacatcctataacttcactcttcatgtcatgtggtcaccatttctagtgaaggctactaaacctgatccgaagtccaacttcttcagcctatacctcgacgaatatgacacgaagtggacgagtcagctcgaccaactcgactacctggttatatcatccggccactggttttcccggccagttattttctatgaaaaccaacaaatttctgggtgccaatactgtgcgttaccaaacacgactgaattgcctttgacctatggatacaggaaggctttaagaatatctctaaaagctataatcgagaatttcaagggtctggcatttttaaggagtttttctcctcaacatttcgaaggtggggcttggaacgaaggaggggactgtgtacggacacaaccttacagaagaaacgagactatacccgaggcagatctcaaggttcacgacattcaaagggaggaatttagagctgcagaagaagatgggatgaagaagagtggtttgagactgaagttaatggacacgacacaggcaatgctattgcgaccagatgggcatcctgggagatatggacatctacagaatccaaatgtgactttaagaaatgactgtattcattggtgcctgcctggacctatcgatactctgaatgatatattgctacaaatgatgaagacagataactag

SEQ ID NO: 166221 - DNA, 2762 bp, Arabidopsis thaliana landsberg
tcaatttaattagttttttttttccaaccaaattggttcatgtacttgattatgtatacactatacacactcatataaatggataaggtagttttatagtccaaccaccgacaaaacgtgcattccacttcttcttcttcaattgccatgccgtcgtcaatatctcaaacttgactaatataaaccaaagaagaagaagtatataacagaaccaaaaaatataaaaattcatgttcgttgtattaccaaatttaatttacacttaaataaacctaccaaccaatcactcaaaacaaataccagttcgttacacaatggacacttgaagttgaaagcaaccgaacaacaaaagttttaaaaactaataaaaatttaggtgaatataataataaggccaactatgaagaaaaggtctattttatactttttatataaccttttgtcacgggcactgtttcattcccttggaccccttcttcttcaagatctgtttcttccttctttctctctaaccagattttgttgtaccagagagagagagagagagatcccttaataattcttacacatttatctttcttgtctgaatcctaacaaagactttagttttggtcgatcttataattttctttttttattctatggatttctcttccgggtttcaataattgtcacttccgtagtgtaagtacgcgtgtattgtatactagtcagttacacaagtgtccttatgtgtttccttgtctttaattcatttctgaaactgaatttattcttctctcagattctgcaaaggttttggttttttctccgagtttttttgtccttcaaaaaaaactttggttgctctctctctgttcaagaagatccgagcttgattcctaatctgtgagttttatgcattccatttaaagctctgattttgtattcctgtatcaatgtttccccctaatgttatagattttggataaaagattaagtcttgatggatcttatgattaattgtaacaatttatatcatccttgggtcatgaatttacctctgtggttttgcatttgcagatcatttgagaagaagaaactaagaaatgggtaagagttggttttcagctgtgaagaaagcattaagcccagaaccaaaacaaaagaaagagcaggtctttatgctagattattcacattttttggttatctatatccataaagagaaatgcttctatatgtctttgatgtaattgaaaagctgatactgaaaatggtattgtttttgactccattagaagccacataagtccaagaaatggtttggtaaatccaagaagctagatgttactaattctggtgcagcatattctcctcgtactgtcaaagacgcgaaactaaaggagattgaggagcaacagagcagacatgcttactctgtggctattgcaactgctgcagctgcagaggcagccgttgcagctgctcaagctgctgctgaagttgttcgtctctctgcattatcacggttcccgggaaatcaatggaagagatcgccgctatcaagattcagacagcatttagaggatatatggtaacgtttttgttttttaacattttcaagtctagtaactataaaggtggttttgctaactaatggaacaaagttcatactttttggttaccctttattaggcaagaagagcattgcgtgcgttgagaggtcttgtgaggctaaaatctttagtccaggggaaatgtgtgagacgtcaagccacatctacattgcaaagcatgcaaacactagctagagtacaatatcagattcgtgagagaaggctccgattgtctgaggataaacaggctttaacacgacagctccaacaaaaacacaataaagactttgataaggtaagcaaatcaaatccttacaaagatgtttataattttagttacaaacttggctttttgttgatctcggatacatgagaaattcacaatgtgaaatagattatgtttcttgctacaaacttaaagattgtattacgttttgtgaaatagactggagaaaattggaatgatagtacattgtcgcgggagaaagttgaagcaaacatgttgaacaagcaagtagcaacaatgagaagagaaaaagcgcttgcatatgcattcagtcaccaggtattaaactagtttcctatcttactttagtgtgtctttacaccagaagaattatatatctcaaaatggtgaaacttgttaatatgcagaatacatggaaaaactcaactaaaatgggttctcaaacattcatggaccctaacaatccgcattggggttggagttggctagaacgttggatggctgctcgaccaaacgaaaaccactcactcacaccagataatgctgaaaaagactcttctgctaggagtgtagcaagccgtgccatgtctgagatgattccacgaggcaaaaacctttcaccaagaggaaagacaccaaacagtcgaagagggtcaagcccgagagtgaggcaagtcccaagtgaagactcaaacagcattgtgagtttccaatcagaacaaccttgcaatcgtaggcatagcacttgtggatcaattccatcaactagagacgatgaaagcttcaccagtagtttctctcagtcagttccaggctacatggcacctacacaagccgccaaagcaagagctcgattctcaaaccttagtcctctaagctcagagaagacagcgaaaaaacggctttccttctcggga

SEQ ID NO: 166222 - DNA, 680 bp, Arabidopsis thaliana landsberg
atggcggaaaatgttggaagcgactcgagcgaattcgaaagcatctcttcttctcagaaatcttacctcaaaaactgtcctttcgccggtcacgaagctcttccgacaaaatcgacggattctgacaacactgaggttctcgggaaccagatttctccggcggttgttaaaactccggttctctcgttctcttctccgactagcctcgattctatcaacgatgacgtctttcgtactcctcctgagaacgcgtctctctcctctgccgctgaatcggaacccagagttggggtttcggagattaagctccaaggaggttcgaatctgacaactccgttttctatggctgagacgacgcttgtttcttcttcgccgtctcttccggcggaaaatgttagggtttcagagtcgaatttgaaatcttcttcttctacggccaaaacgacgcctgtttctgcttcaccgtccgtaaatgctagggtttcggagtcgaatttgaactcttcgtcttcgacgacccactgtttatgtttcaccctcagaaaaagttagggtttttgagacgaccactgtttctgcttcagcgtcagaaaaagttagggtttttgagacgaaatgtcattctgattcaggtgattcgttcatttgtcttctctcagcagctgttgcgcgacgatgta

SEQ ID NO: 166223 - DNA, 267 bp, Arabidopsis thaliana landsberg
atgagcacagcaacaaggccttcctcttcagcaacaacttctgtcatattagaaaaccctgtttctcaatcacaacctactgaaagattagtgcttcggttgaaccggaagaagaagaaagtttcatggaaagatgggactgtagacaatgagtttatgcagaagaagagttcgaagaagtgttgcatctttcataaacagaagccttttgatgaggatgacagtgaagaagaagatgataacaaccatcactgtgatcataaccat

SEQ ID NO: 166224 - DNA, 602 bp, Arabidopsis thaliana landsberg
gcatactcatagaaagtatagtgcctgcccaagttacgtcacttcttgtgacagattttagcgggatgggtaccaataacaaacaatttacaataacgcggtataaactctgagataggatgtagtagatgtggtgctttagaagaaaaaattaaccacatgcttttcttatgccatcatgcgcgttagatttgggcactttcacagatacctacagtctgagggaaatttctttatgcatctatttatgcaaatttagattctttattttggcgcataccttcggaattagaatcatcttcatttccacggataatttggtatatttggaaagaaagaaataaaaaaaatctttaaaaatgtagataaagatcatctagaaatgttacacttagcggaaaaagagtcagactcgtggaagtcagctcaacttgagcttcacagtgaaactcatggttcttgtaatttggaaaatcataaccgagtgcggcatttccaattgacaacaattattctcaatatcattgttttgaggatggatcttggaaagataacgacaagttttccggctaaggatggtattgtatatcatcaaatgtagg

SEQ ID NO: 166225 - DNA, 92 bp, Arabidopsis thaliana landsberg
tgttacctgtaagttttactgggtctgctctatatactgcctttgggcaaccctctcaacaactaagagatccattcgaggaacacggagac

SEQ ID NO: 166226 - DNA, 1932 bp, Arabidopsis thaliana landsberg
atggatgatatgaatccattttatcagtcttcgggtttcatagacctattgcatagtcagcaagaagacatcaatcgttttgcaagtggatcatctgaagtcccaacctttaatacacaaatgtttgaagaaggaagtgaagatgaagtaacactcatgggttgtacacaagatgaagtcaaaccgaaggttggtttatcacaaaagaaatggtttcccaaagaagatattgttctcgtcagggcatggcttaacaccaacaaggatcatgtgattggtaatgaccaacaatgtcaatcattcttgaaacagattgcatcatatgttgcaatcagtccgcaacttgatgatctgccaaagagagagcatgctaagtgtaagcaaaggtggtcaaaggtcaataaaagtgtgaccaagtttgtaggttgttataagacggcaacaactcataaaactagtggacaaagtgaggatgatgtaatgaagttggcttatgaaatctactacaatgataccaagaagaagttcaacttagagcatacgtggagaaagttaaggtatgatcaaaaatggtgtgaagctgcaactattaaagggaataaaaatgctaaaagaaagtgtgtcgatggttattgatatggttcaaattatctagaactacgctatcaaataagagatcaattgcagtattttaggatcgaattcacggagttcttttgttcaaacaatgagttaaatgtcgagattaagctagcagggtataagtgaaaataaaggagaacaaagtaaaaagacaacagattgattgtgttgtaaatgatttaataaagagctacgaacaaggtattctcaagaaactattggttagtagatttaatgaaagctaggttgttatcgaaccatttttaaactcaaactctaattatggaataaccggtgggcgtgccgcgaaactccctatatctatagctaataataaccggagaagccgagaaagtatcaacataaatatgcatttttaacgagttcaattgttcatcttagtaaataggccgattcttattacacacctataaaccagactcatcaaataatagatccaactacagatacctatggcgggaatatctattgtctggattcaagatctagttagttactctagatctagcattaggcataattaaagatgaagaattctacagataacctagcaaagggggcaatctactaaaccatatgaatccctaatgagaaaccatattcctaacaagcagactattcagacatattgaatgaaccaaaccacataattgagatagaaagcataaacacagtaaccagagaaggggaaagaaaggatctcttcactggattaaaaactagaatgaatctctcaagaccaatggatgaatagcttatgtctctcacaatagggttttgcatagaacttgataaaagactttatttacgaaacttaggtctaaaacaatatatatagaccctaaaaacgtccagggactaataatgcaaatagggaagtcttctagggcaaatttgatcttttataaactcaaaagcgtctagggtttttgctgggctgaaattggtgtcgatcgacaccaggagtttgtcgattgacactcctcgctgaatcaagaactgaaaattgtccttagcttcattttccttagcttttgctccaaaatgtctccttatctccattgttgtcccactgcatagaatacctgaaaagacactaaaaagactcgagaaataacataaagactcaagatcctatacctaaaacttagataaaatcagtgaaaaccaggatatatcaactcccccagacttagcttttgcttgccctcaagcaaaacacaaaagctgaacccgtggaagaggttttgaaaacaaaggaactcccaa

SEQ ID NO: 166227 - DNA, 1275 bp, Arabidopsis thaliana landsberg
agaatgtcgattatgttagtagcagaggttttccgaatcagagatttgatctccaacaaggcaacagaggtttctctgggaatggtccaactagctacactcagaattctcagttctagcaaccgctttagaatagcaatagtttagcttcacaaggatctatgatcttactacttaccaagcctccccctccacccgcaccaagaagcaagatagaatcaatgctggaacagattctggaaggtcaacagaggatcttagagagacctatccctagatggcatgagagcagcctcactacttcttggcattctgcttcaatggaaagtgagtatgagttagtgaagattgaggagagtgacgattttgacgttacagaggcagtgttgaacgacactaacccttggtgtcgatcgacaccatcacatatatacgagacatcaggctgtgacgaagcaaaatcgaccaggttcgacattgatctccagaatcgctcgacacacattgatagtatcgaccgacaccacctgggtgtcgatcgacaccagtaccaacctgaggaagtgtcgacgtttgacagtgcaatatcgatcgagattgagagagtagcatcgataccagatagtagtgtccactaacacttaccgagtgtcgatcgacactgaaagtagactgcaccaatcagccttgactttccacctgttgctgaacaagtctacacgcataaaattccttgtccaatgcctcaatagtatatgcaccagatttaggaggagcactgcaaggctccacaaaatcagggagacataaggaagactgttattgtctaggaacagatttcagactgctagtggtggtgtcgatcgacacacactagtgtagattgacccccatcacttgttgaagcagaattatctacaatagctacgtttcaagctggaatcactgccactatctaatccacttgacatctgcacttcgacaaagtcaagctattgactataaagaagcgcttagtgggagacaacccactagtatgagttttgttttcttttctttctatttacatttttcttatattttccttgcttacttcaaatttgaatgcactggggacaatgtcgtttaagtttgggggaggccttactaactacgtttagagcacagacacacctcctctgactgctcaaaatcccaaaacagagccacacataacactcccatcagctcagctcgccaatgagagttgcagagcatcagtgtcgatcgacacca

SEQ ID NO: 166228 - DNA, 1492 bp, Arabidopsis thaliana landsberg
atggtttatcctattcctcctagtcatttcttcgtgcaaaccctaaaatcacagaattctgttgttggtttcgaagagttttcgcctgaacacaagaggcgatcgctttgccaccttgtgcatcggccaaggctcacgtatggcgtgcgcattatagatgtcgcctcgcctccacgtcttgttgccctattcttagagcatcggtgcgctatgcgccatggcacgccattagcgcgctttttaaaactaaggctgttgaataacttccagctgatgaattaaacctcacaaagaaccaaggctgttgatcaataaaagactctttgattccaagtaaagaaaaacaggataatggagactagtttcaccaaaagagtaaatataacagtactactactaagtttctaaagatcaagtcacgtttgtcgtaatccaaactattaaggtttcacgacagcaaagagaagtcgacacattaatctaacccaaactcctttgaaggcctgttattgtagatatcagcagatcatcatctcctacaatcatactcagcgtcttataaaattcctttctcgacaccttcttctcctgcaagagcacaccgattatgttaatacaatatgataaccttgactattggtaaaagacatggtttatattatttaccctgagttcctggtaaccagcaattatcaaatccatgtctttacgagcaattttgctcgagattgctttgaacagcagagggaaaggcattataggagatctgggccttctactgctggagctattcttttcgctccctgaacctccatttgatacccttcctggctcctgcttcatacaaacaagcaacattactcgtttgtgtccatatcaaatattaacaatgactgcttgaaaatgagaatctgatcaggtacaattcaacttacatttgagggagaacctttgggtccttccaaggtgagtcccgaactctcgtgcctactctgagtagtaggaagaatattccctgcacaaacaaaacatgtcatcccgtttcgaatactacagaaaacaaatgtgatcatcgaaatacccatatatattagccatggatatctcactggacccttgggatgatgaagtatgtttaccacccccagaggtcacaaggtgatgtggatccttttctaacttatagaggaagatttcaggatccaaatagctgatcttcagtaagatctatatgctgtctcccattcaatgcgtcatcagttgatttttatggaaattacaggagaaataacaaatggtaatcaccttcagcattggggatagacagcttgaagctaactacaaattctgggtaaatgtgagtgttcatattcatgttccagataaggtaatgctttggactctcaacatcatcaaccccattatcatactcttctccaccagtaaagtactgcgtgttatcaccacgaagaggctccatattccccattat

SEQ ID NO: 166229 - DNA, 471 bp, Arabidopsis thaliana landsberg
cctgccgcctgatccctgtcagaatctctccacatgctcaccgtcagcgagatctatctgtccatccagggcgaatcgacgtatgcgggggagccgtgcgtgttcgtgcggctcgcggcgtgcaacctccgctgcacctggtgcgacacgccgtatgccttcacgggcgggcagaagatggcgatagacgacgtcgtgaccgaagtgggcgcgcgcgggtgccggctcgtcgagattacgggcggcgagccattgctgcagcgcgaggtgcacgacctgatgcagcgcctcgtcgatgacggctacacggtgctgctcgagacgggcgggcacatgccgctggacgacgtgccggacgaggtcgtggcgattgtcgacgtcaagtgtcccgggagccgcgaggccggaccgatgcactggcccaacctcgatcaattgtccgcgcacgaagaagtgaagttcgtcatcgcg

SEQ ID NO: 166230 - DNA, 952 bp, Arabidopsis thaliana landsberg
tttaaaattataatcctaagggggttttgctaaggtagaacgcggatttgcaaagtccgtctttaaatatgttttgaccatatggctaagtttcaagattttgaggctgatcagacgttactcttagaacgcgagaattaagctcgtttaaaacgtgaatttcccatctcgtgtttaatcaattcggcttaactattgggcttaggcctcgattattttactttgtatttaatgggcctttcgtgtttaatgcgtcggttgcctttccctttccattcctcgagaaacaagaaaaagcttcacgtctaagaggcaacaattgtcttttctcgatttccaaaaatggtttaaaccattcagacacgccataattactgagtttttggtttcaagataaaacctaaccctctataaataagagtccaatctgccaccaaaatttcctagtatgatttcagaaatttacttggtaacattacaagaatggaaaacgatggagtcgccacagtttgtcctctcgatcccggcagcccattgttcttgtccggcgatggtttcaaaccagccggcgttctctttcctcacgccgcttgtgcaatgagagacagcatttaggcctcaaaaggcaaccgctcgaggcccgcatcgctcgtgtagaaaagaaagtgagggccatggagagtgatcccttccaatgggagtggaggaacttcgactgcgtacccgagatccgactatgctctacatgtacctccgtgctcgaggtgaagttcctagtcctgtaaacgctcctgtcgaagtggtcccatccggcagcgaaaaggatgatgacgaggaggaggacaacaacccaggaagcgtgtcaagaatgacttcgaggcggatcacaaatgaagcatccacctcgaaccttgaaccggcgatgaaggagcctgttcctgaccctctctca

SEQ ID NO: 166231 - DNA, 613 bp, Arabidopsis thaliana landsberg
  unsure (1)..(613): unsure at all n locations
cagttccttatcgccaacctcgcctcacttttcgagcaaaaacnnnnnnnnnnnnnnnnnnnnnnnnnnnnnnnnnnnnnnnnnnnnnnnnnnnnnnnnnnnnnnnnnnnnnnnnnnnnnnnnnnnnnnnnnnnnnnnnnnnnnatcttgctcacgaacccaaccggtcagaaaggaacatacatgaatctttcgaccttccttccgcaaggatttatctctctggcaaacgtccctcgccttctcgagcggaactttaactacatcgaactcataaatcacagtctctacatggatatctgcagttattccgagcattgtaaccatctcaattgcagggctctaaaggcggcgaccatatcgtacgcgccggatagcaagtgtccgtcgggagtggcgctgattgatcaccgaggtaaagtgtacagtggagggtacatggaaagtgtggcgcataacactagtttggggccagtacaagccgcactggttgacttcgtggctaatggcgatggccaagagttcaaaaatatcgtcgaagcggtgctggtggagaagaaatgtggggtgttgagtcaagaggccactgcgaggatgattttagagaagatag

SEQ ID NO: 166232 - DNA, 2011 bp, Arabidopsis thaliana landsberg; identical to SEQ ID NO: 123

SEQ ID NO: 166233 - DNA, 1282 bp, Arabidopsis thaliana landsberg
gagagtttcttctttactcctaacgagtatgtaaagactatgaagatttctacaaggtgtagcattgcttccacgctggctgtcatagggcagaagctcaacgacagagaaaagagttggtttataaagaaccggcagttcaagcttatatggcacatggttaggtgggataaaaataaggtgcagggtatgttgatgcttcttatgcggactgcttcgactgagaagaagagagtctgctggtttgtagttaacggcgtgcccatccggtactccatgagagaacatgctctaataactggtctcgattgtcattgctatgaatcagattataaagcaaggagctttggtagttatgactttgtggagagggtgtttggaacaaaggttgttaacatgaaggatgtggaagacatgtttgattcaattgaagatgagtgtggtggagatcggttgcaggtggcagtctagctctttttatgcaagataggaagaggaaggagaatgtttaatagcatccattcatccattcactacttttgaagacactatggacgagatccgtcacttgatgaagaagcggttagagggcacaatggaagtggactatttatttccaggcttcattgtttttcttgaggtacggttctatatatcttttaaataagtatttctattttggatgaataaagatatgtgattctgtaaattgtgttgatataggttttggcgtttgaatgcattcttgagctgtccaaacagtatcaagaatgtgtaataggcgctaataatatatgtccgcttatctgaaaaaggaaatttaaagacaacaaaatgacaggttttccacttgacaaagtaaacagagtgcttggaacaagtaaggtaaaaactggttgagatgatcaagtgtaaggatatcataagtatcctacagccatcaacaggtaaggaagctcttttacttgatcttatggagcgagttgaagatgaagattcagtggacctaactactgatgcttggaatgatcgtcttgatgtacaacagaacaagatatggtgggaggatctctataagttggatgtcgattctcaaagatatagagaggtacatgtcccagctgttgaacaaatggaagagcctcaacaaaatgttcgacaagcagaacagatggaggaggattcagagctgttgttaccttaaatgataaagagaatggtgcaaaaagcggtggtagatgcaatgaaggatgtctatctgagattagaaaagttttaaagg

SEQ ID NO: 166234 - DNA, 1103 bp, Arabidopsis thaliana landsberg
ttttcttctctcaaacgatcatgaacgcctcttttttcttggtccattcttacacgcggtggtatgaatataattttctactagtaggatttttagaaagttatggtactccgtactcgagtatttgatctatatgagaaatttacgagtactcgtatatgtatctaagcattcaaatacccaactgtgggtcaaagaagatagtaacggattgagtcggcaattccggttattatgtcatgtccatcgctgtctttcttttgtagtcaaagttggtttgatttcttaatataaaacatggcgtcatcaaactactttgcacttttgtgaaaatcattgcaacgtgggacattatgttttggttctatatgcgaatgatatactcgtttttgaacatttatttttaaaacatattgcaaggttctaaattctttctttttgtttctttattgaaaatgcagagagtggattggggatatgtgaacatggtggaagcagaacaaagattactagcaaatgctttattagacatatcaaacgaacgattcgtacttctctccgaatcatgcatccctcttttcaacttcaccactgtttactcttatctcattaactcaactcaaactcacgttgagtcctacgaccaacttggtggcgttggacgcggccgatacagccctctaatgcagccacatgtccagctacgccactggcgcaaaggctcccaatggatcgaagtggaccgtgccatggctcttgagatcatctctgatagaatctactggcctctcttttatagttattgccaccatggttgctacgccgacgagcactatattcctacactcctcaacatcaaatcaagcctgaaaccgcgcaactccaaccggactctcacgtgggtcgactggtcgaaaggtggcccgcaccctaaccggtttattagacacgaggtgactgcggagttcatggagaacctaaggagtggtggtgagtgtctctacaatggagaagagacgaatatttgttatttatttgctcgcaagttcttgcctactgctctcgaccggttgctcaggctttcacgtactgttttacatttc

SEQ ID NO: 166235 - DNA, 3619 bp, Arabidopsis thaliana landsberg
  unsure (1)..(3619): unsure at all n locations
aacgacccgcttttagctaagcgaggattgatgcattcgattcaacgtgacatgataatgttggaaaaccaacttcctctgttcgttctcgaccggttattagggctacaaaccggtacaccgaaccaaacgggtatagtggcagaagtagctgttcggttcttcaaaacactaatgccaactagcgaggtgctgaccaaaacagaaagatcgttagactcgcaggaaaaatccgatgaattgggtgacaatggcgggttcactgtttggatgtgttccatcgaagtctcatccaatctagtgagacaactaatcaagggactccatatgaggatatgagcatggtggaaaagcaacaacaattgatacattgcgtgacagaactaagaggcgcaggtgttaacttcatgaggaaagaaaccggccagctttgggacattgaattcaaaaacggttatctaaagataccgaaactactaatccatgatggtgagttaaccggttttttcttctcaacttttctattagttcctcacaaatttttactatccattatctttaagatcttacagtttgacaaagaatatatttgttaccaaaacactgtggtctcacttgtttcttgtaggtaccaagtctcttttctcaaatcttattgctttcgagcagtgccatacacaatcaagcaacaacataacatcctacataatcttcatggataatctaataaactcttctcaagatgttagctacttgcaccacgacggtattattgagcattggttagggagtgattctgaagttgcagatttgttcaaccggttatgtaaagaagtgatctttgatccaaaagatgggtatctatctcaactgtctcgtgaagttaaccgctattatagtcgtaagtggaactcgttgaaggctactctaagacaaaagtacttcaataacccttgggcatatttctccttttcagctgcagttattctgctatttctcacattctttcaaagcttctttgctgtctatgcttattataagccactctcttagttttcattttttttttttcattttatttacaatatttgtatttcttgttttttcaatattttctattcataattaaaaaaaaaagacgttgtaaaatttggaattttaaatagttaatggattgaaaaaggttaatttcggatatttatttggactgcatatcctagacgtagtgaatattaagaagtagtaaatattgttcattcattgaaaaaaagaatgaaaaaaaaaaccnctaaacagtatagtgatagacatggttgtgagaactatggatttgcaaatagttgtcattcaaaagagtaatgtgaataaacttagtgggataaacataacaatgaacagatgatcaagacagcgattagaaatgttcgtcgggtcgaggctgattaggttccatttgcttggaaatggggttgcacgtctgaacactattttttggtacgtcaattttttaaggcataagattttgaatatatcttaagcataaaatatannnnnnnnnnnnnnnnnnnnnnnnnnnnnnnnnnnnnnnatttgcatgtctgaataccatttttgggtggtcgagtttttttttaaggcataagattttgaatattccaagtcttaatatataatagttttataaattagtttttaaggcatgttatgaacactatttcttggagtctttctataagagcacctcattatcccctcgaccatggtgaagtcgtcagtcgtgccatgtgcctagttacccatgtctacggttgataacacatctcagttgaaattataaacttgctgttttctaattcgtagattttttttctttcatatggataattcaagcatcattcattgtcaataatgaataacgcattatatagcttatagtatttttataaacagttctaacgcatctttcatttttttttataaataagagtgaattgttcaaataaatattctactctacgaaatatatatattaccattaaagacttgtaataaagtctttctattaagagtagtggaagaaaagtccaagaaaacatcgctcgccaaagcattatatatccattacgtttaaagattgttgaagacattttaatgtataagtatgattagatgtcaatcactggttgttgtcattacagatcaaataatattgcgaccaatgacagctttagttcagttgttacatatttgcttttagactttttctatgtcactctcaatctcctaaaaaccttcaacaaacaaaaatggcaactcctagtaaacgacgaccaccacctccaccgccgccgcctcctcgtctattggtgctgccaccacttccaccgccaccaccaccgccgccgccccagctaccatttggaccgaagcttcctttccctcatattatcataagaagaaaagcaagaagaaactatcaactacgaccgatgttgacctggtacttcctcaccttcatgatgcgccaaaaactccaaacccgaaaccaacaacccgaagagacacgggaagaatgggtgatttggatcaaagacaagatggagcaagtaatgagagacgccgccacaactagctgggacaagctctgtatctacagagttccactctcccttaaaaaaagcgacaagaattcttacttccctcaagcagcctagctaggtccgtaccaccatggggacgaacatcatacgacccatggactatcacaaatggcgtgcggtcaatatggtcatgaaacgtaccaagcaaggcatcgaaatgtatattgacgccatgaaagagctcgaagagagggctcgtgcttgctacgaaggtcctattggtttgagcagtaacaagttcacccaaatgctagttcttgatggctgttttgttctcgatctcttcagaggagcctatgaaggattctcgaaacttgggtaagcatgatttagctttatgctaaaccggactgatttcagatccggttgactaaactaaatgttgactttcgtttatttcttttttaacttttttctttttatcttggtgtgtagctatgatcgaaacgatcccgttttcgcgatgcgaggatctatgcattcgattcgacgtgacatgctaatgctagaaaatcaacttcctttgttcgtcttaaaccggttattagagctacaactcggtacacaataccaaaccggtttagtggcacaattagcggttcggttcttcaatccgttgatgccaacttatatgtcatcaaccaaaatcgagaactcccaagaaaacaacaataaattctttaacccaattgctgacaaggagaaggaagagttgcattgtctggatgttttccgtcgaagtctgctccagcctagtctgaaaccggacccgaggttatcgcggagtagatggtcctggaaacccgtcgtggcggacaagcgccaacaacaactactacattgcgtgacagaactaagagaagccggtataaaattcaaaagaagaaaatctgaccggttttgggatattcaattcaaaaacggttgtctagaaataccaaaattacttatccatgatg

SEQ ID NO: 166236 - DNA, 934 bp, Arabidopsis thaliana landsberg
tctcttctcttttatgttttttcttcaccatgaaccaagctgccttcgaatcggaccacatggacactttatgcattgattcatccagaaactccactcgaaacacaacttacaacaaaaatctcaacaccatgctctctacttttcgcaaccaatcatccatcgttaactattacaatctcacaactggtctagcttcagacacagtctatggaatgttcttatgcacaggcgacgtcaacataacaacgtgcaacaattgcgtcaagaatgcaacaatcgagattgtcaaaaactgtactaaccatcgagaagcaatcatttactacatcgattgtatggttcgttactcagataagttcttcctctccacctttgagaaaaagcctaatagcatttggagcggtgatgatccaataccgaaatcactaggtccgttcaaaaagagattgtataagaaaatgggagaggctatcgtaagatcgtctacgttgtcttccgctctcacgccgtattattacttggatgtaactagatttgatggctcctacgatcttgactctcttgttcagtgtagtccacatttgaatcctgaaaactgtaccatatgccttgaatatgcgttgcaagaaattatcgactgttgtagtgacaagttttgggctatgatcttcactcctaactgttttgtgaattatatgatcacaacttcaccattgccgccgcttccatcaccgtatcaccgtagcggttcttgctccattaaaggtgagccatatatacatttttgggtaacaattgtttctttgcgttatttttgacttattatcagtaattatatatgttgtgtaatgtttggattatttttttttcaggaaatagtgaaatattttggggaatgatcactctggcagctttggtgtttacattttag

SEQ ID NO: 166237 - DNA, 2135 bp, Arabidopsis thaliana landsberg
tgagttctacagatatgctattaagaacttcactgaaagatttcttgagtttaacagttcaagatgaagaatgatcatcacagccgttgatagcgggattcaacatctagctgttgagacacaaaatcctagtcctaggtatgttatagatggaatacctatgaaaatttataagagcaggacattggtgtctttaaagcttctataagaagggatgtagaatccggagttttgtgtttctctaccttgtctcaagatgaagcatcttgaaaatataattttatacggaaaccatggtcttgtgaagaatctcatctcagggtgtcctgttcttgaagatcttaccgtggtaaggtttcaatcctgaagaaactatgagacatgaccaatcaaccgatagatcgtatcttcatgatatatcttacatccacaatgctttctcgcagatgccaagttatcatttctaaacatgtatctgatgtcagtgagagcatgaacattatcattatggtttacgatgttaaaaatcttatggtgttaattataatgtcttgtacagagttggattgtctcatatgcttgaaaagtcgtattaatctctgtttcttggagtactttaatcatctttgcattcaaagtggtttcgaaaagtcccatggtcaattgtttaatatgttggtatggttgacttcaaggttctctgttcgaaacatttgtccaaagaaacaacattttgttttttagaaataacatttgtcaaaagacttttcttctaatccaagaagcttctttggttcgccaatattgactcaaatattttcacctttatcaattacgtaccatctaagaaagcagttgaagactcgctcgctacatcatcctggtcaatttctgatcgaaatcgtatcttgcattcatttttgtgttaggtgcatatttactttattcattcttgatcacttaagtttttgtgtgtgtttctggttaggttgtaccctgcagatttaattgggtaatctatagtttcacaatgatgttttaatattataagctttgtgtgtgtttttttactctccagtgtacatcaacaatggctacaccaatggaaaacgaaaatccgaattttgctagaaccgcaacatcgttccgaaactttgtttcaaaagatcctgactctcagtttccagcagaatcaggaagataccatctttatatctcttatgcttgtccatgggcttctagatgtcttgcaatcttgaaactcaaaggacttgacaaagctataagcttttcggttagtaaagacgacacatttagtttcgatttttacagaacataatctgatcagtttgttcattagtctgttcaaccactttggagaaataccaaagaaaacgacgagcatatgggatgggtttttccagattcagatacagaggttcttggagctgaacgtgatcatatcaatggtgcgaaaagcgtaagagaactttatgatatcgctagctccaactacacgggcaaatatacggttcctgtaagttcttttaatcatggtgtggtctaatcttaagtcttattttgttacgtcactaaacattttcggatatttagagatattgttggtttctttgtttttggtaggttctttgggataagaagcttaagactatagttaacaatgagagctctgagatactccgaatgttcaacaccgagttcaatcatgtttccgaaaacccttctgtcgatctttatccacccaacctccgagccataatcgatgagactaacgaatggattcacgatgggataaacaacggtgtttataaatgtgggtttgctacaaatcaagaaacttatgatgtggtaacgtaactttgcgattttcttatcaatattgtaattaaaatttgattccaacattttaattatttgtctctctttgcaggaagtgaaacgattgtatgaagcattggaccgatgcgaagacatactcagaaaacaacggtttctttgtggaaacactctgactgaatcagatatccgattattcgtcactgtcataagatttgacaaggtgattttacctcgaattgttctgttttcggattttcatatatacgttttgttca

SEQ ID NO: 166238 - DNA, 434 bp, Arabidopsis thaliana landsberg
cggctgatgctgctgtgcctgctggtcgaaggcgaacgctcggtcggcgaactcaacgcgcgggtcgaactgagccaatccgccttgtcgcaacacctcgccgtgcttcgcgaggacggactggtgaccacccgccgcgaggcgcagaccatctactacgcggtcgcgccgggaccggcgcggcaggtcatcgccacgctgcacgacgtatattgcgggggatccccctcctgcgaatgagcccatgccggattcgccgcacgtcgagccgttcttccatgccggcagcaacacctggagctacgtggtccatggcgcggggggacgggaagcggcggtgatcgacccggtgctggatttcgacgcgaaatcggcgcgcacctccaccgcctccgcgcaggcactggtcgacttcgccgcgaacgcgggctcgg

SEQ ID NO: 166239 - DNA, 1226 bp, Arabidopsis thaliana landsberg
actaaattaaagcaaatcaatttaatatttgggtcggattttaaggtgatggtcatagagtctagtatggatgatgcacgattcaacttcttgagcaactcagcagatggttatcacgcattgttcgagaaaaagcttgctcaattccgccttgcagatcctggttacgaagattatcatcgcaagtttgttgaatgctacgttctgtatcgagagggagttactgatgtttcgaatcggatggatatcaaagtctttcatgcccctccagaggtcagacaagcaactattgtcgacaaagtggcatttctggtttccaaatatgcgtgggagtttaagttattggtcatgggctctaatacaaaggatccaagattcgactttcttatgggttcacctgaagatcctattcaagtatcttaccagagaaggcttagtcgatactgttttcagaatcatgataaagttcctcgacttgcgccctatactcagtctaatcccagggtccagtctcaaagactcgttctgccttatcttctacagtgtagacttcttgaaggtatggggatgcttttcgtgggaaactgatggaaagagtgatgatggacaatcagtttgagtttatgaagcaaactgattacaggttcgctttcttcaacgagtttgttgttgcgtattcgcaagtgttacatcctcccaaatatttggaagataagctgaataacaataccgcttatatgaacaccgttcttgagggttttcttgaacgtattctatgggatcttgttcgggagcataagtggcttgagggaggggagaattctatgattgagtggcataattctgtgtccaaagattttgtggaggatcaagagttgttacctaagattgaaatgcctcctcctgcacctccacaaaagagaccagagttggatgagtcagcccttgttccacttgagccagaagaccagtttcttgcacaacatgagggtttgtctattttcagggttatttgtgttcccgacggaggggaagtcattaagatcacagtgcactcattgtctgaaaacgtagcgagtttgaaggagaaaatagctgaggtggtccaaattcaagcaaacgaacagacgttaaggggattaagagcagtgttaaaggacaataataggtcactagcttattacaatgtgaaagcaggagatattctaatactggacgtggtctga

SEQ ID NO: 166240 - DNA, 428 bp, Arabidopsis thaliana landsberg
  unsure (1)..(428): unsure at all n locations
nnnnnnnnnnnnnnnnnnnnnnnnnnnnnnnnnnnnnncaaagtcatgtgcgtgatccatgaacaccggctggcagaccaggtgcgctgtgtgcgcaccaaggtctcccggcacgtgcccaatgctgcgctgctggcgatcaacccgttgatgcgcattccaaccctggagctgggtaacggctcggtgttgttcgattctgtggtgatctgtgaatacctcgataccctcgggaacggcccggggctgtatccgcagcaggccgaaaggcggtggcaagccttacgctggcaggcgttgggggatggcttatgtgacacgctgattgtgtggcgacatgagcgtgagcggcccgaaacccaacagcagtcggactttctgcacgcctgcgcactcaagctttcgtcgaccttgcagttgctggagca

SEQ ID NO: 166241 - DNA, 435 bp, Arabidopsis thaliana landsberg
acggccgcgcgcataactatccataatcagaaaagacaccacctatgaaattcaagataatcgcaggaagtactcgagaagggcgattcagtgacaaagcagcccattggatcgctggagaactcagcaagcaggccggtgccgacgtggagatcctggacctccgcgactatgagatgccattcttcaacgaggcaaggaccccatcttccaagaccgagccgtacacacatgaagccgtcgtgcgattcaccgcaaagatcgctgaaggtgatgcgttcatcatcgtcactcccgaatacaatcgaggcacctccggcgtcctgaagaacgccctcgactgggtgtaccaggaatggaataacaaaccagtcgcgttcgtaagctatggatcggtcggaggcgcccgcgccgtcgaacagcttcgcctcaatc

SEQ ID NO: 166242 - DNA, 749 bp, Arabidopsis thaliana landsberg
atggaggaaacaagttacgaagcacttcccgacgatcttcaaacagagattctgtcacggttgcctctaaaatcattggtgcaatgcatctgcgtctcaaaaaagttggcatctttaatccgcacaaaagcattcagagatctttacttgcgccggtcgttgacgaggcctcgattgttgttcatcaacttcccgttcggacgtgatgtgttgattcactctgtttatcaagaaaaggagccattgtgttcttctggtcatcaacggatacttatttctctcgatccaagatgtgagatttctcaacccattctaggtctgatctgtattcaagaaaataccaaggttgtgattttcaatccgggcacgaaaaagtctgtggctttaccagagatccaagcgcataagaacgttgtcgtagcaagattctttggatatgatgaatctacggatgtattcaaggtgttatgtataatacagttcggagatggtaagcgatctaaggactatcaggtattcacgatgaaggtggaatcgggtgaagaatctaattcttggagagtgatcacatgtaagcatgatcattcaccagttactgaaggactatgtaaaggaggtttcttgtactatggagctgatgagtccaatactgacaaagatgtggtagtgagcttcaacgtgagttctgaagagtttagcgtcattgaattgcctgaggaagtcaagattgatcattcgtggagattggt

SEQ ID NO: 166243 - DNA, 543 bp, Arabidopsis thaliana landsberg
actgcatcatctgtgggacagtaacccctgatatgatctgtccgactacggccaatctgattggggataaagtcggtgctaaaaatgcttatggttttgatatcagtgccgcttgcagcggcttgttatatgccctgaatctgggtacgtctttaattgagagtggcagaaataaaaaagtgatcgtcgtaggggtagataaaatgagtgccatcgtagattataccgacagaacaacctgtattatttttggagatggtgcaggtgccgtgctgctagaaccaacaccagaagatgtgggtataatggactctattctctatagtgacggttctggcgccaaacatctgcatatgaaagcaggtggttctttgcgtccggcttctattgaaacagtggccgcaaaagagcattttatttaccaggaaggcaaacatgtctttaaatttgctgttaccggtatggcagatgtaaaacaggaattattggaaaaaaatgatttgaccggtgatgatattgactggctggttccccatcaggcca

SEQ ID NO: 166244 - DNA, 281 bp, Arabidopsis thaliana landsberg
ccgttctctaagtcggtgttccttccggtcacgttcccgtcaacgtaggcgaagataaggagaggttcgtggtgagtgcagagctgctgaatcatcctgttttcgttggattgctgaatcgatcagctcaagaatacggatacactcagaaaggagttcttcatattccttgtaacgtattcgtgttcgagcaggttgtagagtctctccgatctggcatcgctgatgatacatcggagctcattgcatcgttatctggtgaagatgtatctacagagtag

SEQ ID NO: 166245 - DNA, 1641 bp, Arabidopsis thaliana landsberg
  unsure (1)..(1641): unsure at all n locations
atgggaattcattttgttgacaaggcagatctatggaagagtgcactgttgttcaatcttaaacttcgtgatcgatttcgaatcgccgtcgatgatcaccgtggtcgagctacggttttctcaccggatggttgcttctcttccactatccaccgctgggtgactcgattccggaactttcgccgggagtctctcccttctccaccggctttttatcgcagacgaggtttgaatgaatcattaccttttattaactctaatagtggatctgtgtaattgagctttgtgatttgaacttcagctgtttctctgagagatggtttgagtcgtaatattggcgtagattagctcgatggtgttatttgttttgtatcacctgaaggatttgtttttagcactttttggcaatagttttagctgtcattccaagctgctccaatgattctgtttgttattatgtctactatcttgatttgtgggaatttgaattgacaaaactccttgttcttgtagtttctaaggacttaacggcagaagaagagtctgctcttttccggatgctannnnnnnnnnnnnnnnnncttattggaaatgcttgtcatgttttcatgaatggttttaaccgtgttcaggtttgagacatcttagatttctgcttcacaaatttcattcttatctttagtcctgttatcagttcttattttgtttatctttttaggtatatggtttagagaaattgcatgatgctttactcaacagaccaaagaacaagcctcttgtaacggtatgagttgacttatgttctgaaatgttgtgtgtttgtggttggggttttagatgaacctgcttgttttcttacccatgaacttcttaataatcttcaggtgagcaatcatgttgcatctgtggatgatccatttgtcattgcttcattacttccacctaaatttctacttgatgcccgtaatttgaggtggacgctctgtgctacagatagatgctttaaaaaccctgtaacttcagctttctctcgatctgtcaaagttttgccaatttctcgtggtgaaggaatttatcagcaggtaacacaggctgtttttgtagctagcttttcttgattgttacctgctattttatctatattcaaatttactgatgaaaacaagtgtcacatcttctgcagggaatggacattgcgatttcgaaattgaacaacggagggtgggttcacatctttccagaaggcagtcgctcccgggatggtggaaagactatgggctcagcgaagaggggtatcggaaggtgagtcatgtgtgatttgggttcacttcccttatataaagcactccactttaatgtgtcttatcattttattctataacaagttttatttgttttaggttgattttggacgcagatactctccctatggttgttccttttgtgcatactggtatgcaggatataatgccagttggagctagtgttccacggattggcaagacagtaagtatatctgaatctccaattttttcttcctcgtttgtagctttcatttttgatctcttaatagttggatgcatcatgatctctgctccgcccaaaatcagataataaataaaaaaacctgaactttcagag

SEQ ID NO: 166246 - DNA, 1159 bp, Arabidopsis thaliana landsberg
actcctttttgactaaatcgtgacttccactatgctattgcagagggttaacgaaaagctgagtaaattggagaggaagaattttaaagacggatctgccataaaagtagctgttgttggctgcggttatgcaggagtagagttggctgctaccatatcagagagactgcaagatcgtggaatagtgcagtccattaacgtatcaaagaatatactaacatcagcccctgatgggaacagagaagcggctatgaaggtactttcattccaattgcatcctccatttgactagacagagtaaaagatggtaatagtgttcttttggattgtggttaggtccttacgtcgagaaaagtccaattactcttaggttatcttgttcaatccataaagagagcaagcaacctagaagaagatgaaggatattttttagagcttcaacctgcagaaagaggattagagagtcaaattattgaagcggatatagtgttatggacagttggtgctaagcctttgcttactaaattagaaccctcgggtcccaatgtccttcctttgaatgctagaggacaagcggaaacagacgagacactccgtgttaaaggacatccacggatatttgcattaggtgattcgtcttctctaagagactcaaacggaaagattcttcctacaacagctcaggtgagaaaaaaggctacaaaatatgaacacattcatgttctataacttaatcagagtgacacggcaatcaaaaatttcaggttgcttttcaagaagcagactttactggctggaatatatgggcagctataaataaccgacctttattaccattcaggtaaaactaatagactttttactgatctgtgtattgaaaacagaagtttaagctctgtttaatcttgtttgcaggtttcagaacctaggtgagatgatgactcttggaagatatgatgctgctatatcgccaagtttcattgaagggcttacacttgaaggtccaattggtcacgcagcgagaaaactggcgtatttgattagactaccaactgatgaacaccggtttaaggtcggaatcagttggtttgctaaatctgctgttgattcaattgctttacttcagagcaatctaaccaaggttttgtctggttcttga

SEQ ID NO: 166247 - DNA, 1147 bp, Arabidopsis thaliana landsberg; identical to SEQ ID NO: 4130

SEQ ID NO: 166248 - DNA, 1060 bp, Arabidopsis thaliana landsberg
atggaggaaactggtaaaatcccatggacgatcttcttctctcatcctctgttctcttgtttcatttcactctacactatatttcttctttatttccctcaagattctcttcgaattcttatttcccatgtccctctcctcatcggagctttcttaatctcctgcctccatctcgggtcgacccggaaatccattgcccgacccggaagcaatgaggattcgataggacctgaactcaaaacgggtctcggtttaaacccggattttatggaatggaactttaaattgggagctccattggaagttattcacaaagaagaagaagaacagtcgatgacgggtgtaaaagatccgacccggttcgtgatgatcaagaggtttccatcgttatcgatgtttaacccggaatctgattccgaattggaccgcgatttcccggttatgagtgaaaatgatccaacccggttcgtgaggctggaaaggtcaattaaaccggaatctgattggattacgactccgaattggacaacaatttggttattgatgtaaatgatcgaactcggttcgtgaaggtggagatattcccaccgttgtcaatctttaaaccggattcgaattccggttcgccggagaaattgcgttgtatatacgaaatcaaaacggaaacgctttttgtagttttatattcctggagaacaatattctaacaacttgttttggcagcaatattctgatttctgagtataatttgattcgtcaagtaaaatctaattttataattctcaacaaacaaactcgaatttgatgtctaatgtgtaatgtcgtcacgaattacgtataacatattaaaagttgtcgacaaagaaaatgaaatacatttccaccaaatataataagtaacaacatggtcagattcagagaggacgatctggcttggccaccaagattgtttgacaagtatttatttaactactatactttctcttccacaatattaataatgttttaaatgtcattattaatacgtgacgaaactgtagctcttgaataaatatattaa

SEQ ID NO: 166249 - DNA, 1293 bp, Arabidopsis thaliana landsberg
catagctctcgtaacagctgtggaggcaagtgcaacgaaagaggagccagagcccgaaacccccgaacaacctgccccgtacgaacttgaaccgtacaacgactggagaatcccaatcatcgattacatcaaacgagggatcacacctcccgacaagtgggaggccagaaacgcagcgtcgcaggttcatacatggtgtgtacctacgggcaacaaacaaaagacctcatgaaaagcatgcacgagggacaatgtggtagccactacagtggacgtacccccgccctcagaatcaagaagcaaggctacttctggccaacaatgctacccgattgcatagctcactcactcaggtgcgataagtgccaacgacacgcacgtactctacatcaaccacccgaggaaatgtcgtcgatctcatctccttacccgttcatgaagtggtccatggacgtcgtagggcccatggaagcctccagtgggaagaagagactagaaaacctgctggtccccaccgactactctaccaaatggattgaggctaaagtcttccaacaggtaaacgagaaacaagtcgaagatttcctgtgaaaaaatatcgtatgccgacatatgagatcgtcaccgacaacgggactaacctgacctcgggaaaaatcaaagcattctgcgacaagtggaagatccgtcttaccacatctacccccatgttatccacaagggaacgaacaagcagaagccgccaacaaagctatacttagcaacatcaagaaaagacttgattcaaaaaaatcaatgtggttcgacgtgctccacggagttctctgggcctaccgaactacacctcgcaaatcaacgcaagaaacaccgttctccctcgcttatggtttagaactagtaatccctgtcgaaaccatagtaccaagcgtgagaaggaccgccagtcttgctaacccggacttgaacacgcaaatattacaggacaacatggacttcatcgatgaacgcagagatcaggcaatgatccgtgttcaaaactatcaacaagctggcgcccgctactataactctaatatcataattcggagattcgaagtgggagagctcgtcttacgaaaagtgttcagcaacacgagagagctaaacgctggaaaactgggaactaactgggcaggtcccaatcgaatcaccgaggtggtacgtgacgacgtctataagcttgtaaaagttatcaacggagtacctgagttacggccttggaacgccatgcatctcaagaaataccacgaatag

SEQ ID NO: 166250 - DNA, 514 bp, Arabidopsis thaliana landsberg
caacatgttacctcccatcttattacagtttttgagatttcttgattaacaagctactaatgttttgcaggtaagtagcttaaaggacaagattcacattgttgagaacacaccgataaagcgaatgcagttatactattctgggatcgagctagctgatgattatcgaaacctaaacgaatatggaatcacagaattctcagagattgtggtgtttcttaagtcaatcaaccgtgcgaaagacgtcgctccggtaaggaaactctgtttcttggtgcagacgtcatcgagtttattcaacggtgcgcgaattccagtggagattaaggacacttgcaccatctcggagatgcgagaagggttacaagctaacaagacgttgccaagagacgagtatatattcgtacacaagcaacggattatgcgagagaattgtagtcttcggtggcatggtgttgaaaatggtgacactctttttgtgtttaaagggtctattagtcgtgaaggtttctga

SEQ ID NO: 166251 - DNA, 2223 bp, Arabidopsis thaliana landsberg
  unsure (1)..(2223): unsure at all n locations
tcttgtgatcatcatgagtctaaaaaaaagattagcaaaggtaaaaagagattaatgactttgaattctaccgtgattgagaaatcttcgacagctccaagatggtcggattgccattgcagtttctgcacttcttggcttacttctaccaacagagattctctgtttgttaaagttcaacaacccaaaggtaattaatttttatccacttcctacatttatttgtatgtacattatatatatacacacaaataaatataaatgaaataaatctcaccaagcaagaaaactggttatttattgtaaaataacattatctttaaaaaaaaatcagcaattacaaaagtaaattttcttacaagaattataacatttttactagtctatatcaaattatatgattaaagggttcaacatttttgttagtccgatataacatttgttgttacgtaaagaatactagaatttaatatactcattactatattttacttgtcgctatccgatatcggatacacaacagttttcttattttgggtaatatattaaggtaacatataaaataaatgaaatatatgtaaaatatgtgcagataacaagaaggcccgagaaaacgttgtgtttatacatggttttgtatcatcatccgcgttttggacggagactctcttcccaaacttttctgattcagccaaatcgaactataggttcatcgcagtcgatcttttgggctatggaagaagtcctaagccaaatgactcattatatactttaagagaacatttggagatgattgagaaatcggtgatctctaagttcaagctcaaaacgttccacatagtagctcattccctaggctgcattttggctcttgcactcgcagtaaaacatccgggagctatcaaatctcttactcttttggctcctgtaagtcaattatacataccctctacgaatcgatactcgaggaataataagcttccgacttaatgctaattgacaataagtggttataatatggcagccatattacaaggtgccaaagggagtccaaccagcgcaatacgtgatgagggaagtggctcggaaggaagtttggccaccgatgcagtttggtgcatcggtgcttagctggtatgagcacctaggccgcaccattggccttgtccttatcaagaaccatcaattgattgaatttgtcacccgcctctttaccctaaacaggtacatatatttttttttcatagcaaggttttttatatgtcataaatggaaacctaaataaacttgctcttaatcacgtttcaatttatttagaatagattttattttcttttctggtgataaactctagaagtttcgggtctttggaaactagaataagcaacatctagaacagagaagttacgtccacaatatttggataactagaataatcaaaattatgtcataagcaaaatcaacccaaatattacagtgcatgctgttcgtccgttcggagaacaacgaaatgtgtaaaagtctatacgtttaatgaaccaaccactcgtcttcttcaataccttgaagttgactcggaatggttatatttaatgaaaacctacaacttttttttctttatgtaaatcatctctgattggtacactatagtggttcttacataaattaagtgataccatattaggaattaatagacgagttatgcaatctaatagctttatgtagtaganaaagttgccttgaaacatagaaagcgacttataacgaccgtgtctcttccattatttggccccattcaattccattttgtcgtttcatatcttaataagtatatgtataacttttaactatttatacgccatataaattaatttattttctttctatgtatgcaggatgcgaacgtatttgatagaaggattcttatgtcacacacataatggatcatttcacacattacacaacatcatcttcgggtcaggagccaagctcgactcgtatctcgaccatgtccgtgaccatgtggactgcgacgtcgccattttccacggtggcaaggacgagctcattcctgtggagtgtagttacagtgtgaagagcaaagtgccacgtgccactgtccacgtcatccctgacaaagaccacatcaccattgtcgtcggccgacaaaaagactttgcacgagagcttgagctcatttggcaaagaaccaaatcaacttaa

SEQ ID NO: 166252 - DNA, 547 bp, Arabidopsis thaliana landsberg
acattcaccgcagagacattattcattgtgacattaaaccggacaatctcttgctcagccctgttgatcaccggtttaggtctaatgggtttttgacaaagattgcagatttcggtttatcaatggagaaaggttctaacgagtatggaaacggacgtgggcacatgagagggacaactaggtacatgactccggagttaataggcagtgggcttgtggattttgctgttgacatttgggcgtttggatgttctgttttggagatgctaaccgggaaaaaggtttggggagagcatggtgatttggctcatgatgattgggttgatttgatcggtcacagtgatctcactcctcaaatctcgattcggttatctgcagaagctcaagactttctgatgaggtgtttggttaaggagcctggttcgaggtggaccatcggtgaactcgtggaccatccgtttctctgttcggatgaagagttttctcacaatggttttgtttatgattgagtttcttcatgattgagttctgttttgtagtattggta

SEQ ID NO: 166253 - DNA, 2526 bp, Arabidopsis thaliana landsberg
ccagaagggatggggcaatgaaactcaaccacctagcatactgagaattctaaactactctaacccatattcagaagcatatacactactccgacatcattgtagagaacataaacgttgaacaagatgaaaacatgataacaacacagtaatagcaaaatgataacaggatgaacaacagtaaacgaaatcaagaacaaatactgaatactgaatagataaagagaaatccggattacaaaaggtcaagaacacagtgtctgcggaataaaactagataaaaacttgttctcgaaaatgtaaagtacatgctacttatagcaaaatattctgaaaccctaatactcaaaacgaccagtattgggacagattaagaactgtactcgacccaggtggtcgagtgagaggtcgagtgaatagctggagtcttcttttcttccttgtgctcgagtgtctggttgagtgcggaatagagaagactctgaagctcgccatcgagtatgtagtcgagtggtggtggtgatactcgacttccaggtagagtggtgtgatcgagtgatggtcaggtggtggaggtgaagacactcgacctcggggtcgagtgaagtgcttcaaaaccaacaaccccaacctctcctaccgcagcacaaacgttgctaatcctcaagatcaagtgtatcctccacaacaacaacaaggtcagaacaaaccttttgttctttacaatcaaggttttgctcctaagcagcaatttcaggggaattaccagccgcaaccaccacctgggtttgcacctcagcaaaaccaaggtcctgctactcctaaggctgacatgaaacaaatggtacaacaactgcttcacgggcaagcctctggctccatggatttggcaaagaagatatctaagttacataacaagctgcactgtagctacaatgatctcaatgtcaaggtggaaacactgaataccaaagtccgatacttagagggatattctgcatcttcttcagctccaaaacagataagcctactaccaggcaaagcaattcagaacccaaaagaatatgttcacgctatcactctgcgtagtggaaaagcacttcaaactagggaggacccaaagacagtcactgacgacagtgaagatcaagatgggccactcgagctgccactcgaccactttactcgaccaactactcgagcaaccttcccagcaacatcaccaactgctccaaaaccagttgctgtcaagaacaaagaaaaggtctttgtccctcctccttacaaaccacagcttccatttcctggccgtcacaagaaagcattggcagataagtatagagctatgtttgccaagaacatcaaggaagttgagttgcggatacctcttgttgacgctctagcactaatcccggattctcacaagtttctgaaagacttgatcatggagagaattcaaaaaatgcaagggatggtagtattgagtcatgaatacagtgttatcatacagaagaagatcattcctaagaagcttagtgatcctggttcattcactctaccatgctctttaggtccattggctttcaactgatgccaatgtgatttaggagcgtcagtcagtctcataccgctctctattgccaaaagattggggttcactcaatacaaatcctgcaacatatcccttatccttgcggacaggactgtaagaatccctcatggtttactcgaaaacctaccaatcaggattagagctgtcgagataccaactaactttgtagtcctggagatggatgaagagcccaaggaccctttgattctatggagacctttcttagcaactgcaggagctatgattgatgtcaagaaagggaagattgatctaaatcttggcaaagactttaggatgacctttgacatcgaagacgcaatgaagaagcctaccatagaagggcaactcttttggattgaagaaatggatcagttagctgatgagttacaggaagagctggcagaagaagatcatcttaactgtgctttaaccaaaagtggcaaagatgggtttctgcagttggaaactttgggataccagaagctgttagactcccataaagcgctggaagaatcagaaccctttgaggaattgattggaccagcaacagaggtaatggtaatgagcgaagaagggtcaacacgagttcaacctgcacactcgaggacatactcgaccagccactcgaccttgtctgccaatgaatttagggagccaatcatcccaacttcagatgactggtctgaactcaaggggccgaagttgatctaaaaccacttcctaaagatctaaggtacgcattccttggtccaaactctacttaccctgtgatcattaatgctgagttaaatgatgatgaagtgaacctactattatctgagcttagaaagtataggagagcaattggttattcattatctgacattaaaggaatttcacctagtttatgcaaccataggatccaccttgaaaac

SEQ ID NO: 166254 - DNA, 1135 bp, Arabidopsis thaliana landsberg
catgtataagccctaataaatcttatctaggatctagctaatgttatatggtgtatataaaaacaggagattgatcgtttatccgaaagggaacgtaaaggacaatgggagtggatttatttcgatgtatgtggaaatagaaagcacaagcttgatggaatccacaccaccaactgaggcgtttgcggaactccgcttctatgtctacaacaagaaagaaaacaagtactttactattcaaggtgctgcactacaaatctcatgctctttctttaaaattttacgtataaattcacatattattgagtaagcgatgtttatatatttagatgtggaagtaaagcgtttcaatgcacttagaatggtgtggggattgctaaaagttctttcatatgatacatttactaatcctgaaaatggattcatctttgagggtggtgaatgtgagtttggtgttgatgtccttgttgctccaccccttactaattgggaaattctctcttttgatgagaaactctctcctcccaaattctcttggaatcttaagaatttttctgagttgaaagaggatgtttacacatcaaacaaatatcccatgggaggaaaggaatggtgagaagtataaataattttgctaaattttgtttatggactaacaagtatgtatacacatgtatttgaatgttaacaagtccatacttaatgttttgtagggttctaaagctgtatccaaagggaaactctagagcagatggcaaatatttatccctatatgtgcatttagctgatagtgaaacactaaaatcagatgagaagattttcaagcaaggacatgtgcgagttcttaacccacttggatctaatcacgtcgaagtacaatgtattttctaaaaaaataagtcttcttatatatacggagatattcatttgaaattgtctttctcactaaccatgttttgcattttactttcttgcagcgagctgctggtacaaggaatcaagcaggggttggggttgggatcactttctgtctatagctaatcttcggaagacttacttggacaaagaagatgcgttgaatgttgaaatcgaattcaaagttgtttctgcaaccaagtattctcccattatctaa

SEQ ID NO: 166255 - DNA, 1385 bp, Arabidopsis thaliana landsberg
cacacttgtagtgtagacgcgaggggagactttcacaaacaagcatctagagctgtgattgggaaattgatgagaacaaaatacatgaggaagatgctccgtgatgagttcagcctaaatgtctcgtactagaaggcgtggaggacttaggaaatagctatggataatgccattggctcggcaatgggaagctacgcattgattcagccttatttcaaacttctgttggaaacaaaccctaactcgctagtggtccttaatacggaaaaagataacaaaggggtggagcggtttaggtacttattttttgctctagctgctgcagtccaaggttattcttatatgagaaaggtgatagtgtttgatgggactcatctgagaggtcgatatggatgctgcttaattgctgcaagcgctcaaggtgcaaatttccaagtcttccccattgcttttgggatagtgaacagcgagaatgacgatgcgtagacatggttcatggagagggctcacagacgccataccagatgttcacatgcactcatcgatatatgctagcatacgaaaggtaaattatatccggtaacaagataatgttactagataattttacacttacaaagctaatttttctaataccttgcaaatcttgttttacctgatacgtgagtatatcataacactaatacattgtcacgaatctccaggtttatcccatgccttcacacgcggcctacgttgtccatctgaagaggaacatagtctcaatattcaagtcagaagaattgagttttctggtcgccagtgcaactcgggcttaccggctaagcgacttcaatcgcatctttgtagaggtaagaggtatgcacggtccatgtgctgattacctcgaaagcattgggtttgaacattgaacgcgctcgcattttgttggagagaagtataatttcatgactagcggaagtcgctaaacaatgtcttaaccatggcaagggattatgcggtaattttgctgctagagactctttgaacaacactggttacatggtttgccctctaaaatcggagaagctgcacaactcgaggtgaatgagatggtcattgaaaattttgtaaaaggggaagggtatgccgtacttaaaatcggagatgcattttatgaagtgcgagacaaagaagactcgacatttgcggttaccctttgggaaaggacatgcacatgtagagaattgcagctacataaattctgtcttcccatgccatagcagcgatgataaaggagggaatcggtgtcgaaacaatggtaggcgtccaccacacagttccatatctgagattggcgtattatcatgcccgtctccgacatggatacactaactccttccaca

SEQ ID NO: 166256 - DNA, 1965 bp, Arabidopsis thaliana landsberg
gtctcggagcttcaaaaattggaggaagctataggctcaaccgacaccgtttttgatctaagaagcagtatcgagaaaggcgacagcggcgaaaccgcagacgcagcttctatttcctccgcgaccgcgtttcgtagaaaatcaacagtcccagctccggagaagaagctaacgctattcgctctacaactcgcgattcttgagaaaaccgccactggaatcggaaccctagggtttatctgggccacggtggttcttctcggcggcttcgcaatcacactcgacggttccgatttctggttcatcaccatcattctcctaatcgaaggtgctcgaatcttcagcagaagtcacgagctcgagtggcaacaccaagccacgtggaccgtcgccggcgtcggaatcagtagctttcgcgctctccgatcaagctcagcctcgcttttcaaaaatctaaaacgaatcaggttcaattttgcataaatcgatcagcctcgcttctaacatttgagtaacgatcgtctatgtttctctgcagtgattcaatcttcaagccacgatcgagagaagcgacggcaagagactgcgtcgttccagagacgacgttagagacatggaagaactcagacgtacctcttcttccatacgcgagatggttcttcatttccagtacagtgagtcgtcttctttactggctccagcttctctctgccacggcttgtgtagctctatcttcttacaagcttattaggcataactatggagatgttcacaaaggagatacggataagaggaatagacagtctgctctcaatatattctactcgctcgcctttgctgaggcgttgttgtttcttgtggagaaagtttattgggaatggcaagtcagtgtttgtaatttgcttgagaatgtgactagagaatgtgagtttggggttagtggtttggtttcgatcaagaggtttttctatgattcgtattccaagtgtgtcaatgggagtatatttgatggtttgaagatggatatagtgagctttggtatggagcttttgaactcgaactcttctgatgaacagcttattggagtgaggattcttaggcagttttcagtgactgaacggtactcggaggatacacttgagaagatcggaatcaactttcccgttattgaaaggtttggtttttactaatgaaaatattagattttacagagaaatgagttgaggaagttttgtaattgttgctaactttttgtttaactaggttggtggagatgttgaactggaaagatctgcaagaggaagagattaggagatcagccgctgagatactatcgaaactagctggcaaaaagcagaattctttgagagtcgctgggatttctggtgcaatggaatcgatttcatcgttgttagagaacacgagatcatcaggtgaagctcctgatgagattggagagaaaaaggtgttccatgaccataatctacactacgatttctggagattcaacaatttgggccttctaattctgaagaaattagccaaggatcatgacaactgtggaaaactcggcaacacgagaggtcttcttccgaaaataattgatttcacacacgcggatgaaaatctgttgagggatgaaaacgcagacatagcgaggtcacgggttctgacactgaaacggtcgctacagctggtgaaaatgttagccagcacaacagggaacacagggaagtgcctccggagagagatctctgagattgtattcacagttagcaatgtgagggatgtactgaaacacggggcgagatacccaaagctgcagaagctcgggattgggatattgaccaaccttgcacttgaggccgaagctcgggagagaattggcggaactggtggtgttctgaaagagttgttcaacattttctttaaacgggaaacacgcggagatgaagggaatgaggg

SEQ ID NO: 166257 - DNA, 1003 bp, Arabidopsis thaliana landsberg
cgttttgcttgatgattcgttgatctgttttcgggtttgcagtgcaacagtatttggggtttctacagagtcaatgcagttattatacgactcgagagggaattgtgttcctaccatactcacactattacaaagccggctatacgatcaaggaggtttgcagtagaaggaattttcagaatcacaggggataacagtgaggaagagtttattagagaagagttaaacaaaggagtcctacctataggcatcgatatccactgtctcgccggacttataaaggcatggttcagagaattaccgaaaggggtactcgattctctaccatctcaacaagtgatgcagtgtgagtcagaggaggattttgtgaaggttgtgagactcttgccgcaaacgggaagcttctcttttcaactgggcaatcaatctaatggctgattttgtagagtttgaagttgtcaacaagatgacctcccgtaacgtagctttagtctttgcacccaacatatcccaggtcacttcttgcaccacatcacaattttccaagagtttcctttttttctctactcacattgatcttacacaagtaatgtcagttttatcttagtgctaataccaaaaaatggatcaatatatcaagcctctgatccgcatactgggtctgttttggttttactgcagatggcagatcctttaacagcattaatgtatgcagtgcaagtgatgaacttgctgaggaacctcacagacaaaacactcagagaaaggaaaattgcgacttcaaatgtcgatccttgtgataacagaagtgaagctgaagatggtaatgtcgaagaatataatcaagaagtagaaatgtatgttcttgaagaagtagagcaagaaggagatgatgttgatgatctcgacaacgaagataagatccgagagaataacactgcttgctgatgaacacaaaccatcaagcgcagtgaatgctaatgatcgaaagaaacaggaaaca

SEQ ID NO: 166258 - DNA, 2307 bp, Arabidopsis thaliana landsberg
  unsure (1)..(2307): unsure at all n locations
aagactttgactgaattatcgaagagggatatgctcttatggcttccaatggctcaggagggagttgatcatgttaagcaggctatgatcttagctccagttttgggattccctgactnnnnnnnnnnnnnnnnnnnnnnnnnnnnnnnttttggtaccggcgttggagcgttattaatgcaagaaatgaaaccgatcgcatactttagtcatgacttgactccaagagaacaattgaagtctgcttatgagcgtgagttgatggctattgttatggctgtgttaaaatggaagcattatttgattggtagaaagtttgaggtccatactgaccaacgtagtttgaagtttttgttggaacaaaaagaggtgaatatggagtattaaagatggttgacaagattgttggggtttgatatggatattgtgtataaaccaggggttgaaaacaaagcagcaaatgggttatctcgaatgcagcatcctgattatgcattgaagctggcactcacaatgccatatgttatttaacttaaggatttatacatagaaattgatgaggatgagcatattcaaagtgtaataaaacagttgcaggataatcagctacaaggaagtcattaacagttggttaatgggcgtttgtggtataagcaactactggtttttccgaaacattcaagctttattccgctgattttacaagagtatcgtgatagtaaggtggggggacatgctggcattttaaaaacaatgaagcgggttcaagagagttttcattgggaagtcatttataaagacattcagtggtatgttactggctgttcgatttgtcagactcacaagtactcgacactttcaccagtaggatagttaccaccgttacctatccctacagcggtatgggaggatatttttgttgatttcattgaagggctgcctacttccggtggtgtcaatgtgattttggtggtggtggaccgacttagtaaggcagcacacttcttgggattaaaacatccatttaaggcgattgatgtggcaaataagtttgtttcagaggtggttaaattacatggattcccaaagtctattgttttagaccgtgatagaatctttctgggggcagtgtggaaggacatgtttaaactgtcgggtactcagctgaaacatagtacatcgcatcatcctcaaactgacggtcagacggaggtcctgaatcgttgtttggagacatacttgcgttgcgctacttctagtcatccacgggcttggcataaatatttggcgtgggcagatttttcttttaatacggcttaccactatgctttgaagacatcgccttttaaggttgtgtatggtagagatcctccttctttggtgaggtttgaacttggttctacggataattgggacttggaggtgcagttaaaggagcgtgatctaatgttggaacatattcgagctaatcttcaaagagctcaagagatcatgaaacataatgctaatatgaagagaagagatgtggtgtttgcagtgggtgattgggtgtatttgaagttacaaccataccgacagcggactgtggttcgccgtccatgttacaagctggctgccaagttttttggtccttttgagatagtggaacgcattgggaatttggcatatcgccttaaccttcctgcttcatcaaaaattcacaatgtgtttaatgtttcccagctaaaaaaagtgcttggcgagcaacagaaggtgtaggcaattgatcctccagagttggtggaagatgaatttctgtttccggagaagattgtggatattcgttttacggacaaagggaacaaagagttcttggttaagtggcaggatcgtggtgtcagtgaaaactcttggatgtcgtataaggagtttgttcaggtattccctcagttcaagcttaagcacaagcttatttttctgtcgaaaggcatccatatccttcatcaggagcatctcaggcataggacaggaccacgtcagcatattagagttgaagaaggtaaggatgtggttgtaacgcccccgagcctgaccatgacaggactaaccacggccgacccggtgggcgtcacagatggagagaaccaggcgcaactcggctaaagacccggggtttcaagtccttggccaactctcattcggtcatctccccactagatgcaccgcgtaggcttgccaacccttgtggcgtacccagtgttgtgcggctcggacaaagccttgtatcatcacgaaacacccgcatttgtaaaaccctttgtactttaa

SEQ ID NO: 166259 - DNA, 2012 bp, Arabidopsis thaliana landsberg
agatacatagctatgtcgtcaagagctcaccctgtggacggaagtccgacgacggacggtggacatgttccgatgaaaccttcacccactcggcataaagttggaatcccaccaaagcaaaacatgttcaaggagttcatgtacacattcaaagaaactttctttcataatgatcctcttagggattttaaggatcagcctaagtctaagcagtttatgctcggtctccaatcggtctttccggtcttcgattggggacgtaactacactttcaagaagttccgaggtgatctcatctccggtttaaccattgcaagtctctgcattcctcaggtgaaaaacctaaactcaagtacttgtatcacaagttatctgtacttgcttgtttcttatgtatattccttgatgatttcaggatattggatacgctaagttggcgaatcttgatcccaaatacggtttatgtaagtttgattttgacatgctcacacttgattgacctcatttgataaaacattggatacacaaaatatgtttcttgatgttacagattcgagttttgttcctccattggtgtatgcttgtatgggaagttctagggatatagcaataggacctgtcgctgtggtttcgctgttgctaggcacattgcttcgagctgagattgatccaaacacaagtccagatgaatatctccgccttgccttcactgctacgtttttcgccggtataaccgaagcagcccttggattcttcaggtaaaaaattgatctcttatctattaacaatttcttccttctttcatggttgaaaaggctctcaaaatgttcatcctcttccttactactctcagattaggattcttgatcgatttcctttcccacgcggctgtggttggcttcatgggcggcgcagccatcactatcgctcttcagcagcttaaaggcttcctcgggatcaagaaattcaccaagaaaactgatattatttctgttcttgaatccgttttcaaagcagctcatcacggcgtaagaaccctttacgctgatacaaacactttgtttcttgattcctccattgggtaaatctctttactaattcatataaatttggctatgcagtggaattggcagactatactcattggtgcatcattcttgaccttccttctcacgtctaagatcattgtaagacatatatctattaacaaaacatctaagtttattctttgtttagatctgtttctgacctctcttgacttgatgctgaaacaggggaagaagagcaagaaactattctgggtaccagctattgcgccattgatatcagttatcgtttccaccttctttgtctacataacccgagccgacaaacaaggagtccaaatcgtaagatctcaactccctctaactagtttcttgcgtttcaaacaatttgtcgttgtggtaatacctaatatgattcttttttcttttcttttttatgaataaaggtgaaacaccttgaccaaggaatcaacccttcctcgttccatctaatctacttcactggtgataaccttgctaagggcatccgcatcggtgtagtcgctggcatggtcgctttaacagtaagtacaaaccaatgactcatacttcaatctctcttaaacgaaagttcctcattgaaacccgaatatttcaatctgttttcgcaggaagctgtagcgattggaagaacctttgctgcaatgaaagactaccaaatcgacggtaacaaagagatggtagcattaggtatgatgaacgtagttggatcgatgtcttcttgctacgtagctaccggatctttctcaagatcagctgtcaatttcatggctggatgtcaaacagcggtttcaaacatcataatgtcaattgttgttctcttgacattgctcttccttactcctctcttcaagtacactccaaacgccatcctcgcagctatcatcatcaacgctgtgattcctttgatcgatatccaagctgcta

SEQ ID NO: 166260 - DNA, 2062 bp, Arabidopsis thaliana landsberg
ggggaaccggcacaatgagaacctgtctaaagtgatttcaaccatatttaggacgaagtttgatgggccttacttcagttggaacgttactccaatagccactcaagagagatacttcagaaattttgcggtaatgtcacaaatacctttcattctgttattgtttactttgacttactctaactatctttgcaaacttagctgcttgttatgtagcaaaagtatattgggatcaaggcattactgagctcgttaaagaaggtttcttggttatagccaagacaaggatgaaaaggattgtcagtcaagcaaagaagagtggtgaacaaccaccgtggattcgtgatacactttggaaacagatgttggtgcattggaacactgaagatgctcaactgaaaagtgaaacagcttcaaactgtacaaactaagatcggggaggtcttggggtgcacaaacacttagccggtcagaaatcttttgtgcaagttcatcaagaaatggtaagagttgtctttccatccaaatagttcacttaacagctttctattattaccttcacataagcttgtctttttctgtttgattttcttggtcaggaggaacgtttgaagcgtcatgtatcatatggggaattgtttatgcaaacacatacaagggctgatggatcttttgtagatcagatatatcagcatgttggtgaggcttatatgaagatgatggaagagaggatggctgaaatggacgaggatggtcctcaagtttctgataattcctcgcaacattcaactcatcgtacgctcaacattgatgaaaagaatgagatttttcttaaggtaatttatttctgtttttattttgcttacaatttgcttgtctttgtttgcttggattatgattgattatgagcaatggatacttagagtaattatgattgtcttcggtgactgtatttgtcttctcgtttcaatgtactcacatagatggcaaagggaaccattttggctttggatcacttgtggagacactaaacaaaagaagaaggaaagagagttatgcgagctcttctacatcaacggttgtgcagcttcaagagcagttatagctcaagatatctgaacaagaggagcaaaatgcaaaacgtgatgtggagcactacgaatctcaatctcggatagccagtttggagaaagaaaaagatcccgagttggatgcttatttgtcttcagattctacagatgttgaaccagtcacacttccaaccaccacacaccacacttccaaccgccacagccaaccaaccaaccatcacagaagcaggcaccaaaggagacaacatattaggcaccacacccttagtctctacttcagttactttgtctaacactgcttctaacaattaaacttgatcttttgtagcttttgttgaacttgttaggatgctaatcttttgttgcttttgttgaacttgttaagatgataatatgtaggtttcactatgattttgtgaatgtaaacttgattactgttcttaatggtatttaactagcatcattggctttttaattcaatattaatcaggtttatcattccaaatatacgacaatttgtgactaaaccaaaacaaaaaatgtgactaactagtgaccaaaccactttataaaccagtgaccctttcgtcaccaaacttactcccactatgtgacaattatgtgaacgacacattacaaaatatgtgacgaatttgtgactaaatcaaattatacaaatatgaccaatgtggcacaagcgtagcaaaagtgttacaattttgcgatgaattttaaagcgccttaacttcgtcgcaaaaaggaaagactattttccgactaaattgtaactaagtgtatgaaccgtacctcagtgtacctcgttgcagtttagtcgcatatctgcaacttcttgggatcgtcacaatacagtcgcatatttacgactaacagaacgcgtccgcaattcgtcgctaatcagcgaccattttgcgactttattatttagcgacggttttttagcgacggtttaa

SEQ ID NO: 166261 - DNA, 1043 bp, Arabidopsis thaliana landsberg
agaggaactaataaacggaccatgagctccacagagacatacgagccgttattgacacgactccactcggattctcagataactgaacggtcttcgccagagatagaggagtttctccgccgtcgtggatccacagtgacaccacggtggtggctaaagctggcagtgtgggagtcaaagcttctatggacactctctggagcctctatagtggtctctgttctgaattacatgctcagcttcgtcaccgtcatgttcaccggtcatctcggttctcttcagctcgccggcgcttccatcgccaccgtcggaatccaaggcctagcttacggtatcatggtacgaaggcacatttgagttcataaagtaaaaaacagagtgaagaacacgaaacaacgtcgtttaattctatatttattgtacacttcatatgttgatcggtttctccttatcgaacattcttgagttttaaaaagttttgttaatcaaattgactagttaggaatggcgagcgcggtccaaacagtgtgtggtcaagcgtacggagcgagacagtactcatcaatgggaataatctgccaacgagccatggtcttgcaccttgcagctgcagtcttcctcacgttcctctactggtactcgggtccaatccttaaaacaatgggccaatccgtagccatagcacacgagggtcagatctttgcacgtggaatgattccacaaatttacgcatttgccctcgcttgcccgatgcagaggtttcttcaggctcagaacatagtgaaccctttggcttacatgtccttaggagttttcttgctccacacgttactcacgtggctggttaccaacgtgctggatttcggcttgcttggggcggctctgattctcagtttctcatggtggctgctagtagctgtgaatggtatgtatatcttgatgagcccgaattgtaaggagacatggacagggttttcaacgagggcatttagagggatatggccttacttcaagctcacggtagcttcagcagttatgctatg

SEQ ID NO: 166262 - DNA, 314 bp, Arabidopsis thaliana landsberg
aaaaacaaatttttatcaaactttcccatatttcaaaataaaattgggaactaaaattataaccgaaaatttaatcctacaagtacaaggctgatctatctcctctttatacataagtcgaaattctattctgggtaacaaagtgtatgattgatgccgacaaccaaaaaatagcttttttttacagattgttcagatttgatgaagatggtgtctttcccaagcgaatgaccagcattttcaacatatttgaaggagattcagaccgagaaggaagaattcactactttttctttatctttaatttctcgtaa

SEQ ID NO: 166263 - DNA, 1251 bp, Arabidopsis thaliana landsberg
  unsure (1)..(1251): unsure at all n locations
aatgtgttgaagcgaggtgtcttggatcttgagctcgacattaacgtcaaagaagattacatactcccttttgatgtcttcacctgcaagacagttgttagactgaaactagggtgtggttttgttattgacattctccctaagaatgctttgcttccagctcttaagactctcattcttgattcagttcggttctacgccagtgatggttgtgcgttcacaaggcttctctctgcttcccctgtgcttgaagagttagttatagatcgtctcaactgggaacattggaaaggttctcgctttgtgtctagtccgactcttaagagacttactcttcggcgtaaagaatgggaacccgaacctgaaacttggactgattttgagagcgttagttttgatactccgagtcttgcttacttaaaatacaaagatgttattccatatgggtatccaattgttaatctcaactccattgttgaagctaggctcactcttcctagggaagtagagtacgactattggcttaacagatctgctgatccttcgaatttgattagagggctaaaaaatgttgagattctgagcatcaaggttcttcatacgatggacgtaagtgttcttgatatgtatgtgcagcttaaaaaataaaagagcatgaggataagttgtatctaggaaccattgagattgccgactaatttgtttatcttttctgttccagctgttattttataacttcaaggaagcagtcccagtgtttgaaaacttgattcatttgtcggttaccagtgaagcagatttctgttgggatcctctgcaaattctgcttgagaaatctccaaatctaaagactctcaccattgaggtatgaccaaaagttcattggacagactaaagaactcatatagagtcagatatacttgtcaagtatctcaaaaattttcatgtctttttcagggtcccttgcactataattnttatgaaaaactggatttggaagctgtttgcgaatgtttgttggggtattctttcctgttgtcctgccctattaaggtcctcaagataaccgagttcgtaggagatatcggagagatagtgcaaatgaaacatgtcttggggaaattgccgtgtcttgagctgttggaagttcatgttcaggcaagaagagatgacaaaaagctgcagatcatggcggatctcttaatgcttcccagaacttcatccaaatgcaaggnnnnnnnnnnnnnnnnn

SEQ ID NO: 166264 - DNA, 1163 bp, Arabidopsis thaliana landsberg
atcaaatcttttttcttcttcatcaacaccatcatcatcatcaccgtcatgtgtaacccatcaacaacaacaacaaccaccggttcagagaaccaagaatctcgaaccggactcttcctcgatctcttctcgatcaatagctttgaacccacaaagagaaatctccggcattgtgagaacagaggatctcctcttatggcagaagctgtaacagaggcgaaatctctcttcacgttagcttttccgatcgccgtgacggctcttgtcctctacctacgctcagccgtatcaatgtttttcttgggtcaacttggtgacctcgaattagccgccggttcactcgccattgcctttgctaacataaccggttactctgttttatccggtttagctcttggtatggaaccactctgttctcaagccttcggtgctcaccgcttcaaactcctttccctaaccctccatcgaaccgtggtttttctcttggtttgttgcgtaccgatctcggttctctggtttaacgtcggcaaaatatcggtttaccttcaccaagaccccgacatcgcgaaattagctcagacatatctcatcttctccctacctgatcttctcaccaacactcttcttcatccaatcagaatctaccttcgtgctcaaggcatcattcaccccgtaaccctagcttctctctccggcgctgtttttcacctcccggctaatcttttcttagtctcttacctccgtcttggtttaaccggcgtagcagtcgttcctccatcacaaacatcttcgtcgttgctttcctcgtttgctacgtctgggcgagtggtcttcacgcgcctacatggactgacccgacccgtgattgtttccgcgggtgggctccgttgctgcgtctcgcgggaccaagctgtgtctccgtgtgtttggaatggtggtggtacgagatcatgatcgttttgtgtggtttgctcgtgaatccaagatcgacggtggctgctatgggcgttttgatccagacgacgtcgtttctttatgttttcccgtcttctcttagctttgctgtctcaactagagtcggaaacgaacttggagccaaccgtcccaagacagcaaagctaacggctacggtggctatcgttttcgcggcggttacagggatt

SEQ ID NO: 166265 - DNA, 3402 bp, Arabidopsis thaliana landsberg
cacctgcctccggagcagatctccaactagggacgacctcgtccaagctttcgccggcaacttccagggcacatacgtgcgccctgggaattcctgggacctccgaagctgccggcagcagccaggagaatccctccgggactacatccgacgattttcgaagcagcgcaccgagctgcccaacatcaccgactcggatgtcatcggcgcgttcctcgccggcaccacctgccgtgacctggtgagcaaactggggcgcaagactcccaccagggcgagcgagctgatggacatcgccaccaagttcgcctcgggtcaggaggcggtcgaagccatcttccggaaggacaagcagcctcagggagagccaaaggaagacacccccgaggcgtccgcccaacatggtgagaagaagaaaggcaagaagaagtcgcaaacaaaacgcgacgctgccgacacagatcttgtcaccgctgccgagcacaggaaccctcggaaaccccccagaggtgccaacctcttcgacaagatgctcaaggagccgtgcccctatcaccaggggcccgtcaagcacacccttgaggagtgcgtcacgcttcggcgccacttccacaaggccgggccacccgcggagggtgcgagggccgcgacgacgacaagaaggaagaccaccaagcaggagagttccccgaggtccgcgactgcttcatgatctacggtgggcgagcggcgaacgcctcggctcggcaccacaagcaagagcgccgggaggtctgctcggtgaaggtggcggcgccagtctacctaggctggtccgacaagcccatcactttcgaccaagccgaccaccccgaccatgtgccgagcccggggaaatacccactcgtcgtcgaccccgtcatcggcgatgtcaggctcaccaaggtccttatggatggaggcagcagcctcaacatcatctacgccgagaccctcgggctcctgcgcatcgatctgtcctccgtccgagcaggcgctgctcccttccacgggatcattcccgggaagcgcgtccagcccctcggacgactcgaccttcccgtctgcttcggaacgccctccaacttccgaaggagactctgacgttcgaggtggtcgggttccgaggaacctaccacgcggtactggggaggccatgctacgcgaagttcatggccgtccccaactacacctacctgaagctcaagatgtcgggccccaacggggtcatcaccgtcggccccacatacaaacacgcgttcgaatgcgacatggagtgcgtggagtacgccgaggccctcgccgagtccgaggccctcatcgccgacctggaaagcctctccaaagaggtgcccaacgtgaagcgccatgccggcaacttcgagccagtggagacggtcaaggccgtccctctcgaccccagtggcgacacctccaagcagatccggatcggttccgggctcgaccccaaataggaagcagtgctcgtcgactttctccgcgcaaacgccgacgtctttgcgtggagtccctcggacatgcctggcataccgagggatgtcgccgagcactcgctggatattcgggccggagcccgacccgtcaggcagcctctgcgccgattcgacgaggagaagcgcagagtgattggcgaagagatccacaagctaatggcagcagggttcatcaaagaggtattccatcccgaatggcttgccaaccctgtgcttgtgaggaagaaaggggggaaatggcggatgtgtgtagactacactgttctcaacaaagcatgtccgaaggttccctaccctctgcctcgcatcgatcaaatcgtggattccgctgctgggtgcgaaaccctgtcattcctcgatgcctactcaggtatcaccaaatcaggatgaaagagtccgaccagctcgcgacctctttcatcacaccctttggcatgtactgctatattactatgccatttggtttgaggaatgcaggtgcgacataccaaaggtgcatgaaccacgtgttcggagagcacatcgaccgaacggtcgaggcttacgtcgatgacatcatagtcaagacgaggaaagcctccgacctcctctctgaccttgaaacgacattcaagtgtctgagggcgaaagacgtaaaactcaatcccgagaagtgtgtcttcggagtcccccgaggcatgatcctggggttcatcgtctccgagtggggcatcgaggccaacccgaagaaaatcgcggccatcaccaacatggggcctatcaaagacttgaaaggagtacaaacgggtcatgggactcgcttcgggctctgagccgcttcatctcgcgcctcggcgaaagaggcctacccttgtaccgcctcttaaggaagaccgagcacttcacttggacccccgaggccgaggaagcccttgaaaacttaaaggcgctccttacaggtgcgcccatcttggtgccccccgctgcaggagaagccctcttgatctacgtagccgcaaccactcaggtggtcagcgccgcgatcgtagtcgagagacgagaagaagggcacgcactgctcatccagaggccagtctacttcatcagtgaggtactgtccgagaccaagatccgctacccacaaatccagaagctgttgtacgcgatgatcctgacacggcggaagttgcgacactacttcgagtctcatccggtgacggtggtgtcatccttccccctgggagagatcatccagtcccaagaggcttcgggtaggattgcgaagtgggtggtggagattatgggcgagacgatctcgttcgccccccggaaggccatcaagtcccaggtcctggcggacttcgtggctgaatgggccgacacccagctctcgacggctctgatccaactggagccttggatcatgtttttcgatgggtcgctgatgaagacaggggccggcgcaggcctggtcctcatctcacccctcgggaaacatctccgctacgtgttgcgcctccatttcccggcgtcaaacaacgttgtcgagtacgaggctctggttaacgggttgcgcatcaccatcgagctaggggttcggcgcctcaatgctcgtggcgactcgcggcttgtcattgaccaagtcatgaagaactcccactgctgcgaccggaagatggaggcctactgcgacgaagttcagcgcctagaagacaagttctacaggctggaactcaaccatatcgctcgatggtacaacaagactgcggatgagctagctaaaatatcctcgaggcggacaacggtttccccagacgtcttctccagagacatacatcaaccccccgtcaagatcgacgacacgcccgagcccgaggtatcctcggccgcc

SEQ ID NO: 166266 - DNA, 482 bp, Arabidopsis thaliana landsberg
  unsure (1)..(482): unsure at all n locations
gcactgcaaccttcgacatctggaaaacactcgcgtttgaggactattcaatggctcagcttttcgtcgttcattcacagaacccgcaggcccgattgcttcggcaggcggggcagctgcttgcgggcgggggcctggtggccgtgcccaccgactccagttatgcggtgctggcgcggctcgacgacaaggcggcggctgatgccctgcggcgaatcaggggcctggacgaacggcatcaccttacgctgctgtgccgggacctggcggaaatcggccatttcgcgcgtgtcgacaatgcccagtaccgtttgctgaaaaaggccacgcccggtccgtgnnnnnnnnnnnnnnnnnnnnnnnnnnnnggtcctcgccgcgtgttccatccgtcgcgcaagaccatctgcatacgtgtgcccgatcaccgcattgcactggaactcattgaacacgccgggtcgccgctatgttcacgacgc

SEQ ID NO: 166267 - DNA, 1063 bp, Arabidopsis thaliana landsberg; identical to SEQ ID NO: 10033

SEQ ID NO: 166268 - DNA, 821 bp, Arabidopsis thaliana landsberg; identical to SEQ ID NO: 7911

SEQ ID NO: 166269 - DNA, 542 bp, Arabidopsis thaliana landsberg
cctttgtgttgtggctcttacagccaatcctaggagctgcagggatacacctgggaaccccctgatgtgttccctaagttcctcgacctcgattacctcaggggaaagtattatcttgacaagacaactccggcggattactacatcgtcaagttcaaccatcctaagcttggaccttctttgttacccctaccttgcgagaaccaaacttcagtgaagacaaggcataacatcaacttcatgccatctccctctgccatgaaaatcgacatcggaggagctagagaagctcggtgtgcttgaagagtttgggaaccttcacagcaaaacgatgaaaggtttcaagaagaagatgagaaccatgaagaagtcgctgaagagtattgatgctcaaataaaagacttccagagcaagccaaggcccccgtctcccacccccaaagtaataagaagtggttcaacgagctcagctacgaggagggctgacaggatcgatcgaccccgagcttcatcatttgagcctcgggaagtgatctccgagt

SEQ ID NO: 166270 - DNA, 1387 bp, Arabidopsis thaliana landsberg
tcccaatatggtaaccttcatattccagtcccgtgaagattcctaccagtccaagcgcggttcttgttttcccccagccatttccggggaaatgtcatttatatttatccaatatccctcatacataatttgcaaagtcattttcgaacagaatgtttacttcgataatttcggaggaatttcaaaaatatggcattgatttgtatattgttataaaactataagagataattaaaagcaatcttttcgttacaaatttaaattctagtttttgaaacacgttaatttataatattatcacttttaataaacttgttttttttttttttgcaaaattaccattacaaattatttagtccataaataccatagataaaagtgatttaattttaattttttggtttgggtttatgttttagtttttaggttttgttgtttagaacttaaggtttggtattgtggtatttttgaggaataaaaactagtgatggcatttcattttagtgattttttgagatttatcctttttgttttgattttcatctacttattaattaatttctcagatttaacgcttggaagaaaaaacaaacataacttcgattgaaaaaaatcagtgtcgttcagttttgttcttaaaatggcaataattccgataactcttgatactctgctttggtttcttaattgagacaatatgtaaaatattgttctagattgttgtgttgatatgtatttatgtaagcttcgtaggagatgtccgagaaacaaagctggaataatatggttcgaccagtgttttgtcgagattactgcaatcgaggtcatggaggtgaattacgataacaatttttatatgcacaacccgaacaaggtaatgggtgatgcaaagtctttcaacaaggagactatggcttttctagaacagctggcgttggaagcaacccgtaaagacaacatggaggacggcatgatggcactatactcggccagggagaagatggttgggacaaagaagctgtacgcaatggttcagtgtacgagagatgtattcatgtttaagacaatgtgtaaggagtgtttggaaaggataatcagccagtatcccaaatgttgcgacagtaaaccaggagggagagttttgggtacaagctgtaactttagatatgagttttacccttttcttaggacttaaaacattttttgagaatgatgcaagccacacatttctcttgacaactttccttttttgatacctttaattttttgggtttttgggttttcactccactttcgtttttgttcgttaggtcctcgttgtacctatgaatatcaagctttattcattacagcctttgattttataattagtaaagagatgatataa

SEQ ID NO: 166271 - DNA, 830 bp, Arabidopsis thaliana landsberg
atggcggaatgtccgacggatctcatcaacgaaatgtttctccgtctcagagcaactacgctcgtaaagtgtcgcgtcctctcaaagccttgcttctctttgatcgacagtcccgagttcgtctcatctcatctccgtcgcagactcgaaacgggagaacatctcatgatcttactccgaggacctcgtcttctacgcacggtggagctagactcgcctgagaacgtctccgacatccctcatcctttacaagccggaggttttacagaggtttttggttcatttaacggtgtcatagggttatgtaactctcctgttgatctagcgatctttaatccttcgactaggaagattcaccgtttaccaattgagccaattgatttcccagaacgtgacatcactcgtgagtatgtgttttacggtttgggttatgattctgtgggcgatgactttaaagttgtgaggattgttcagtgtaagcttaaagaaggtaaaaagaaatttccttgccctgttgaagtcaaagttttcagcttgaagaagaattcgtggaagagagtgtgtcttatgttcgagtttcagattctttggatttcgtactattaccatctcttgcctcgtcgtggctatggtgtggttgttaacaaccatcttcactggattttgcctcgaaggcagggagtcattgcctttaacgcgataatcaaatatgatcttgcctctgatgacattggagtcctcagtttcccacaggagctatacattgaagataacatggatattggtgtgttagatggctgcgctcgtatgatgtgcttcgacgagtatag

SEQ ID NO: 166272 - DNA, 707 bp, Arabidopsis thaliana landsberg
ctcttattttgttcatttgatgcctcacaagccacaagaagttatgaaggctattggctattgctttcggtgtttgctgttgtgaagtcacatgaagaacgtactcaatttgagaatatagagcatgttatgaacttcatgaagagagtagaattaccagtggagttacgaaattcaattccatggattgtatgggggcttttgaaagcacgaaattcttcagtctatgcagatagagtcaacgaccacaatatcgtgatagccactacattggaagaagcagaggaatggagtacacaaaactctgtggcttctcaagaaaattgttcgctaggtaaaaggattagcaggttgtcccgtcgttggagtaagttagaattgggttgtcttaaatgtaatgtccattcttcatagattagcgattcaactcttgtgggggagcctggattttgcgaaatcatttaggtgatgttctgtttcacgctcgtgattcttttctgccaatgatcaatagaattgaagcggagttaagatgcatccaatggagtcttcaaagcttacatgatcttcatattgaatcgtgtgaagtttggtcagattgtgcatcggctttacaggcgctagcgtcaccagaggagtggccaaaatatcgctctcaactcaatagcagcagagagccttacgcaccgttaaggtctcacgaataa

SEQ ID NO: 166273 - DNA, 1020 bp, Arabidopsis thaliana landsberg
acagaaactgagagagtcacatcaggcttataattcatctgttagctcatataccagttcctctggggcctcagatcaccagaaccatcttattgatttacccggttacgatccaaccagaattccatcctcagttttctctagtaaaccgggtaattcgacggaatggagtctagcttctaatgaatctttgtttagcatccacgatgggaattttagcatttcaacagcgttgagattggctgagataccgagatttgaagaaacggttcacgtgataaccgaaatcaactcggttcctcttccacctccggttaagaaaccaaatgaatatgagaaagagacgattgcagagaaggaaccataccaggtggagaactcaaactcagatattgaggataatgaagaagaagagaagatgagtgaagtcgagagcgacgacgaacatgaagaagaacaaacagatatgatcgaagcggaggctttagtagagaaagaagtaatagaaactgtgaaggagaataaacctgaagactcgaacagtatagtttcacattctccgtgcatttattgtcgttcggacactagcagtaacagcattggttctttcgcattcccactgtaagtcgttctcttcaaaatctcaatttatcgatccatttttgatgatttcttgagcaagaagaaactttaaaaccctaattttactttctttggaatttatgtaacagattgcaaaaagaagatgcagttaccaaaacgccgtctatgcaaatcaaaggaaacgtttcccacaagcgaagacccgagtatcagctgcctcaatcgcgaatgctacagccacaacaacaactacaaccttattcagaatctaatatgctaactgagtctcagccggaaccacaaccacaaaggaaggcatcaaaaaaattcgagtctcgaacgcaatcgctaaaagcttcaagaacctgctggttctcttgcttccattgtccttcaaaatgcggttcattcaagtag

SEQ ID NO: 166274 - DNA, 301 bp, Arabidopsis thaliana landsberg
acttgtctcagcgcgagccaacgcgcagctgatcgaggccctcgaaggtggcggagtcctggagagcgagaaggagcaagttgatgagtggttaaaagatttcgccgatgctgaggtaaatcttaatcgtttcatggctgagctgaaagacgacctcaaaactccagctcccgagcccgctcctctgagtccgggtggtcacagatcagtcgagtcattggccgtcgaggcgggaattacggatcaagccggatctctcctccctgcaaaggataatcgaccatccgaagatcttgactag

SEQ ID NO: 166275 - DNA, 1441 bp, Arabidopsis thaliana landsberg
caccaccaccaaaatctggtacctttgaggccaaattatgattctcaaaatcagaatttggatactaatcaaaaccatttggtttacaactcttcctcctatgaaattccatcaaactacccattcatgagtatcaaatcctactcaaatattgatactcttgagcaatctatgaataacatagtcaacaacggaaaaatccatatgatcgataatcccccaatttttgcaaaccctaagggtatattcgaaaattttcatgatttgcaggaatacactatagggaatgagattgtacacaatgaagaactgactaaaaagggttatgagccaactcttgataaggtaatgggtgaacctcaattatttgatgtgccagtgctagaaggtatcaaaaatacaaccaacgaaatcatgaatcaacttgtagatgataagatgaaaaaaacttatgagaataaaaaggaggcgagcacaagcaaatatttgaagaaaagtgacatcaccaaaaaaagatggacagaatctgaggacatgtaagtcttcattttttttctattctcaaataaatttaaaaactattattcaatttcctccttgggaattctcatataacttttttttattgtatgccttttattttattttttgaggatgtgaaaatatattgtaatgtatatagaaaattgaaagagatggtggcacttgaacccaaaaaatggacaaaggtcgcaaaacattttgaaggacgaacaccaaaacaatgcagagagaggtggcataaccatgctcgtcctaacgttaaggtgttcttttctttcatctgcctatattcttattttcataatttaatataaatgatcatcacagcttatatgtgtgtgaaagcaactacgttcttacaatgttcacgcacacatgtatagagtatagattgaaattcatatagttgaatagtagtgtggctaacgatttaatcacaacaattttaaaaatttatatttaggagttacatgtgatacttacaaataatctcatcatggatacaaaatacattggcaaattttgttttctcatagttattacgaggggttattaaaacgtgcatctttatagtttgtatcttgcttccatcaataaaagtgtcatatacatacaataataagagaatgatttacgtatatgtgatttcagaaaactacttggagtgaagaagaagatcaaatactaattgaagtacacaaagtaattggtgccaaatggatccagatctcagagcaacttccggggaggagctataacaatgttaagaaccattggaataccacaaagcgtcgggtgcaaaataaaagtggtcgaactgtcaaccgtgtcggcaataacatccttgaaaactacataaggagtatcacaatcaacaacgatgatgaatctgatggtg

SEQ ID NO: 166276 - DNA, 2336 bp, Arabidopsis thaliana landsberg
atttttcaatattggattaaaaatttaaaaaagggaaaatttgaatccatttttttaaatgtaaaaccaccctatgtataatgccagtttattaggagatgtcagagaaacaaagggggaattatatggtacgacctatgttttcttgttatttcaacgatcaaaccccaactcccaaggaagattgatttcaaaaacactttctcaatgcacaacccaaacaacgtgagcagtgaaccaggatcgtttgacaagatgacaagggatttcctctacaagctggtgcagaaagcctcttatccaaccgtggtcgaacaccagtctacatattatgctgcgggggagaaaaaactcgggaaaaggaagctgtatgcaatgatgcagtgtgcatcggacatattgcaatgtaaggtttgtttggaatggtgtatcagagagcttcccaagtgttgtgatggtaaacaaggagggagaattttgggtatgagttgtaatcttaggtatgagctatacccttttcttcggcgttaaaagaccgtttgatgttgatacataacacattaacttgacaactttcccatttttttttttttttttttctttttttccttctaattctgtatttttggtaaagtttataattgttgatcttttcattttctcaatgactgcaagttaattagttggctctttgtaaacattttatgtcagttgtgatacagatttaatcaattcaaaatgcaaagggtttacacgtgagtgatttgaatctgtaaagtgtgataatttagacctttttgtaataactcgaaactctctcttttttaaaactcctatgaatgtggaatgacctagctgatgcatgaatcagtaaagacttccatatcccgtatgaagttaataatcactagatgagtacccgcactacgtgcgggtttatgtattactatttactaattgttttatataatgtatgttcatataaagtaaagttgaatgcatctatttttttaaaacataaatatgatttgtaattgttttcaaaaagtccaactatattagttcatctgaaaacgaatgtgcttgaattgttttttattgttgttctagattctccgttttttttttaatttatatatccttgcttttttagttatatgtatagtttgtgagacggtgaaattttagaaaatttatttcttatactaaaaatataacatgtctttattaaccatgtctttgcatattaaatctaatcatattcaacttgatgttcttggaaagtttagttaagttcttgtaataatcttatatcttacgtattagttataaggatagcttctcaaacatctttcaaattacttgttttcttagcataaatctcgaaaagcttagatatatttaatctgcatattcatttagtttctttcataataatcgtaggcaaggaatatgtgtaacatgtttggattttatgatcactttaaccactcaagtagatctcaaaattaaagaggatatattgaattaaaaaaatgtagaaagaatgatggttcaagttctgattaattatatcctcctattttagttattatgttaaattaattactaattatgtattatttattttataaagtctatgtggcaagttttcataatgaaatttttattaaaaaaaagtcaataaaatacgtgttatacttcatatggctctttcaccacggacaagtcaattccatcagttaccgttgtggatcctatggaggatttggaaaagcaaaaacgttttatattttcaaagaagacatattccctgggaaattactttgcgtcttgctcaaactgatgctcatgagtataccgaggcgaatacagtagcacaaataaatacacgtagcagaggggtgagagaggaggataaccatgacagatggagacgacctgaaagaggatggatcaaatgcaactttgatggctcattcgttaatggtgatgtagaaagtaaagcaggttgggttgtttgggatagtaatggaagttatctactggcggggcaggctataggaagaaaggtggacaatgctctggagagtgaaattcaagcgctaatcatttcaatgcagcactgttggagtcatggttacaaacgggtttgctttgaaggagataacaacatgctgtttgacctaattaacggatccaaggtatattttggcgttcataactggatacgggacattcattggtggtcaaggaagtttgaatcaatccatttcaattggataagaagacatcacaatactccagctcatatttttgctaaagctcctctctaa

SEQ ID NO: 166277 - DNA, 1394 bp, Arabidopsis thaliana landsberg; identical to SEQ ID NO: 32677

SEQ ID NO: 166278 - DNA, 667 bp, Arabidopsis thaliana landsberg; identical to SEQ ID NO: 882

SEQ ID NO: 166279 - DNA, 986 bp, Arabidopsis thaliana landsberg
atggcgtcctcttacagaataaactgttccactcttcttcatctccttatgtttctgtctagtcttctcacttcctccgccaacctctcctttaatttctatgctagttcttgttctgtagccgagtttctagtcagaaacaccgttagatcagctacctcctccgatccaacgatccccgggaaactccttcgtcttttcttccacgactgtttcgtccaggtaacacgcactaattacgaattactgaggaaagttcaaacaatttggcttaaactttgtttgttggttgaacttgcaagggttgtgatgcatcagtgttgatacaagggaatagcacagagaaaagcgatcccggaaacgcatctcttggaggattctcagtcatagacacagccaagaatgccatcgagaatttatgtccggccactgtttcttgcgctgacatagttgcacttgctgctagagacgccgtcgaagctgtaacatttacttcactcccacttcacttcaatctatattgctctaatccggtttaaccaatcccaactgaaccgaaagcatacacatgaaatcgaaaaaaagaaacaaaccaattctgtatcattttcgcatagactacacaatgaaccaaatataaccggagttgtagatacattaaaccggttatccttattaaggtttgaatgtttttcttctttggcgggacaggcaggaggaccggtggttgagattccgacagggaggagagacgggaaagaatcgatggctgcaaacgtaagaccgaacatcatcgacacagattttactctcgatcaaatgatcgatgccttctcttccaaaggcttgtccattcaagatctcgtcgtcctctcaggtatatatcaacgtttcctgaaacttctaatcaattttaccaacatgtttagataaaaacaaacagagtatgaaacagagttttttttctttaactagtggtaaaggca

SEQ ID NO: 166280 - DNA, 1510 bp, Arabidopsis thaliana landsberg; identical to SEQ ID NO: 37352

SEQ ID NO: 166281 - DNA, 630 bp, Arabidopsis thaliana landsberg
atattttcaccattttttttttgatgttatggaacatcttccgattcatcttcctcgagaagtagtgttaggtggacatgttcagtataggtggatgtatccatttgaaaggttaatgtttcatctaaaacagaaagtgaaaaatctgaggaaggtcgagggttctatcgtggcgcaaaatataaatgaagagactacatatttttcttcgtactacttcgcacctaatgtttaaacaaaaggtagaaaaccatgtcgctatgacgattgcgggaagaaaccttcttaccactctgatatcccaaaaatatttgcagaatttgggcggctcagatagaccatcaaccatggagttgttgtgcgtacgatggatgcaaaaaattacggtgtgattaaagactttttagaggttgagtatcatggactcataaaatgtgtgtttttcaagtgtcagtggtacaatcctactagggaacgtggtgtttgacttacaaaatttggcgttacggaaattaattcggctaaagagctaaataagtatgatccgtttgttcttgcatcccaagtcaaacaagtgtgctacattccatatcctagagttaaacgcatctatgatccgaggatcacagc

SEQ ID NO: 166282 - DNA, 821 bp, Arabidopsis thaliana landsberg
ttcagatgataataatagatctcaaagagagcatattcctctagatctaatcgtggagatagtctcaagcctgccagcaaaatcgattgtgagatttaggtccgtttctaagctctggtcttcaatcatcaccactccagatttcaccagctcggtcgtgacacggtccttgtcatcgcgtccttgtgttctgctaatcttccaaaaacacgacaagctgtttttttttgcttctccagtacaccagaagaagacttgtcctaacgtggagaattttcaatatacaatccccaataatggtaagcttcaacgttgtgaatccgttcacggcttgatttacttggaaacttctacaaatgtcatgtttatcagaaaccctatcacgaaaagcttcttcacgttacctaaacttgatagcaaggaaggcagaccaccaacgggatttttgggatatgatccgatcaacggtaaatataaagtactatgcatacttaaagaacgaaacaagattggaattcttacattgggagctcaagaatcatggagaatattatctaaaggtttccttagtcattacaaagtgacaggttatgcaaaatgcattgatggagtcatctactatgaaggttcttttggtgatggtttaagacaagagcttgccataatgagttttgatttaagatctgaaaagttcagtttgattaaacatccgaagaaaagtagcatagctacaattttggtcatcttatgagggaagattagctttggtaagttccattgcttctggagttagcttatggattttgcaggatgctgataat

SEQ ID NO: 166283 - DNA, 745 bp, Arabidopsis thaliana landsberg
ggaatgtatttatggagagtttgtgtatattcttctgagacaggtttatggactttcaagcatgttttctcatctcgacccgtccacggtggtagagttgattctccggtgaatctcaacggggttctttatctgtgggataggtatctgttttcaaatggacctggtgtccttgtagctcatgacttttatggagctgatgatcaatgtcaggttatacctctccctggcgcgaatgatgaacatgaacatgaacatgaacatgatgatgaacatgaacatgttcggagatgcttgactacttcaggagaagatgttatcttcattgaagtaatacatcgaatattgaaagcatggaggctgcataacgaaaagagtgaaaggtggcaactgatttgggaagtcgtcatgccgtctttcatatctgatgtcaactgttttcccctggcaatgaatccgtttgatactgatattgtctatctgtgggatcgtcaacacggttgtttggtatcgggttacttgcaggcacaagagtttattgttcatcaagagtcataggatgggagtactagtgaaggtgattgctgtcccgtaaacacgtcgggtcctgaagggttcctggaagagagatgcgatcgaatccttatgttatcacagtttgtgctcccatcttggatggactcggtaccccgaccgccaaattgattatccttcttcggttagcttgttcttcggtgtttatgta

SEQ ID NO: 166284 - DNA, 1121 bp, Arabidopsis thaliana landsberg
  unsure (1)..(1121): unsure at all n locations
aggcttgtgtacgatgctagctatctggatattgactatggaagattttcgacctttgtaaacaggtctttgttgctgcacaaggctccacttatagatactttgcatttcaaaattggtaacgcctgtagtagtggagatattccagcgttgattagagctgccgatgaacgtcgtgtgcatgagctgattatcgagattgatactcctcctagtaatatatatattactcctgtcacacttccgaggagcttgtttacatggtgcaaaatgcttgtgacattaaaactaaggaacgtggttcttaccgatgatgttacttcactactgtttttcccatgcatccctcaaaaacttgagtcttatatccatgaagtacccaggtggtgatgaatttttcaacacgcttatatcaagttgtccaattcttgaagacttggttgtgaaacaaatcctcaacgacaatttggccattgtgactgttagagtgccttctctaaagaggttagtcttgaaccaagaagtaaaaaacgttgttaaaagcatagctaatgggtttgtgataaacactcctgctttggagtgcatgaatattgttgatttttcgaccgggtgtaacattgttagagtgatatgcctacgactgtaaggcaaaagttgacatttttcatccacgaactgagcacttttgggttctacaactttagccaagtatcttcatctctgcttaccaacctcaaaggtatgttatttattagcttgctataatatgattattggtctctaatccagactaattaaatcaaacattgcttgtgtaattgtaattatactttctcttatccagaatgtgtcgtatcctgctggtaatatcttcaaccgtctcgtacatctaaggctatgcacatgtgagactgagtggattaatctacttatgcgtttactcagaaatnnnnnnnnnnnnnnnnnnnnnnnnnttgaacaggtaataaataatacatatttgttttctactactaaatcagtaagattgatatatctgttccactatacactcctatcccaggtccattaccttcgatattaccaaccacgaccgtgctggagtgaaccaagctcga

SEQ ID NO: 166285 - DNA, 392 bp, Arabidopsis thaliana landsberg
gtggcagagtccagggcttctgtctctgaggtactgtttctagtctattttacctttcttaataacttagaccatgaatacatgaaccaattccatcctgcatcgaggtggtgcgcatcaccagcatctttcagtgttaactctgtccgtctcctaggttgcatacctgaattgctttcacaggtcgacatgaaattcccattttctggtgctacttaagacaagtgagtatttgcatgaggtttggcaaatggttttacgacttgtgaataggcccaaaccaatttctggagaatcactacatcgacaatcccctagatttttcagctgtttgccgtccaaataaatattggcatatgatcataaaaacgtgtcaatcaaaaattcttgtc

SEQ ID NO: 166286 - DNA, 998 bp, Arabidopsis thaliana landsberg
  unsure (1)..(998): unsure at all n locations
agtttcaaattctctcaaaccctgaatttcttgctgagggtactgccattaaggatctttataacccagaccgtgtgttgattggtggtagggattctgcagcagggcaaagggctattaaagctttaagagatgtttatgctcattgggttccagtggaacaaatcatctgcacgaacctgtggtccgctgagctctctaagcttgcagcaaatgcattcttggctcagaggatatcatctgtcaatgccatgtcagctctatgtgaggcaactggcgctgatgttacacaagttgcgcatgccgtgggtacagatactagaattggtccaaagttcttgaatgctagtgttggttttggtggatcatgtttccaaaaggacatcctaaatcttatctatatttgtgaatgcaacggcttgcccgaagcagctaattactggaaacaagtcgtaaaggtgaacgactatcagaaaatacggtttgcaaaccgggttgtttcttcaatgtttaacacagtctcgggcaagaaaatcgcgatcctcggttttgccttcaagaaggacacaggtgacacgagagagactccagcgattgatgtttgtaacagattagttgcagacaaggccaagctgagcatatacgacccacaagttcttgaagaacagatcagaagagatctttccatggctaggtttgactgggaccaccctgttcctcttcagcagattaaagctgaaggtatctcagagcaagtgaatgtcgtctcagatgcttacgaggcaactaaagatgcgcacggcctatgtgtcttaaccgaatgggatgagtttaaatccttggacttcaagaaaatctttgacaatatgcagaaaccagcttttgtgttcgatggtaggaatgttgttgatgcagtnnnnnnnnnnnnnnnnnnnnnnnncgtctactccattggtaaaccgcttgattcatggctcaaggatatgcctgctgtggca

SEQ ID NO: 166287 - DNA, 574 bp, Arabidopsis thaliana landsberg
atgacccatcgcatcagcaagtgggtcagccatcggcgctgcgagaactggcgggcctagtgggccgaccggctgttcgaccaggtggtgccgccactgacggcgcgcggcgacaccgtcacgcccatcctggcacgcgggccgttgccggagctcacgcgcaacctgatggcggagcacggcacggcacgcgtcgtcgacgtgcgccggccgaagcaggagcccccggtcggccgcggccagtgggcgccgggcgccctcatgggcctgggcgccgccctcttcctcgccttcgaatgacgcccggggcggggtgctatgctccccgcccatgctcaagctgatcgcgaagtggctgctcagcgcctcggcgctgctgttcgtcgcctggctctacagcggcgtcgaggtccgttccttcccctccgccatgctcgcggcgctggtgatcggactgctcaacgcggtggtgcggccggtgctggtggtgctgacactgccggagaccgtgctcacgctgggcctcttcctcttcgtcatcaatgcccagaccttctgggcggcctcggccttc

SEQ ID NO: 166288 - DNA, 4240 bp, Arabidopsis thaliana landsberg
  unsure (1)..(4240): unsure at all n locations
ccccccttagaaccaaccgcctcaagctaagccctttatagcctataaccaaggctacaaccatatgcagaactttggacctccaggcttcacccagcagccacagcaaacttcagcagaagactcagagatgaagactctacttcgtcagcttttgcaaggacaggcctcatgctccatgaccatggacaagaagctagctgaactcaccaccaggattgattgctcttataacgacctaaatataaagatagacgcacttaacactagggtcaagaccatggagggacacattgcttctacttcagctcctaagcaccccggacaacttcctggaaaatctgttcaaaatccaaaggagtatgcccatgctatcaccacagtgagtacttctgccactgcagacagtgggattcaagaagggaaggttttgagaccaagatcaagacaggagattgaactcgacttctttgctcggcttgtcgaacgagcacatgacccgagcaacccaatccctattccacctcgctatgaacctaaaccatactttccagaaaggattgcacaggttaatgaaaggatcttccagaaacacaagatgatgttcatcaagtgtatcaaagagttagaagagaagatacccttggttgatactcccaaggaagtgatcatggaaagaccccaagaagctcagcaaatagttgaattgagttttgagtgcagtgctatcattcaaaggaaggtgatatcaaagaagctaggtgatttaggttcctgcactctaccttgttcactaggatccttagtgttcaacaataatctttgtgatttgggagcttcggttagtttgatgcctttgtctgttgcaaagggattgggatttgataagttcaagcctagcagcattcatcttattctagctgatagatcagtgagagtgcctcatgggatgctagaagacttaccggtaaagattggatcagtcgaaattccaaccgactttgtggttgtagagatggatgaggaaccgaaagaccctctcattcttgggagaccatttctaccaactgcgggcgctcttatcgacgtgcaaatgggtaagatcgacttgaaccttggtaagaatctccatatgagctttgatattgctaagaagatgaagaagcccaccatagaagggcagcttttcttcattgaagaaagaaatttagatgctgagttgttgagtgggtggganaactccattccacttcactgcctaagagagcctaagcagcccaaanagccttctatgatgaaaggagaatcaagctcaagggtagagactaagggagacctattgaatattgattctattgctagagagcttatggagcttgggaaggagtatgaagctcaagaggacatcattgacaagttggacctcaagatggaagaactaaactatactatcttggagcttaaggaaatgattaaggggtatccaagtcccgaagtagaggaatactttgaggaacctgattcaggagaaggagactagactacagatgagaaacaggcttactttgagaaaagatctaatgaatactctactctccagctatctagagaaaatgaagagtatgattcagactttgaggattcagcaagtgaagatgaggacttcttagttcctctcttcaatctcttctctacctaaacattgtgagactcaagctaagtgactttaaacaagctcacttgggaggaagtcccatgtctatccttgtatatattgctttcttgttatttttaatgtttttgtttaagtgtttcagaaaaaaagacttttgggaaattttcaggccatgctcgaccaaaccactcggccacaggccgagtgtggactttaattgatcaaagcctaggagtagaccatactcggccaagaccactcggcccaaaatcgagtatgggcctcactgttcaaagcccaaaaagatgatccacttgaccataagccgagtaagatgaagcccaccaagcccaacattgtactcgacacgcatgtcgagtatgtcggccgagtatcacacgtgcaaagtcaacaaaattcaaaacttaaatttgaatgagaatctactcggccccacacatcaatcctgctcccaaaaggccatcaaaaattattctgcaaacagtgaaagcttgtctccttgaccaaatgaagggtggagatctagagtgtttgaagggctaggatcaattctttttgcctataaacccacctcaacaagctaagacacacactgtctctctctttactcaattaattttgaactttgctatttctctcaagaaatttcaagtttttgctttcacttctctctagaatttccagaaactgaaccataatctcatactttctttccatttaaaacctctcttaaagcttttgatatgtttaaaacttcaaaattctcttctactttgacctactttgggttgttttgggtgactatctgcagtaactcaccataagaccatggattgcaaagaagcaagaagaagagactgtagctagagggtttgccatgaaggaagagggaaccaaccatagaagagcactaccaatacctaatggagctcaagtttgagggcacaagatatcctgacaggtcaaccatgaaggcactagggatatgcagagatgttgattatcttatggagatggctaagctagagaccttcttaacctacaagtttgaagcttacaaaaaggaaagctgctaattccttgctacattgaagcttcactttcatgccgaggagagggagaaagaagctggagggttagggtctatcagtttcatggtgaagggaaaccaccactctctcaccacaagacaacttgatgctatattcaagttccctaccaagcttggaatccgccaaaattttaacaaggatgaactccttgatttgtggttgacaatagctggtccatctccctatacctcagctaggtcgaagagttacgcaattagaagtcatgtgctgtgttaccttcacctttgcatagcaaacacattcttccccacgaagacaaccagccatatcaatgagaatgagttagggatgcttgatctttctatgtgcttcattcttgggtacacaaagtcaggacttgagatggtgggagataggtgagacacttcattctttgtagttttcattgatcacctaatgagctatagagagtatgctactaggattcatcaatccggccttggaggtaccctctgcgttggcggagtcattacaccaattttagtagcagctagagtgaagcttgatgttcccgacgttactcctaactacattgatattgagtaccttagaaggaaggagttcttggataggtcagttccaattgatcttttcatgtttaagtttaagcacccaaacttgggaccttgcaagctcccactgccatgcacaagccacaccatagtccgcatagggaacaacatcaatttcgaaccaccctcgatccatattagttgatgttcctgaagtgcatcaaccagagccaagcatgaggaataattcgcaggaagaagcagagattgatccggccagcttcgagtagatgggttatactcggccgagtacataccagcaggccgagtatagccaggctgagcaggttaatgagcaagaggactcgtttgaagctgaagccgagttgtacttctttgaagactatgctgcgtccgaccaagagcgagatccagggcaagtgcacaagaagttgggaatgcttcaaggtcttgggaagttccaaagaaagctcattgaggggttaagtaaaaatgtgagaaagatgaagagggcgatgaacgttatggctctttagattcaggagctccaaagtaggcagagatctccaccacctccaactgagttcaggagaagcaactcgatgagtgtggcggcacgaatgaatgtacgtttcgatccgccaagagactcatcttatgagcgtggaaggagctcaaccttctcagatcgccgagccaacactctcccagctggtcctgtgaaccagttggttctgaatgcaaagccaaaccgcgaggagctatactcgggctacatgctcgaccggtcaaccgagtaccacaccaccacttcagcctatgaacctgaatacactcaggaccgtctggacgagtttgtccagaatctctttgtctaa

SEQ ID NO: 166289 - DNA, 470 bp, Arabidopsis thaliana landsberg
gaaaccacacacccaaaaaaagaaacaagttaagttgtgatggagtcatcaactacaacatcgtattcagttgtgtcggagctagaaggaacactactgaaaaacccaaaacccttcgcctacttcatgctcgtagctttcgaggcttcaggactaatccgttttgcgaccttgctgtttctctggcctatcatagcactccttgacgttttgggctacagaaacggtcgccttaagttaatgatcttcgtcgcaacggccggtttgcacgaatcagagattgaatcagtggctcgagcggttcttcccaaattcttcatggacgatatcagcatggacgcttggagggcgtttggttcgtgcgataagagagtcgctgtgacaagaatgccacgagttatggtggagagattcgctaaagatcatcttagcgccgatgaggtcatcggtacagagattgtcgtaaaccg

SEQ ID NO: 166290 - DNA, 2297 bp, Arabidopsis thaliana landsberg
  unsure (1)..(2297): unsure at all n locations
agacacatgtaatgttcaaattgctgatgatagtgaacgatctgaggaggattctggtttgcttcagggtatgttttacttgcgttgtctaaagattttgttagcaaaataactgtttttcttcttattgctcatattacataaaaatttagcagataaagatcatgctgaaggtaccacttttgtagcagtagtaggggagcaacctactgaggtgactagaaattcatatatgttttgttttggaaaagtcataaaattgtttcttctctcctcttttattggttttcatttcctgtgtttcattcttgtgatttggtctatccataaaggtagagatatgggatctcaataccggagacaagataatacagcttcctcaaagtagccctgacgaatcccccaatgcttctaccaaaggaagaggtgagctcatatttgttctttcagtgagatccttcatatgtacattttcttgttaaaattgatgttttttagcatcagtaaaaaatttcaaattagttcacctttgaacttgcttaaaatactttcatcaaggtcgtatatatggtcatctgcaggaatgtgtatggctgttcaattgttttgccctcctgaatcacagggtttcttacatgtcttagctgggtatgctctctttcctaagctcttttccattaatcaagaaagacaaatctcaagattacatactttgtttttataatgggtggttcattccaaacttgcgcagttatgaggatggttcaatacttctttgggatatacgcaatgctaagattcctctaacaagtgtgaagtttcattcagagccaggtcttgtttccatcctctgtatttagatttttcttatattttgttcctgctctctgaattttccaaattacttaattcgtattctttatgcagttttaagtcttagtgttgcatcatcatgtgatggaggaatctcaggaggggcagatgacaaaattgtgatgtataatctcaaccattcaactgtaagtttgacatctgctagagaggatgcacttgtgtgattgccgtaaagctatagtttaatactgattccatgacattttttcatatgattgtagggttcttgtacaataaggaaagagattactttggaaaggcccggtgtatcgggcacctcaattcgagtcgatgggaaaattgcagccacggctggttgggaccacaggttagcatcctcatgctatgcactgattttcacaatatgaaacaaaacatatgaataaatcaattagacttcgtccagtgtgaaaaaaagttgatgcatatgactaaaaactattctcctgtttgttacatatttggaaacagaatacgagtctataattaccgcaaaggaaatgctctagcaatactaaagtaccaccgagcaacggtatgtgaaaatttcttagactggttcaacagttgagagacaaccattttctaaatctttgtattttgatgccttcatgtgttttgtttgcagtgcaacgctgtgtcctacnnnnnnnnnnnnnnnnnnnnnnnntctgcgtctgaagatgcaactgttgctctctggaaactatatcctccccataaatctctctgatctttatggttcggttttggtttgatttcttgacctgaatctcttgaattggtaaatatacatgatgtcatcatcaaaaaaacaaatggaaaaacagagagtattttctggtttgttatatatagcccactgattagtttgatttgttcaatctcgcacgttctgccgttttcggagaaaagaataatcaaacgacgcgtagtttgaatcatagtacgttgagtagatttcacgaccaaaagaaattgcatttgcaccaaactaatccgtcaccgtcgtaggagactcataacatctgaagacctaaaattcaaacagtacgatttcatctttctcgagctctagatcaatcgtcattctgctttcttctagatcggtcctgattgtttcccattgatctttgatccggaagctgtgtaaaatggcgtacgtcgaccatgcgttctcgataacggacgaggacattatgattgagacttcatacaccgtcaataaccgaccgccggtgaaggagatcgcactcgcggtggctttactcgtgttcggaaccctaggaattgtctccggtttcttcatggcttataatcgagttggcggtgatcgaggccacggtagcgatttcttcacctttcttacttattccccattttttgatccagtctatgagtag

SEQ ID NO: 166291 - DNA, 4637 bp, Arabidopsis thaliana landsberg
  unsure (1)..(4637): unsure at all n locations
cctcgacccgcctagcgacttcgctttggcgggcgctctcatagaggcaagtccaaaccctctggggtttcgtatgcggtcaccttgggaccggctgacggacgtctcgacctacgggccctctgggtccgaggaagacgacgagcccagcttctgttgggatttctctggacttggcaaccccagtgccatgcgggacttcatgaccgcatgcgactactgcctttccgactgttccgacggtagccgtagcctcggcgacgaggactgcagcccaagccgcgaatgtttccacgtcgatctagggggtcctccgaagcaaccatctcggcatgccggagacggtgattccctagcccggtgctcgcgttcacatccacgggagctagctgtggtccccgtccaggcggggggtcatgacccacagctcgagcaaatccgcgagatgcaggccaggctcgacgagggagcaggaacacttgagccgatccgccgggacatcgggcaggaatgggcgggccaacctccggccggagaagtgcgtcatctaccctagggtatcctgcaccgcatcgccgacgatgtcagggtaaggccgccacccacttccaatggagtcggccagaacctggctgcagcagcaatacttctccgtgcgatgccggagccatcaaccaccgaggggcggcgtatccagggagagctcaagaatctcctggaggacgccgcggtccgacgggccgaaagctctgcctcccgaaggcaaaggtacccctcggatcatgcgtcgcgacttcccgattcatgcgggaagcctcggtccacaccggcggcacgcgcaacacacgcgtgcggccctgggtcgcctcggcaacgagcaccatcaccgcaaccgtcgggcccacctcgacgagacgttgcccgagctaccaccccaggtgtgggggacgctacgacagcgcggaggatcggagtccttcgcctgaaccacccggtccgcagctttcagccgggccatacgatgggcgccgttcccgacccggttccgaaccccgactactatcacaaagtactcgggcgagacgagaccggaactgtggctcccggactatcggctggcctgccaactgggtgggacggacgatgataatctcatcatccgcaacctccccctgttcctctctgacactgctcgagcctggctggagcacctgcctcccggacagatctccaactgggacgacctggtccaagtttcgccggcaatttccaaggcacgtatgtgtgtcctggaaactcctgggatctccaannagtccgccggcagccgggagagtctctccgggactacatccagcgattctcaaagcagcgcaccgagctgcccaacgtcaccgattcggatgtcatcggcgcgttcctcgccggcaccacctgccgcgacctggtgagcaagttgggtcgcaagacccccaccagggcgagcgagctgatggacatcgccaccaagttcgcctcgagccaggaggcggtcgaggctatcttccgaaaggacaagtagccccagggccacccatcggaagatgctcctgaggcgtcgactcagcgcggcgccaagaagaaaggcaagaagaagtcgcaagcgaaatgcgacgccgccgacgcggaccttgtcgccgccgccgagtacaagaaccctcggaaaccccccagaggtgccaaccttttcgacaagatgctcaaggagccgtgcccctatcatcaggggcccgtcaagcacacccttgaggagtgcgtcgtgcttcggcgccacttccacagggccgggccacccacggagggtggcagggccgcgacgatgacaagaaggaagatcccaagcaggagagttcccgaggtctgcgactgcttcatgatctactgtgggcgggtggcgaacgctcggctcggcaccgcaagcaagagcaccgggaggtctgctcggtaaaggtggcggcgcagtctatctagactggtccgacaagcccatcaccttcaaccaagacgaccaccccgaccgcgtgccgagcccggggaagtacccgctcgttnnnnnnnnnnnnnnnnnnnnnnnnaggtttaccaaggtcctcatggatggaggcagcagcctcaacatcatctacgccgagaccttagggctcttgggggtcgatctgtccgcgatctgggccagtgtagcacctttccacggcataatcccaggcaagtgtgtcctgccccttggacaactcgatttgcctgtctgcttcaaaactccctccaacttccgaaaggaaaccctcacttttgaggtagtcgggttccgagggacctatcacgcggtgttgggaagaccatgctacgccaagttcatggccgtccccaactacacctacctcaagctcaagatgccaggccccaagggaaccatcaccgtcggccccacgtacaaacacgcgttcgaatgcgacgtggagtgcgtggagtacgccgaggccctcgccgaatccgaggccctcatcgccgacctggagagcctctctaaggaggtgccagacgtgaagcgtcacgccggcaacttcgagccagcggagacggttaagtccgtccccctcgaccccagcagcgacgcctccaagcagatccggatcggctccgagctcgatcccaaataggaagcagtgctcgtcgactttctccgcgcgaacgccgacgtcttcgcgtggagtccctcggacatgcccgacataccgagggatgtcgccgagcactcgttggatatccgagccggagcccgacctgtcaagcagcctctgcgccgattcgacgaagaaaagcgcagagcgataggcgaggagatccacaagctaatggcggcagggttcatcaaagaggtattccatcccaaatggcttgccaaccccgtgcttgtgagaaagaaaggagggaaatggcggatgtgtgtagactacactggtctaaacaaagcatgtccgaaggttccctaccctctgcctcgcatcgatcaaatcgtggattccactgctgggtgtgaaaccctgtctttcctcgatacctactcagggtatcaccaaattaggatgaaagagtccgaccagctcgcgacttctttcatcacacctttcggcatgtactgctacattactatgccgtttggtttgaggaatgcgggtgcgacataccaaaggtgcatgaaccacgtgtttggccaacacatcggtcgaacggtcgaggcttacgtcgatgacatcgtagtcaagacgaagaaagcctccgacctcctttccgaccttgaaacgacattccggtgtctcaaggcgaaaggcgtaaaactcaatcccgagatgtgcgttttcggagtcccccgaggcatgctcttggggttcatcgtctccgagcggggcattgaggccaacccggagaaaatcgtggccatcaccaacatggggcccatcaaggacttgaaaggcgtacagagggtcatgggatgtctcgcggctctgagccgcttcatctcacgcctcggcgaaagaggtctgcctctgtaccgcctcttaaggaaggccgagagcttcacttggacccccgaggccgacgaagccctcgggaacctgaaggcgctcctcacgaatgcgcccatcttggtgcccccagctggcggagaagccctcttgatctatgtcaccgcgaccactcaggtagttagcgccgcgattgtggtcgagagacgagaagaggggcatgcattgcccgttcagaggccagtctacttcatcagcgaggtactgtccgagaccaaaatccgctacccacaagttcagaagttgttgtacgcggtgatcctgacgcggtggaagttgcgacactacttcgagtctcatccggtaactatggtgtcatccttccccctgggggagatcatccaatgccaagaggcctcgggtagaatcgcaaagtgggcggtggaaatcatgggcgagacaatctcgttcgcccctcggaaggccatcaagtcccaagtcttggcggacttcgtggctgaatgggtcaacacccagctcccaacagttccgatccagccggaactctgggccatgttcttcgacgggtcgctgatgaagacgggagccggcgcaggcctactcttcatctcgcccctcgggaagcacctacgctacgtgctacgccttcacttcccggcgtccaacaatgtggctgagtacgaagctctggtcaacgggttgcggatcgccatcgagctaggggtcagacgcctcgacgcccgcggtgattcgcagctcgtcatcgaccaagtcatgaagaactcccactgccgcgacccgaagatggaggcctactgcgacgaggttcggcgcctggaagacaagttcttcgggctcgagctcaaccacatcgctcggcgctacaacgaaaccgcagacgagctggctaaaatagcctcggggcgaacgacggtccccccggacgtcttctcctgggatctgcatcaaccctctgtcaagatcgacgacgcgcccgagcccgaggtaccctcggctcagcccgaggcacccccggcacagcccaaggtacaa

SEQ ID NO: 166292 - DNA, 956 bp, Arabidopsis thaliana landsberg
agattctagattagatgagccagtgacagagcttccacctttgaaagtgaaggatcttccggtaatggaaacgaatgagccggaggaactttaccgggtagttaacgacatggtggaaggagccaagtcttcttcaggagtcatatggaacacatttgaagatcttgaaagactatcacttatgaattgtagcagcaaattacaagttccatttttcccgatcggaccgtttcacaaatatagcgaagatcctacaccgaagacagagaacaaggaagataccgattggctcgacaagcaagacccacagtcggtggtctatgcgagtttcggaagccttgaagctatagaagagaaggagtttctcgagattgcttggggtctaagaaacagtgaacgaccgtttttgtgggtggttaggccggggtctgtcagggggaccgagtggctcgagtcattgcctttagggtttatggaaaacattggagataagggaaaaatcgtgaaatgggcgaatcagttagaggtattggcgcatcctgccgttggagcgttttggacacattgtggatggaactcgacactagagagcatatgtgaaggtgttcctatgatatgtacgtcatgtttcacggaccagcatgtgaacgcgagatacattaacgatgtttggaagatcggattgcatttggaaaacaaggtagagagactagtgatcgaaaacgcggttagaacactaatgacgagctcggaaggggaagagatccgcaagaggattatgcccatgaaggaaactgttgaacaatgccttaagcttggaggttcatcatttcggaatctcgaaaacttaattgcttatatattgtctttctaatgcggtgttcttcttctccacatccaaatttgctttcctttgatttaatctgcattcccataataagacacattttatcatt

SEQ ID NO: 166293 - DNA, 2937 bp, Arabidopsis thaliana landsberg
cgacctgcttctcagactaggttaagcagcgagccgatagcagacttgtatcgaaaaagagggaaagagcaacccgcagcagttcttctcctaaaagagataagacgagagctcgaactgaccgttctcctcgattgtctcccccacctcgctcaattggtccccctcctccagtcatcgcatcttcttccaaatttgggagcgaaaagaccggtcagagtgaaaatcctcggcgagaagaagttgaaccccgagatgtcaatcctaaggccgtactggttcctcaaaccaagtcattcacacgttagtaattaccatttactctcttacttactatattgttctattcactggcctaacttcccatacatgagtttcaaatcttctttattactttaacagcgatggaaacagaggaaacgtcttccgatgcttcaagactcggcaggacacaatcctgccaaccttcgacaggtggcgccctgcaattcgcgagcgattccttcttcacgcttatcactcatctcgggttagttttttttgtaatcttttaactccattttttcgctcatatgctaacttacctttgtaacccttggttcaggcaaacagcgaactcaacgacatgattgaatactatgagaggttgttgctcgacagggaacaagaggtattggcctggaaagacatgttttcttccctcgagtccgagctccgctcctgaactgatgcaaggcaaaaactagaagatcaatgggacaatctttcctctgaactcatgaagtccaacggcaagctgcaggagcagtaccaaacgtacgacaaggtccaagaagaactctcaacttcccgggacaaactttcaaaatccgaatctagtgcctaagagttgtccaaccagctctccgaattgcagcttaagtacatagggtggccaactatcgggatgctgagttggcgaagtcgacgtcaaaggccaggaaagaggtgaaaggtcgcgggatggaattgatccaaggggcaattgtcttcatccaaaccgagaaggctggagcggagctggaatctgacgttagggagtacgagagtaatctcctcctttttgaccaaactcatgaatatgatttttctgaagaacgagagagggacgagttgaaagccgtcctggaagagaagcaaaatcgtttagctgcctttccttcctcatcgttcaacccccagcagttcgaggagttcttcaccgaatcgcctcctttgagtgaatctggtttagactgggctggtaaatctcaactcttctccctttttcttttaaaaaatcgatccacagtaaattactcttatattaatccgagataattgcctcaggtgtcagcggtgttgtggaacccaaagtgcctattgtcccggcatcagttccggaggcggtagtcactccgcctcaaattcctccatccacgaactcggagacagtggtcatcgaggacgacgatggttcagactccgggggttcctaacgagcagcctactactggcgagccggatgagactgagacaactgccgcagttcctgagccagctcaaaccgaacccgaggtgcccgagaacatgtagtggctgtgtccacttagtagggattgtcccttaaactaaaaatttattattgttttacgagttattttacctgccggtgttctctttcctcacgcctgctttcacttcccctcgaaagacaaaaaggaggcgtacaattttatggataaggtaaatcctctctctttctctttttcgggacaaattctactcgtttttaaccagttcgtattctaggtcgtcgacaagcatcgccgcttatgcgatgaaaggcaacgtttgggcctcaagaggcaaacgctcgagacccgaattacccgtatcgagaggaaggtaagggctatggagagcgaccattttcaatgggagtggaggaacttcgactgtgtggcgaagatcctgcatatgctccggatgtaccttcgtgctcgaagccaagtccccggtactgtaaaagctccggtccaagtgatcccgtcggacagtgaagacggggacgacgaagaggaggacagcaacccttggaagcgcgtgaagaatgaacccgacgtggacgttaaaaatgaggtgtccatttcgaaccccgaaccggcgatgaaggaccctgttcccgagccccttccctaaatgttctctgagactcaaagctcttttttattattttcgcatggacttacctattgggcttcggcccattttatttaaggaaactttccaactttccttgattcatcaaatattcgttttggagatactctttgaatgctgggcgaacaaggcgacgtgaatgcttccgcgaatcactccggctttaaatggaatcgcatctttgaaagctaagaaacctccctataaattacctctctaggtttttcttcattcctcactaacagtattgtccttttcttgtgcagttatggccttcaacctatgatgctcagaatccatgctagacttttcgaggatcaagatgatcgacgaggacattaatcaacttccgatgctccccacttcacaactttagatcccagatccgagctccgtgtgcactaatcaaggacctttcgagcagagatcaagatatcgcgatgtccttcatcaaagctctcgcggctcaacacaaatcgctcaacggaaaagaagaaacttcgaaagaagatcaaccaaatgctgcggagagtcactgtgatatcaagggagttacacaccctcaactctcaccccggagattggatcgaacttggaatcgcagaatttgctcgcatcccggattgtatgatgctcattcttgacatcgccagtcaaggggtcgaggtgttctgcaagacgaggaggatttcctag

SEQ ID NO: 166294 - DNA, 1082 bp, Arabidopsis thaliana landsberg
attattaaattttggatgttcaagcttctcaaaagcatttttgcacgtctgagagtttcctgtctcttggcgtctgtatcaaggtatataccgagttttctcatcatcttcaagctctgagttttatttttcggaggagtaaaaagggttgtctactctagggtttggctagaggatggataggattagcaatctaccaaatgagatcatttgccacatcgtatcgttcctttctgcaaaggaagctgctttcgcatcagttctgtcaaagaggtggcagaatctctttaccattgtacaaaaacttgagtttgatgactcagtcaagaatcaagggagtttgatggattttgtcaatggcgtattggctcttccggtcactacccgcattagtaagttctctctaagatttgacagttttttaaagcggaaacttgagactggtcttgttattggtccacatgttgtcaaccgttgtctctgtaatgtcctgaagcgtggtgtcttggatcttaaactggaaatatatggtgaagatggatatttactgccttctgaggtcttcacttgcaaaacaattgttgacctgaaactcacttcctgcatattcgctgagtcttatgttattgatgttatccctgagaatgcattccttccggggcttgagtctctctttctcaaatcaatttggttctctgatctacgcggatgtgctttccaaacgcttctttctgcttgtcctgtgcttaagacattaaccatatatgatgtgcagtgggaaaaatggaaatggtctcgcactgtatcaagtgcaacccttgaaaggcttattattcaacgtacagaattcacttattttaacgggtctgatttcaaaagcattacttttgatactccgagtcttacctacttaaagtacattgattttgttccggaggagtatccagttgttaatcttgattccattgtcgaaaccaaaaaccatattattctcactgggaatcaagattaccctgaaagatacctaggccgagaagatgatcttattactagctatcctactaatttgatctaggggttaa

SEQ ID NO: 166295 - DNA, 1547 bp, Arabidopsis thaliana landsberg
gacccgcatgagcctcagataatctggggttcctttttttttgttcttgggagaatctgggtttataaaaaaataaatacttaatgatataacaaaagaaaataactaaattagtgtccgaatattaagcttgagacgaagaagttactcaaaagtttgttttgtttcctgcaaagttgattttgtcaaaatcattttctgattataaaaagctttgtaaagtttgattttcttttctcgttttttttgttctcttgacgttttgtgaaatctgttatgtcttttataaagtaatgtggcccttgttcaatgatgattcaaatttattatatattgttaagtttaggtttagtgattttacctaaaattgaaagatactcctacattaattttgcaaacttaaaagtaaaaactaaagcttataatgcttggaatattgaaaatgtaatgttgcaggtacaagtaacgttagagaacatgcaagagtaccgacacgtggaaaagccagggtggaagcttagctggcattggctcaaccaagaagtgatatgggacatgaaaggagctgagacgacggagcaaggtaattgctctgcctttgcctccagcggtaaccttcctcactgctgtctcgagcgaccaaccatcgtcgaccttcttcccggtgcttctctcaacgttcaagttgccaattgttgccgtggaggcgtcttgacttccatgtctcaggaccacgccaatcacgtctctgcttttcacatgacagttggaagctctcctgatggccctgaggagttctatatgccttctaatttcgatataggggtcccgggttatagctgcaacaatgctacatccgtggccccgactaagtttagtactgataagggccgtcgcaaaacacaagctctaggtaaccaaaattatataaattgcaatataattacaaaaagaagttgagaaatgtagaaacatgttatacataggttttttgagttatgtaacataagatatgtggtgttgagtgcagcaacatgggaggcagtgtgtgtatactcgcagtttcggtcatcaccatcgccaaaatgctgcgtttcactctctgccttctactaccaaaacattgttccttgtcctacctgtagctgcggctgctcgagttcccattgtgtcaagtaattcacttttctaaacctttcacttttttttggatatagatgtaacaacatgtataatatatactagagagcaacatttgattgatcagggatggagagttgccgccatatcttgaacagaaacatgatccagatgaggaagtatcgcctgtcgtgaagtgttcggatcatatgtgtcccatccgcatccactggcatgtgaaagtgaactatagagagtattggagggttaagatcacagcaacaaatttcaacccaatgaagaattacactaattggaacttagtggtgcttcatccaaacttgaaagcgttcaacagtcttagcttaactacaatcttgacacctatcaaacagcatagtaggaaa

SEQ ID NO: 166296 - DNA, 302 bp, Arabidopsis thaliana landsberg
  unsure (1)..(302): unsure at all n locations
gttcttaccaatcacttgaccccctggtcgagtaacattgaagccgttcttaccaatnnnnnnnnnnnnnnnnnnnnnnnnnnnnnnnnnnntcactcgatgacaccactcgatgacaccactcgacccatggtcgagtaacactttgtcacaccacctgaccaccactcggacattcactctatcaccacactcgaccccctggtcgagtatcatcactcaccacccagcggcatcactcgaccaagcactcgatcacatcttcagagcctgttcaaatccgcactcaaccagagaagctg

SEQ ID NO: 166297 - DNA, 1725 bp, Arabidopsis thaliana landsberg
tcacccaaggcggatgaagagaggagacgcaaggcaaagatctatgcacaaggctttgcgttagcttaccggaattcatttcgaaatgaacccgcccccatggaagctgaagaacaacaatactcggtcgagcaccaccaccactcgcctgagttgactcagcaaacctccgaagaccctccgcctctcatttgccgctcgagcaggcaaagaacagagcgagcagctcatacttgatcagcaggccgagtacccgagccgagtatggaggaacagctccgaaacaaagcgcgtgagcgaagaagagctgagatagctcgtggaaaacgtgctgtggtagaagaaaaagacgttcaagcggatgatcctatgtatgaggagccggttgaagaagaacaagttgtggaagaggagatgatggaagaggaggatgttccaatcccgaaagctgtttctaagaaggggaagaagactccatctaccaagaagttcatccaatacctcaaggaactaagctttgagaggactaagcatccgcatggcgagactatggatgttttgggaatccgagaagacgtggagttcctatttgatatgtgcggcttatcaagatacatgacctatgctttcgagagctaccaagactacacatgcgagctcctagcaaccttggaggttcatttcttttcagctcaaagagaagaaaaagcgggtaggggcttcggttacgccactttcgctgtgggaggacgagactactctctcaccatcaaggagctagacaacctctacggtttcccatccaaggacggtcttgaaccaaattttgacaagctcgaacttacgcagttttggaacacaatagcggcaccgggcgagtttaactcatcacggtgcaagagctcatcgattcgcagcccggtgctaaggtatttccaccaatgcatagctcacactttttacgcaaagaaggtgacgggtcctatcaacgatagcgagctccaaatgatggatgaagctctcaagttggatataaggaataccaagaacgggagagttatggaagtagatcgggctggcacatctcttacggtgttatttttggattacttgatgggattaaaggactatgcggctcaactacacaagatgaaacgcaaggggtcaatcgggattggaggtatgattacacttatgctagtagctgcgggcattgatctacgaggactggacaaatcaccggaatggattgacattgcctatttgaagaagaagaacattttagacaagacaaccccctccggtgtgcatatctacttgttcaaccacctcgatgagggaagctctaggctgctcctaccttgcaccaactacaccaccattaggcacggtgagaacattgacttctaccctcctattcatgctctctacgatgctcctgagaatataccaccacctcgctatgagcctccacacctgatagtaggatttttgtcaattaatcctaaaacactatcctgtcgttgtagtattttaggatgtcaatccaatccggtgtgatgcaaacagatgagatatgatcagaaagctctttgtcaagccaagcagaaagttggttggttctaacagtcctagtatgcaataacataaatgaaatgaaactaaaagcagaaatggcaatagcaggcaggtgaataacaaatcagaaatgataacaggcaatca

SEQ ID NO: 166298 - DNA, 592 bp, Arabidopsis thaliana landsberg
ctttaatcaccagtctctcaggaaaccagaatgttctgttctccattcccatctctacatctgtgggatcgttcttttcatggcccaagcttgtgcctttgggatcaaaagaaccatgagcccgaccatgtctataaatccagacaaaaacttgtttcttgcgacacatgaaagatggatgttggttagggttttgttctttttggggctacacgaagtgatgctgatgtggtttagagtcgtggttaagcctgtggttgacaacactatatatggggtctacgtggaggagaggtggtccgagagagccgttgtggcagtgacctttggtataatgtggtggtggaggctaagagatgaggtagaaagtcttgtggtggtggttacggcggatagacttaacctccccattcgtttggagggtctcaattttgtgcactggtgtatgtattacatctgtgttggaattggtttaatgaagatcttcaaagggtttttggattttgtgaatacgttgactttgagcattaagaggtcgagaaaaggctgtgaatcatgtgtttttgatgatatgtgtaatgatgatcatgtg

SEQ ID NO: 166299 - DNA, 309 bp, Arabidopsis thaliana landsberg
cttatgtgcaaagtgcctctggaggagcccttctccccttcactcggagctggaagctttaatttggggtatgaagaatatcctttcacgaaggatcgactgccacacatttgaatcagattgcacagagctagtctcgatggtgcagtctcttgaagaatgacacgctttctccaatcttctagatgagtttggatcgctccgtaatatttttcctctttttcgatatcttctatttctcgtttgagtaatattagggcggattgtctaccgcgtttttctaaattattattttctgaagttacgtat

SEQ ID NO: 166300 - DNA, 497 bp, Arabidopsis thaliana landsberg
ccgtgataaacctgggactgccggatggcttttttgaaaataagcccgaacatcaaatgcccctgttccgtgccatccgcaaataccaacctgaaattgtgctggccaatgctcccgaggaccgccatcctgaccatggccgggcctcgcggcttatctatgacagctgtttcctggcggggttgataaaaattgaaacggagctggacggtgaaaagcaggcagcctggcggcctaagcaggtgttttattatatccaggatcgttacctggaccccgattttatcgtggatatcagcgaggtaatcgaacagaaaaaagaagccatacgctgtttcaggacccagttcctcgcatcggaaagtgacaagttgcagacctatatttccacccctatgtttttcgacagcattatccagcgaagtgccatgtggggcaaaatgatcggtgtagcccatggcgaggggtttatttctgctaagaaaatagggatcagg

SEQ ID NO: 166301 - DNA, 989 bp, Arabidopsis thaliana landsberg
cgcagctgttcgactcatcagtctctacccgacgaaatcctccaccatatcctcgccaatacacctaccaagctcgcgatcagaacctccgtcttatccaaacgatggaagcatgtatggtacgagacaccttctatctcaattgtttgcaatagagtagatcctgattcgctaaacaaaaccctaagtagctactcgactcccaaaatcaagagtttcgatgttactataagcagagatgtcaccgtacctgagattgatacctggattaatctcgctctgtcacgcaaggctgagaatgtatctctcagattcacatctcattatagattccgagatacattcttcatcaattcctctctgaagcagcttagtttgactttggtttattgcattctgaatcccaagtgcgttgtctcttggtcatcgttaaggaacttgtcgttgaatcgttgcaaggtgtctgatgattcaattgccaaaattctctctggttgttcattgctcgaaagcttgacattgaatctctgtgatagactcaatgatcttgatctgagcaagtcactaagtttgagaagactggagatacttggagaccgttggacaccagagaggattgtagcgccacacattcgttatttgagattggaaaactatcagcgaccatctactttagtggatgtctcatctttaaccgaagctaatctcggtctttcaaaacatgtacttgactatttcacatgtgaaatggagactgaatcgtttcaatacatggtgcgacagacggtggttaagttgcaaaacataaagaagcttactattgggggactttttcttcaggtaatgatgaccaattctctaatgcctacgattttctatgtcgtagagtcgtgctataggatgtcttagttgcacattccaatcttggatcatggataagttttcaactataagaagcatatgaagtctctctgtggaatatggaaact

SEQ ID NO: 166302 - DNA, 339 bp, Arabidopsis thaliana landsberg
cctgttcttttgcgggtaggtgggttcttctgattgccatttggagtcgctttgttgtcgttcgcccccgtagctcgtttcttggtggggctcaggttcgcttgttgggttttggttttggtcttgtctctttctctctttttctttgcgtttgccgttgtagttgaggccctgtttgttatggctctgttgccgttttgtggtggagtgcttgtcgtttggtgtgtttttctctgcgcgggtgtttgctcggtcggtgggtttccggtatcccctttgggggggcccgtgtttgctgctttttaatgggtggcggttatttggggccctgcttgtccg

SEQ ID NO: 166303 - DNA, 983 bp, Arabidopsis thaliana landsberg
ccatctaaaatcttcaccattacaacactcgttaagctgtcattgggaagagaatgttgcatctcaagttttcctttcgatatatctctcccagcgctaaaggttctcgctgcttgtcctgcacttgagtacttaaccatacatcaaaggtatcattcaaaaacaccacaagtcatatccagcagtctgttgtctaatatcaacataattatgccgcgtattcttggattattacgcttgacacactaagcgttgtcgacctccactactctgattatactctgccggggtctctgcattgtaatttggattcacttgccaaagttacactggacattactttcgcaaaaaaatcaaatgggctgctggtttacggggatgtggaatctcatcagcgggatacgcaacgtcaagaccctgcacctgacttcttctactgtcgaggtcagttttagtgtatgctctcatcctcttttgcctataaacaagaaaaatattctttgtgtgtatatttcaggtgattttagtatgctgcaaaggtggactacctgttgtcaacaacctccttgagttattgttttcgagttaaaaaaaaggttttaggaagcttctgccacttatgctgagcgttctccaaacctaaaactctggttctctcggtatgaagcaaacccttgacaaatcttacttaataatatgactggcattacattaaagtagtttctcttcttgatgtttcagggtctgcatcgttacatatttaaaagaaatcggtttgtggggattcatattcccacaaataaccaagtaaagatattgagtatcatgcattatcaagggagtgcacacgtgctgaaacagattagccatttcttactggaaatggagtgtcttgaagttgtgaaagttgtcatctccaatggatgaccccccaaaggtgccactcaccaaggatctattggaacttgcccccgcttcaccca

SEQ ID NO: 166304 - DNA, 1111 bp, Arabidopsis thaliana landsberg
atatatgcactaaatgtgtgacagtaagtcagtgtcacaatccaatttcaaaataattaattctaaatttatatctataagtttcatgcattatctaatgtatagaaaaaaaaattcagttaaaataaaaataaattctcagctatatatcacttatgattagggatgtatgttagagatgtttttagtaaaataaaaaaataaaattacttaaaaataaaattaaaattaaaattaatgtcaataaagtaaaaatattttataattaattaattagggaagcgtccttatctaactagggtttttgacttggccgtgatacagaagaaacaaaagaaggagatgagcgattccgaggaaaaaaaatgcaacgacgattcaaagcagcctgtacttatcttggacttgcttagatcgatattggagcgcttaagctttgttgattttcatcgaggcagatgcatttctttagaatggtattcagcttcggaatcatgtctcgcagtaaaaaatccaacaagtccatggatcatcctctttccaagcgaaaatgtggaaagcaaaaacgattcatgtaagttgtacaatcctcgtgaccatagttcctacatagtaagagatctcgggtttgatttagctaggagtcgttgtttggcgagttccggtagttggttccttatgttggaccatagaactgactttcatattttgaatctgtttactcgagtgaggatccctcttccgcctctagaatcaaccggtgatggaaatgttttcaaaagggtttatgaaaatgtttctgatggtagttgtattaaaatagacaatgcggttttgtgggtagatgaaaaaagaagagattatttggttgtttggaatatttctaggctttttggatatcacaagaaaggagatgaaaataatagctggaaagtgtttaaacctttagagaatgaacgttgcataatcgatatggcgtttaaagaaaacaagctttacgtgcttagtgtaacttggaaggtcactgtttatgatttctccggtggcaattctccaatgaaatgtgcaactttcccatctctgcggtttcggaatggttatagttataata

SEQ ID NO: 166305 - DNA, 2123 bp, Arabidopsis thaliana landsberg
  unsure (1)..(2123): unsure at all n locations
tgtcgaccgacaccaactaggtgtcgatcgacaccatctgcagaacaaaccagctaccataggcgacttcaacagagctgatcttttctactccaatctatcagcgatccagctacctccttttgcaagagaagactttgctattcaccatctacagaacagaccagctaccataggtgacttcaacagagttgatcttttctactccaatctatcagcgatccgcctacctccttttgcaagagaagactttgctattcaccatgcctactatactcttgtttcacgaggagagtttcgaggacattctaatgaatcaccactagatcatctggaagtcttcgaagacttagtgtccttaatcaaagcagcaggtgtaccagctgattaccttctttgcaaactcttcccacactctctcgaaagtagaggaacatcatggctgcgtcaactagaacaaggttcaataaccaactggactgatttaaagaatgcattcatgaattaattctttgatgaatccgtgatagtggcactttgtttgcaaatttcttcggtcactcaagctccagccgagtcccttctagcagcttggctccgcttcagatcttatcagagagaatgtccccaacatggcttccaagagagtcaactcatcaatctattctagagagggatagcaaagccatacaagaatcaacttaatgcagcaagctaatgtaacttcatgacaagaactactagtgaagcattactcctcatcaccaatgctttaactagtctttcgacacatgaatttgacactgcttgcaaagcctctctaggancagcaatttctgctccttcccaagcccccccccctaactcatcaatatcttctaaagagggataatcatgccataccagactcaacttgatgcagcaagctactgtaacttcatgacaagaactactagtgaagcattactcttcattaccaatgctttaactagtctttcgacacatgaatttgacaccgcaagcaaagagactcttttttcaacaatttctgctccttcccaagccccccccccctcgtccctcatcagaaaccagaatggagtctatgtttacgcagcttcttgcaggcctcacaaaaaaccagaatatagtctatgtttacgcagcttcttgcaggcctcacaaagcttgacagtaaatctgaatctctctccacaaagcttgatagcaagtatgattctctctccacagatatcaatagcaagattgacaatctacgctctcaattctccaatctctcacctacatcagcttctatcaatgcagtcccactacgcagcggaaagcagctcaacccaatacttcagcgcgaacgatcagctcagccttcatctttcccaattgtagaaaacgaatcagtgtcgatcgatacaccagggtgtcgatcgacacctataactcttgaggactctgttttccctttgtcgagtggaatcgacaatttcgcggaggaggaggaaactattcctgatggtgtcgatcgacacccagttcgttcagacaatgtgcaaattctagctgcaaccaagtcagcaaatcggcgaattcccttccccaagagtcctagaaagtcaagacaagccttatatgatgtcagatgcaaggctatgattgataagctgattgttgagatgcctctagttgaagctattcatctatctcccacaatcagaaggtatgttaagacaatggtcattaagaatttgacgaaagaatgtagtgttatgatgattacagagcagggcagcgacaacattcaagaacaaattccaaaaaagctacctgatcctggaacttttgtacaagtgtcaccatcaaccacaattacttcccaagagccttatgcaatctcggttctagtgtgaatctgaagccttgttcagttgctatacgtcttggtattccaatcttgagcctacctttatcactcttgtgttggcagatcgttgtacccgaattccagatgggattcttagcgaagttcctgtgatgattgggaagagcatgattcctacagactttgtagtcttatcttatgaaaaagaacctaaggatccagggtt

SEQ ID NO: 166306 - DNA, 745 bp, Arabidopsis thaliana landsberg
tccgacaaagagagagagacttttgtctatatggctaagctctccgaacaagccgagcgatacgacggtaacataatctctttattattttcgattttaattgcgagaatttatagaaaggatttggtaatgaatgtgcagagatggtggagacgatgaagaaagtggcgagggttaatagcgagctgactgtggaagagaggaatctgttgtcggttggttacaagaacgtgatcggagcaagaagagcttcgtggaggataatgtcgtccatcgagcagaaagaagagtctaaaggcaatgaatcaaacgtgaaacaaatcaagggttatcgccaaaaggtagaagatgagctcgctaacatttgccaagacattctcaccatcattgatcagcatctcatccctcacgctaccacaggggaagctaccgtcttctactacaagatgtgataacagaaaaacactcttctttttgaatcatcatctgcaaatgaaactcaatttgatctggaatttgtaggaaaggagattattaccgttacttggctgagtttaagaccgagcaagagaggaaggaagctgctgaacagtctctcaaaggctatgaggtattaaatttgtttctttagtcaaatactacagaattatgagaagtttggtctgatgcatctgtattttgattaggctgcaacacaagctgcaagcacaaagcctcccaaaaaccatccaattcgtcttggcca

SEQ ID NO: 166307 - DNA, 354 bp, Arabidopsis thaliana landsberg
gtgtatatggcaattgcttctttgaaaagtaaaattgtggaaatgagaacgtttgagactgtttttggattcttatataattcagtgaagctaaagtcacttgatgctattgaattaagagaacgttgcactactttttataatacattttttcatagtggttcatcggatgttgacttggatgagttttttctgggttaaaaatattgcaggtaactttacatgatgaagtgatggcacctattgagattttagagtttgtgaatactattggttgttatccaaatatctttattgcttatcgaattttactaaccactcttgcgacagtagcctcaatggaaagaaatttct

SEQ ID NO: 166308 - DNA, 2760 bp, Arabidopsis thaliana landsberg
tatatagctttgttagtatttctatggtcaaaatgtgtcacaatccaatgcatatgactaattataagagttagagatggcttaggattgtttagacaacacttatacccattttctcctaaagagacgaaaaccaacaaaaaattgcttagaagcagtaaacagcttgttagtgttattatggtcagaatgagtcacattctaatgcatttgactcatcataagagttactgatggcttaggagtgtttatacaacacttatacccatattctctcaaaagaggctaaaattaacaaaacaattgcttacaagcaatcaatagctttgttggagtttttatggtcaaaatgtgtcacaatccaatgcacttgactaattataagagttagagatagatttggagtgtttagacaacccttatacccatttttcccaaaagaggctaaaatcaacaaaacttgcttagaagcattaaatagatttgttagtgtttctatgatcaaaatgtgtcacaatccaatgcatttgactaattataagagttaaagatcgattaggagtgtttatacaacacttataccctttttgtcccaaaagagggtaaaaccaacaaaaaattgcttagaagcagtcaatagctttattagtgtttctatggtcaaaatgtgtcacaatccaatgcatttgactttttattagagttaaagatggattcggagtgtttaaacaacacttatatccattttgtcccaaaagaggctaaaacgaacaaaacattgcttagaagcactcaatagcttttgagtgtttctatggtcaaaatgtattacaatctaatgcatttgactaattataagagttataaatggattaggtatgtttagacaacacgtataccaatttcgtcccaaaagaggctaaatccaacaaaaaattgcttagaagcagtaaacaactttgttagtgtttctatggtaaagatatatcacaatgcaatgcatttgactaatcataagtgttagagatggagttgtagggtttagacaatagttatatccattttctctgataacactgtattttactcattttaggtgtatgtttatcatcatttagccttgcatttccccattgtatcatatcagtttacacgaccctcttactcgatcaaggcaacctcaaatgaagcagcagattgatctactctcccctcttactcgatccactactcgacccattttcttgaccaagtgtgaccatctctacaagacttgttgagctatcaaagcgtcctcgaatcctcctcattccccactcaactagacatctgagcatacggatatgagaggatgaagcatctactcgaccaattcatcactcggaggatagacacaaaggcgtagactttgcagcaccctctttactcgatccccaaggtcgagtattcgcccaaaccgcctcaagtctcttgtcttctactgaatccagggtttcaacattttagtataaatagatcactttgggatttgtccaaatgatctatgctttatctttcagtttttctttgtgtttatgaatcttgaaactttaattactcttaatctatttcgtttttgcatttgattgtttaagtaaagttgtttagcttgtttagatctacattttggtataattttagtaatttctcggtttgtgttcttgataatgttgcttgagtagtgattagggtttttgaggatggattagattagggtaatctctaggttagttaggtggttagtgtttaggtttatacccttctggattcgcttggcccttatccggttttcgctggctaatatggagattcgatcatagacgtccagcgtccaaaagacgttcaaatggatgtctaatctacgaattccagagatttgtagacccgaccaagacattggcttgtcttcttattggctttggtagattgttgcttaaaccctgctctgctatgtttcatcaacgacagttgagattaggaagtggtagagttatgggggtctctgtcacaacagtggattgacccggtttttgaatctatggtcaggggtatctacctttcgcctattagccatttgatgaaccctagagttacccttatcaatgaatccatccttagaacttctattaggtttatttgtatcccctcttgattgcacttttatttacctgttatttgtatcctctatttgtatcccctgttgattgcatttaggtttcttaattttgtcacctgttgcttctactcaacccaatgatcgagtagggcttttaagttcttatttttacttgtttgaatcctgacctaagattgttactagaaacccaccatcattataatctggcttgacttagttgtttttgtacacatcttgattgctagcaaaacagtggactggattgacaccctctataactgcatcgacatgtttgtgttttaggggaattgaagtgaaatcacactcttcagcacataagcagacctgaaaaacctgcttatcatcttttctcttgtcgattcttagcaactaaaactcttctcttttctcttgtcttttctctaatccctgagcaacaaaactcttcagagatcatggatgcatcacgttccaacaagacgccatgtgtggatgacgcttccaacaaaaggccgtgtgtggatggctgttccagcagaaagctgcttgaaacggagaaacgtttcaaaggcatcatctctctc

SEQ ID NO: 166309 - DNA, 499 bp, Arabidopsis thaliana landsberg
  unsure (1)..(499): unsure at all n locations
ccaatgcctgttttcactaaaaaatttcaagttcaaaacagataaaattttgaagggttttaaaagcaacatctgaaaatgttggttgagtcaagtgtacacaatacgtacaaaaaaggtgaaattctttttcgggagggtgaaatatcaactgggatcttctatttaaaaacgggtaaagtcaaaaagtataaggcagctctcatgagggcaagaacaaatattctacatatgccgtgagggagaacttctcggatatcatgccatactcagtgaggagcattacccggattctgcggctactattgaagattcggaagtaaccttcattcctaaagaaacctttcttcaagtagtaaatgcatcaagcgttctgtccaataaattgcttaaagcgcttgcccgggagttgagtgtcttcattaaaggcatcaacaatcttgcaagtaaatctgtgcgtgaataaatagaaatcnaccttttaatctagatacaagtt

SEQ ID NO: 166310 - DNA, 1021 bp, Arabidopsis thaliana landsberg
  unsure (1)..(1021): unsure at all n locations
aaatagatttctaatacaatatggaatatttttgttgggtaaagaattgtggtatggatttgaataaccattggtgttcttgatttggttaatacaatgtcagatttcttttctgcatattttgtttttgtctttttgcaaccacttatagatcaaaaggtcaaatgcaataactcaccgaatactttgttgcatacttgcataagtaaaactttatatttttcttaccgatgcaaaagtttcttttaatatcgntttttcatattatttttcttgataaaatatgtataaatgttgcgtatatttttgttttgcattaattaaagagcgaagaaattgcagtcttacattgataattctttatagctgaatctcagatttgtatacaaattaaatgttaaaataaactagagtagaatttcgttatattatctaggatcacgatatttaaatttatgggattttgaataattattggtctttcttgatttggtctgcaatgtcagattttgttataatatattcaattaaaaaatatttgtttgcttaccctgtttcggcggtcagatacagagcggtgactagcgcctactacagaggtgcgttaggtgcgatggtggtttacgacattaccaaacgcctctcattcgaccacgttgcacgttgggtcgaggaattacgtgctcacgccgatgattccgccgtgatcatgctcgtcggaaacaaagccgatctctccgttggtaaacgtgccgttcctacggaggatgcagtcgaattcgccgagactcaacggctttttttctcggaagtctcggctctaagcggcggaaacgtcgacgaagcttttttccgtttactcgaggagattttcagccgcgttgttgtttcgagaaaagctatggaatccgacggtggagccaccgtgaaacttgacggttcgagaattgatgtcatctctggttcggatcttgagactagtaatatcaaggaacaagcttcgtgctcgtgttgaaatttt

SEQ ID NO: 166311 - DNA, 535 bp, Arabidopsis thaliana landsberg
ggtggctccggaggccaggtcagggcgtctgctccccaggggccgccgctcgtaccgacagcgcatgggggtgaccctcaagtcatcgcgaccgtgcccgggcaatctgctccccgggcgtccaaagcaagggtggcgccgaagttgccggtgaagcggacctcggcgactgttccggagcgcgggatccaagaaacctccccgaggcgcggtggatcatggcccgaagtgggtaagtatcgtcagaatgtcttcgtcttggcttcccattcatatgtctcggccgtgattttccttttctattctttctcagcaagcgaacgcatggccagaccgacctggcaccccggaaggcccttaagacagcgccggtctgtgcggccagcgcccgcctgggccttgtcgttcagccgaccctttcgcagggcgtttcaccgcagggggctcgggtgtcgcctgtctctggggagcaggttcccgaggctggctcttctgccgaggcggccatcgtgataggggaggcggctgacgcgac

SEQ ID NO: 166312 - DNA, 631 bp, Arabidopsis thaliana landsberg
atggaatcgcctgagtcgttttccactatgtttatgaagcctatccgtcacattttgagcgagaagaaatcgaggaagattgcgttgtttcttttgatcaatacggcgtatatggtggttgagtttgtggctggttttatgagtaacagtcttggattgatctcagacgcttgtcatatgttgtttgattgtgctgctttggcaattgggctgtatgcgtcttatatctctcgtcttcctgcaaaccatcagtataactatggccgaggtagatttgaagtgctttctggttatgttaacgcggtgttccttgttcttgttggggctctgattgtgcttgagtcgattgagagaatcttggatcctcaggagatttctacaaatagtcttttggttgtttcggttggtgggcttctcgtgaatatcgtcgggttaatctttttccacgaggaacatcatcatgctcatggtggatctggttgcacacattctcactcacaccaatcccatagccataaaaatgaggagcatcatcagcattcagatagccataaacatgaggaacatcatcagcattcagatagccataaacatgaggaacatcatgagcatgaccatcatcatcattccc

SEQ ID NO: 166313 - DNA, 2834 bp, Arabidopsis thaliana landsberg
atggtggctgttgctcgagtaactcggaaatccactcgttcaaaggcgtcgataagctccgttccacggaaatcgtcgcgatccactggtctcacagtctctcctccgatctctcctccagctgtagatctgctctctgctggcgcatcgcgagctgttgtgacttcagattccatggatccgactcagtctccgttttttatgcacagtggtgatcatccaggtttgaatctcgtctctatctgcttagatgagactaactatgatgattggagtgcagcgatgcggatctcgttagatgctaagaataagattggttttgttgatggttctttgcctcgtccacttgaatcggatgggaactttcgcctttggtccagatgtaatagtatggtgaaatcatggttgttgaactctgtgtctccgcagatttatcgtagcattctacgcatgaatgatgctacagatatctggcgtgacatttatggacgttttcatatgactaatcttcctcgtacgtacaatctgacacaggagatccaggattttcgccagggttctctttctctatctgagtactatactcagttgcgtattctttgggatttgttggacagtacagaggaacctgatgatccttgtacttgtggtaaagttcttcgtctgcaacagaaggcagagagagctaaaactgtcaaattcttggcaggtttgaatgagtcctactatatagtcaggagacagatcattgcaaagaaagccttgccttctctggttgaagtttacaatattcttgaccaggattacagtcagaaaggtttctctaccaatgttactcctcctgctgcttttcaggtctctgagatatcttctactgctttgactcctaagatttgctatgttcagaatggacctaataaagggcgtccaatctgttcattctgcaacaaggtgggacatattgcagagaaatgttacaaaaagcatggttaccctcctggttttaaaggcaaactaccagagaagggtaccaaacctcaaccggttgctgctcaggtctctttattgcctccgatggttccaactcaggctactctagatggtccgcttggtaatctctccaatgatcaacttcagaacttcatagccttgttcagttctcaactgaagtcacaaccaactgcttcttcttcagatgctggaatttcacgttctcctattcattacactggtatctcattctctaactctacatactactttgttggtatattgaatgtatcccaacatactctttccactgaaacttgggtgatagactctggtgcaactcatcatgtttgccatgataagagcctatttgtttctttggatcattctgtggtgagttatgtgaatctcccaacaggatcacgtgttaaaatcagtggagtgggttcagtacagataaatgaaaacattcttcttcgaaatgttttatttctccgtgagtttcgtttgaatctgatcagcatcagtagtttgacttcagatattggttcaagagtgatctttgatccgtcatgttgtgaaatacaggatcttaccaaggacctgagaattggcagaggtagacgcattggcaacctctatgtgttggatactacacctccattggattcagtctctgttaatgcggtggtggatgttagtttatggcacatgagaatgggacatccagcttactcaagactggatgctatttcagacattttgaggactactaaacacaagaataaaggatctgcttattgtcacatttgtcatttggctaagcagaagaagttgtcttttcagtcttcaaacaatatttgtaattcaacttttgagttattacatatagacctttggagacccttttcagtggagactattgatggttttaaatattttttgaccattgttgatgatcattcacgagctacctgggtttacttactcaagactaaatctgaggttcttagtgtgtttccggcttttgtcacccgtgtagagaatcagtacaacgtcaaagttaaggcagttcgatctgataatgcacaggaattgaaatttactgagttttacaaggctaaagggatagtttcttatcattcatgtcctgagacacctgaacagaactcagtggttgaaaggaaacatcaacatatactcaacgttgctagagctttgatgtttcaatccaaggttgctttaccttattggggagactgcatattgacagctgtgtttcttattaatagaacaccatctcaattgctttctaataaaactccatttgaggttcttacaggtaagaaacctgattatgagcagattcgcacctttggatgtctatgttatggttctacttctcctactcaacgtcacaagtttcagcctagagctcgggcatgcatctttctgggttaaccgtctagctacaaagggtacaagatcatggatttggaaagcaataaagtcttcatttccagaaatgttacctttcatgagacagtctttccaatggcatcaccacactctgctgactctccatcccttgtcacaccaatggattctttgccctgaggtaatcccaattccatttctccctctccatcacaaatttctccatcaacacaaatttcttcccatcgagcacgcaaacttcctgctcacttaaatgactatcattgctattctttaaacaatgaagtcactcatcccatttcttctttcatctcctactcaaaaatctctccctctcacttgttatacattaataacatcactaaaattccaattcctcaatcata

SEQ ID NO: 166314 - DNA, 465 bp, Arabidopsis thaliana landsberg
ctcatggattctttaagaactcgaaatgtatccaaaagatccgatccgatcaactttccggcgaagtcatccatttcatcccggagatcattatcttcttcttcttccttctcatctttttcctcctgctcctctagctcccttgtctttcccggcgactctcctctgaattctccggcgactcctctccgtctactcggtgtccctttttcatgggaacaacttcccggaaaacctaaagactactctcatagactcaacaaccgtcgaaacaatgaatcttcaaatctattgctacccctccctcctcaccggaatatttcctttccggccaccggaaaaaaacctaaacctaacaattccagtaagaagaacagcttccccgtgaccggaaaagatcccttcgcggctgcgttgttggaatgttccaacagacgaaggaacaaacagtgacaacgatgatga

SEQ ID NO: 166315 - DNA, 7104 bp, Arabidopsis thaliana landsberg
  unsure (1)..(7104): unsure at all n locations
atgcaacaaactatggctgatatggcgcagaagttttcaaacgtggaaaaaactgtcgaaacactgcaaataacccaggtatcgctaagccaaaatgttagtaccattcagtctcgtgttcgttctttaaatgcaggaaattctagagttcgaagaactatcttcggatccccaaattcccttccgcgaaatgcaacaagtgatcaaacgaccccggagggtacaaacgcggagaatcaaccggaagacgatcaccagttcggtgatcaacatgagcaggaaaacttcgaccagctcgaaaccatgaaagaagtaagccgagagttgaaagaaacgaggttgaaattccaccaagctacaagctcggagccggatatcaaccgggttatcgaggaggctaggcgaacactgttcaccccgcgaattgcgagtttgagaatcagagattctcgaaaactcaacttagaaccatataatagtttggaagatccgaaaggctatctcgcagcttttctaatcgccgctggacgagtcgacttggatgaagctgaggaggatgcaggatattgcaaactcttttctgagaatctttgtggnnnnnnnnnnnnnnnnnnnnnccagttagagccaggttcaatcagtaactttaacgaattatcagccgtgtttttgaaacagtattccattcttatggataaaagcatttcggacaccgatctttggaatttttcacaagggccgaatgagtcacttcagatatttatcaccaagttcaagggtgtactttcaaagctcccaaggatttcgcaacaatcagcattatctgccttacggaaaggattgtggcatgattcaaggtttaaacatgatctaatacttcacaaatcagacacaattcaagatgcaattttccgagcaaacaactggatggaagtcgaagacgaaaaagaaagcttcgcaaaaaagaataagcaggctagacagactgtcacgtttccaccaaagaagttcgagcctagggataaccaaggactaaagaggtttggtttcaatccatctaacaacaatgtcgggacaccattccaaggaaaaggaaaattaaacacttgggtccgggacaaaaatttgtattgcgacatacataggataaccggacatctaaccaaagattgtagtgtccttaaaaggcatttaacggagctatgtgcaagtagagatctttccaaattcaacatagatgattttgtgaagaaataccatgaagcaagggataactcctaagttcaaaattccaaaaggccgaggttgactaatgaagaggaacaaagaagttcgaaaagaaagatcaatgtgatcctctgaggctccaaactttgccgtgattctgttactgctatgaaaaagcataggcgaaatgttctacttaaatcaagcttgagtgaagaagtgaactaccaaggcgcttcaatataatttgacgacgaagaaacgcggcaccttcaaagacctcacgatgacgctctagtcattatgctggacgtggctaactttgaagtgtcaaaaattctcgtcgatacaggtcgtttggttgatctgatctttctaggtactttggaaagaaagggaattagtagggcagatgtagttggacctccgtctcctttggtacctttcccgagcgaatcagccatgtctcttggaacaatcaagttacctgttttagcttgaaaaatgtcaaagattgtggactttgtcgtttttgacaaaccggcggcttacaacatcatcctcggaaccccttggatttatcaaatgaaggtagtcccctctacgtatcatcaatgcatcaaattcccaactccaagcggagtggaaacaatttggggagaccaagaagcttcgcggacatgttatctaactagccaccgtttgaaggtccaatagcaattaacaaagcccgcaaagaaaggaatagtcccaagatttcctagtgggcagaagggggacgatgtcgtgatcgaagtaatgttagaagaagacaaaccagatcggaaagtttgaattggagccactctaactggcgaaataaaagaagctttagttgaacttttaaagaaaataaaagcatcgtttgcatggtcagcaacagacatgcctggcatagaaccaagcattatctgccatgagctaaacgtggatccaaccttcaaacctttaaaacaaaaaaagaaggaaactcgaagtggaacgagcaaaagcggtacgacgaagtggataagcttttaaatataggatctataagggaggtgcaatacccagattgggtggcaagaaccgtcgtggtcaaaaagaagaatggaaaagacagggtatgcatcgatttcatggacctcaacaaagcttgcctgaaggacagtttcccgcttccacatatagatcgtcttgtggaatcaaccgttggaaatgagttactaactttgatggacgatttttcgggttataatcaaataatgatgaatcgcgaagatcaagagaagacgtcatttatcacggataggggtatctattgttattatagaaacaagatcacgttgagcactgagacaaatgcttttggatacttaatcaataccaaatgaagttgaatcctacaaagtgcacattcggagtcccgtccggagagttcctaggttacattgtgacgaaaaagggaattgaagccaatccgaccaaatcaacgcctttttcaatatgtcatctccaaaaaacttcaaagaagtacagcgtttaactggttagatcgcagctttgaaccgctttatttcaagatcaacagacaaatttttacctttttaccaaattctataaggaaacaaaggatttctttgggatgagaaatgtgaagaggcatttggacagctcaaggcgtacataacaactccacccgtgttgtccaaacccgaagtggatgaaaagctttatttgtacatttcattgtcaaaccatgcggttagcggagtcttgatacgggaagatcgcagagaacaaaagccgatttattacataagtaagtcgatgatagatctagaaaccagatatacaatgatggaaaaactcgcacttgcggtggtaacctccgcccggaagctgcgtccatacttctagtctcatcctatcgaggtgttaaccaaacagccacttcgaacaatacttcatagtccaagtcaatctgggaggttggtaaagtgggcattggagctaagtgagtatgatatagagtacaaaagccgagttagcatgaaggcccaagttttggcagatttcctgaccgaactactagtactttgtgcgtcggagcaaccaaaaaatcaaacttggaaagttgcatgttgacggatctttgtcaaaacagggatccgaagtggggataaagttggaatctcccactttggaagtccttgagcaatcattttatttagtgcttctaacaatgaggcagagtatgaagctctaattgcaagacttaggttggcacaaggaattggagctgaagaggtggtcgcttattgtgattcgcagctagttgttaaccagttcaatggagattatgaagtcaaagattcaagaatggaagcatatctcgaagtagttaaagatctggctaagaatttcaagaaattcgaactcattcgcatacctgaggagaaaatacaaccgcggacgcgcttgcagcactggtgtcaatgtcagatcctgaggtaaaaagagtcattccagtagaatgcatttcggaacgaagcattaaggaggagaaagagaacctcgtcataacaaggtctcgacctgcggcacgtgagcttggtgagcttgatatagagttaccacctgtcaagcggaggaagtcaaaaggttcaaccgtatctgatcccggtgcacccaatgaaagctcatgcgaggagcccattaacctgatagaggatgtagttccataggcaattatagagaccgagccaccgatcgaggaggatatcctcaagccaaatgagcatcccgaaccggagccacgagtatttcatgaggttaaccaaattccggctaaagattgggggctgattgtatggatccaataaaacattacattgtgacaggcgagctcccaaaatataagtggcaagccagaaaaataagaatcgttagcgcaaaattttgtttgtcaaggacgcattgtataggcgaggtgttagtgacccttacttaatatgcatctttgggcccgaagtggaaattgtcatgaacaaagtacacgaagtatgggagtcattcatcaggaatgaccactgtagtgaccctcgataaggggtaagcggctaagtgggaaacatcgaggaacgaacgagaaagaaccgggagagaaagaaatagttcagggacgaaagccaaagagatgggcaaggaaaaaatgaacatgccaagtctagttcgaaatgggttcatcctgacgaagccgaaacgagagaaagttgtcccgaatacacggccaattgaccgtatttgcccaaaaggtgttaaatcatcaaagggaaaaataaatacctatttggacaagaatgggcaagtttgggcaacatgggcgtgtcgcgggcgaagtttgccccgccaagcgttgaccgtttgacaacgccatggacacgtgggctgacttacttggagcccaagcaaagttgcttagagccaaatttatgaggattggagccgaagtttccccttccacgtgtcattgtcccagtcttgcagcatatgtgtctttacgggcgggcgacatgtgtcccgcaaggtgtcaccaccagatgacatgcgtttgcttggagcccaagttgttccacctataattgcttggccaaagtcgagccatttgatgggagaaaggagagagaaccggaaggctgcccgactcataaaaatcgcccgtaaccgagagaaaacttgcccgcgattgagaaactttgcccgtgatcaagatcctttgcccttaactaaagaattcatgtccatgatcaagagaacctgttcgtggataagatatccatgtcggcgaccgagacatccgtgaagatcgtgtgtgaatcctgttgagtcgaatcaagacttcttttaaaagatttgatatgccgatttgtgttaaaactcaagaatgagggaggttacttagaaagaagctatatcaagatgcaaatgatgtggagaagtcgtgagatgtccgagaaccgttgaagctaaccttaaactttcagccgaatctctgtgggtctcgaagcgtgtgatatgggacatgataggttttggtatttatttgggtgatggattgcttgtttagttgcatgttcatatactcttgcattagttgaatgattttgtgaattatatgagtattaattaatggtgtgatggtactaagtcgcatatgtgatcttatcgattcttatgcttaaaggcttatggttgggaggttgtgttgagtaaggatatggatgattgtatgtgttaaccatatgtctcataatatattgaattgttgggtcttgatacgtggtgctcgtggtaggaggcagagaccataagcgtatcaagatcgtggtatgtctgatcttcgtagtgaaccgtgctattgtggggtcttgttaaagttgttacttgatcgccatatagtgcgaagggctcagagagacggggctagataccctggatgagttgtctacacgacggtgtagcatttgaagggatgctctggttacatgcctttgtggttgtaaagcgagagatctcgggagtgtgtgtttggtgtgggttgaaggcagtatattgggccctattttaaaaaaattaataaaactagagtcttaattgcatgtgcatgtttttggtagatgattcggcaagctacctttcgttgatattctgtgttgcgtgttatgattatgggatggagaactaatatctgttgcaggtagaccgagctcactaagtaatcttagattacttatgactccattttattttgcaagaaaccttagtgggaaccattagagggatgctcaggacggtatagagtttgttgctttttgcaaaacttaatgattttcgttcttggttggatttgagagtatatgcttgaggcgccattgttaaaacgttttggatacttggttgtatgagaatttatatgttttaaaagattattttcttacatagagtgtatttcattcgatattagtcttgtccggactaacacaactcatgatcacgacaagggttgaaaagcctagaccgcgttcgtgagagatggttcatgtgggtaatccggctaagggtctaaatttgtttggaacctaagtcgggttgtctgtgtgagctatcatcatagtgttttcgggttgcccttggattgtcagaccatagagcgattcaggggcgttacaagcagtgagcgacattcgggttgctcaggagttgatgaatgtgtttcactcgttgtagggattaccaccatcacggtctgatccttttaggattgagatggaaccagggacaacatagttgtctaaggcaccctacaggatggctccagcagagatggcagagctgaagaagcagctggaggatttgttgggtaagggattcatttgtcctagtacttcaccttggggagcatagatgttgtttgtaaagaagaagaacggaagtttccgcttatgtattgcggaccaggggttgagccctttgtcaaggatcatatcactacgcgatagcgtgagccttatactcgcaaggctgctttcaggacaagatacggacattctgagttcagggtgatgccgtctggtttgggtaatgcacgtgcagcattcattaggttgatattcagcgtgttccacatgttttaggatgagtccgtgctcatatagtatagatggcgttctggtgtatccttcgagtcatggaatgcttcttacaagagtgatcgagaagcggcgcgagcaagtgctgttcgttaagttaagccagtgcaatttctggtacaaagagccgggttttgtcgggcacagt

SEQ ID NO: 166316 - DNA, 1382 bp, Arabidopsis thaliana landsberg
atggtaaatgtcgtctttgcgcacaaaagatttgtgatagattgttttatcattgttctgcctgtaacttcagcttggatatgtgttgtcttttaaacccaccatcacaatatgttatggatttgaaagttcatgctcacgaactcacctttcgcccaagacttgattcttttacatgtaatgcttgcgggttgagtggagacagaaacccttacatatgtgtgcaatgtgatttcatcatacatcaagagtgtcttgaccttccacgcctcataaacatcaatcggcatgatcaccgtgtttctcgcacttccgttcttggtgttgtgaattcggtatgtggagtttgtcgccggaaggtggattggacttggggcgggtattcttgtcagcggtgtcctcactatgtagttcattcgagatgtgctactagagaggatgtgtggaacggaaaagagctcgaaggagtgcttgaagagatagaagatatagagccatatgtggtgatagatgaaaacacaatacaacatttcagccacaaagagcattacctaagattcgatgttaatggtcttctttgggaggaaaacaagcgttgcaatgcttgcacccagcccattggtctccaatctttctatggctgtgttgtttgtgatttcattcttcaccaaaactgcgctgaatctcctagaaagaaatggcattttctacataatgaacgtcttactttagttacaagcaaggatgattactttcactgcactgcgtgtgatagactctccaacggtttcatgtaccagtgtggggatatgaagttagatgtactgtgcggttcaatttctgaaccgtttgtccatccaagccacccccatcatcccttatattacattccaccagaggaagaaaaacaatgcaatggttgcgacaattggtcatctcttgtgcttacgtgcattgaaagtggttgtggatatttcttatgcttcgattgtgctaggctaccacaagtggtaaagcatagagtagacgctcatcctctctcactatgctatggagaaaaggcaagtggcaaatactggtgtgacatttgtgagaaagaaacgaatccgagtacatggttctacacgtgtaaagatcaccgagctagtttgcatacaaagtgcgtgatgggagactttgcaaggctcatgccaggaagtacattaacgtattcccacatatcatatgaggtggtgcgcaataatagtatgtctcgtccattttgcagagcgtgtgagtcacattgcatgtaccctatcatcttgaaggtgcttggatcctcagattgatacatttgctctttaaattgcatagatggtttctggtatccaaagaacataagg

SEQ ID NO: 166317 - DNA, 753 bp, Arabidopsis thaliana landsberg
ataccaaaacgcatcgctttggtccttaacttggccatggtagccatacaagtcttctttatacgcagtgtttcgtccatgaacgagaccaactcatatctataccacaaatgctccgaggctgaagggaaatacaagtccaagagcccgtacgaaggaaacctcaactttctcaccaatgacatgtataaagacacttttgtaagaggttttgtctatgcctatcatggtgacgatcccaataccgtctacatcttgctccagtgccggggtgactcctacggctccaagtgtggttcctgcctctccactgccacctccgaggtaacgtcacacacacgtcaatacttttttttaaagataacacaatcttttacttttccaaaaatgagacaatatctcgactgagcttataattgataaatattggtagtcatttagcacttgtaaaaaaaaaactatatatcgtacatagattagtgtgtacgagtgtaatatttgtttttgattgtggtatcgttatgtatatgaatatgaaagctgcgtacaacatgtcctatgaacaaggcgggaatagtagggttggataaatgtcttctctagttttgttcaaccgctttcagagaagagatcaatcactaagaactatgttcaagtatgcacagcacaaagaaagtaacgcatccagcgttgttcaatgtgaagaccccagactccactcagtgtggtggccccaaaggcaaatcgcaaatc

SEQ ID NO: 166318 - DNA, 2034 bp, Arabidopsis thaliana landsberg
atggatcccaattcatccaacacatcgagatctggcttaccagttcagatcccaaacgatgacgttacggacgggcacctcccaacggatctccctcccggagcctaggttgatgctatccataacactgacacggagaacatctcccaaaactcgaattcttctggatctgaccaaatcactccccctccgccaacaaggggcggagaacgaaacgtcacgatacagcctccaaacggagataactcggccatcctatctaatcaggtccccccgtgacctgccagcgaattggccgagctctgcgcaatgatcatgagcttgatcaacttaaccaaaaaccaagaaattgcgtatcgcaaccttgccgcaattgtgggtcagcagagacgcgattccactcgcatggcacatgaggtagagcgcgatatcgcgggtaaggagatatcccccccccccctcccgcgaaactgggattcctgcccaggtccccatagatttgacaggtaccgtctcctcggctaatcctacttcgagaactcgtctggatttcgcctcgatagacgtctcacatcctatcaaccggcaggtcgcctttttacaggcacctgcgaaggctctcgtcgaaaacctggcaagaggaaacgaaacaagcacaacgcctgctttcccaagcctaccggccccacctttattaccgatgggctgttcaccccctaggtacacgtggactagaaaccaaacaaccgcatccagttcccgcattcccaggaactcaacgcaacatcggacctctatcgctaatccgccatccgttccccggataccaggaagcgacctccttaacagtccccaagcaccggttgatccgcgtaacgtcgtggatatggaaacattccgcaattacacagctcaaacaaacgcaaacatggctcaaatgcattctcgaatgcacctagcagtgagcgatgctcccgacatagatcgcgtgattgaaaaaaccaggcgcaccccgttcacggataggatcgctcgtttttcgcctccgagacgtcgagagactccatttcccggagtacgacggaacgagcgacccaaaggctcatctgagatccttctgtttcgctataacacgaccgtacctgacagatgaagaaaacaaagcaggtcattgccgtttcttcgcagaaaacctcgtaggtcacgccctcgaatggtttactagcctcgaagggaactccattgataccttcgaccagctcgccgccgctttcttaaaacaatattcgatacttatcaaacataggacgtccgaagccgacctctggaatctcactcaacttcagaacgaatccctgcgatctaacgtcgaaaacttcaaagcaatcaaatcgaaaattgcaaacctaaacgaagaggtagccatagcagcccttcgtaacggcctttggttctcctctaggttccgtgaagaactcactgttaggcaaccagtctctttagacgatgctcttcacaaagctctccacttcgccaaagccgaagaggagctcgctgtgctggccttacgattcaaagaatctaaaacgcaaaatgctccccttgcaattaagaaacccttcaaaaaggaaaccaaacgcaggggcatcataccttattcgcaatagacgaggcagctgagcacgagagtccagaacttgacctcggaaaatattgcaagtaccacaagaaaagagtacattccaccgaggagtgtcgcgcactgtggggaaagactaaaaaaggttcaaaccccaaagttgaaacccctcctcccgacgagcaggaggaggagcaaactcccaagcaaaaaaaacgagaacgaacacccgatggaagttactctcccccacctgctaggagagaacgcatagacctagtctttgcagaactcgatctaggtggcgggacagtaaggtcagtcaccacacctccccccgccgcgcataagaaaaacatgaggtttcattacgtctctcgaaattctagttgaag

SEQ ID NO: 166319 - DNA, 973 bp, Arabidopsis thaliana landsberg
tatgctttggtatcccaggggaacaaaaataaccattaatctgaattggcctacctcaaattttatattttgtaacgaaaactaatcaaaacttcttggttgtttcccaaacaatcctacaaaaatacttgggaatggtctataaaattcctaaatcctaacctttctaaagaaaaaaaaaaaaaaaaaaccgatatataagtacctctaatacgagatgtctttgtcgaggccagaacagcaagtagtccaacattttacccatatccattcattaactaaggtcgacggatatggtgagttcacatgcaatggctgcaaaacctacggctttgggaagacctaccgttgcacccggtgtgactacaatcttcacgatcattgtgccacgtgcccccctaccctcgccacctttattcatccacagcaccagctccggctagtctttaagggaccagaacagacccaccaaaacagacgtatgtgtgatatctgcgacgaatcggccgagggactctattaccagtgtgagccttgtggcttcgacgttcacccactctgcacgcagctacctcagagcgtgagacacgtgcctcacccggcccatctcttagagttgagtctagggggagcgagcaactcgtgcatggtttgtagcggtgcaatcaagtcttggcggtacaagtgcggtcaatgcagggtagatgttcacatggaatgcgttgattcatctacctcggtagcagaaacgggaattcagcaaaggggttttggacagcaatttgagtttcctcaatatcaccagccttattacaatcacggatacaattacggatatataaatcaaggtcaggttcaagagtcgggtccgagtattgggagaaggatgtataaggttttgatggctctgacggttggggttgcttgcaatatcatcgctgggccggccgcccaggtcattatgggaggcttt

SEQ ID NO: 166320 - DNA, 592 bp, Arabidopsis thaliana landsberg; identical to SEQ ID NO: 52103
  unsure (1)..(592): unsure at all n locations

SEQ ID NO: 166321 - DNA, 745 bp, Arabidopsis thaliana landsberg
atgtctagaattcgtagtgattggtccaacctttgtttcgatattttgagatcaatctttgaaggattagagactaaggattatcatcgagcgaggagcgtttgctcacaatggtatttagtttcaagatcatgtacgcgacctatatggtatccatggcaacttatgcgcgacgaggatggtacttttttgggtcatcacagtgaagatcgcgaattctccttcgaagtagaatgtcttggatttgatttattgaaaagctttgttatggctagttggagtagttggctcttgatgaatgatcctagtttagatttcttatatcttttgaacgtgtttactcgcgagatgatcaatcttccatcaatgaagtcatataaaggaaaacaaaccaaattgacgtctcctctcaaaaatttggcttgtttttggataaacgagagaacaaaggattatgttgtagcttgtattaccgaagaaaactgtttgttcacatacaagaatgaagatgattattggtggaatgttgaagacatatattgtacacacatgacttataaagacgataagctttatgtgtatacaattgatagctacatcaagacttgatttctctggagctttcccaaaagaaatcgtccaaggaaacccgtaccgtgaccatccgttttgctttgataaccaacttggggaatacggtgggaagacgaggattgcgattacgaactcaatggatgttttgatc

SEQ ID NO: 166322 - DNA, 2893 bp, Arabidopsis thaliana landsberg
actaatatgaaatggagaacattagacagacctccaactccaccaactgtcaagatagattgaacagctacaccacatgcttcagcagaagccatcaaaccgatagcgaaaagaccaacagatgatactttgtctaaagtcaataccttgtccctatcaagcccaccaaaactcttagccgacaacattcgggtaatcacattggtcttccaccgatacaggaaccacacaagtgagagaataaccgctcccttcacagtcggggaaaagtattgagctgctatagttgttggcgccaccattgcagcactgcagcatatcacattcatcaagtctatctattttctacaacatacatgtcaaaggaataaagctagagagactcacatttgtgcaaaagcaatgaaggtgaccaagtaacgagcaggatcctctaaagctccccaaaagcttttctcataaggaacatcttcgttagagaagccaacgggaagcagcttagcggaactttgcatagcataagtgtgaaaccttctaagaatcctaggcatcacaacccaagcaaataaagtaccagtcacagtgagactaacaggaactataacatctttgagatacgggttagagtcaaggaactgctgaacatgaggaatcatctcatcagagacatctttagtcttctttgcagtctcagcaacagcattgacactagtctgcaccacatctttagctttctcaacccaatcattcccattcccatcaccagacccagtaacaccagatgctacaatacttccgaaatcatcagatttggagctgaaagctcgtgcgtacgacgaatggcttaagtaattgaaaggcttagcatcactatgcaggcgtatattcgatgaaaaggagatcatcgaaggagaagcttttggtccatcaagaaggtttccgcaagtaaaggccctggcatgagagtttactaaaacgttaggttaaacgtactaatgatatatagtaactatagccgaaccctaaaaacagccgaaacctaaaaacgaactcttttctccctaaaaacgaactctttttctctcagagaaccgtctgataatggacaaagccaataccaaccggtccaaggtttgtggtggttccggtgaagctaagctaactgggaagaagcggaagaacgtgagtgccaaacaatcaaagaaagatgcaaaaaaggagaattctcaaaggttaaagtggagttcgaaagatgaggtccttgtgctacaaggtatgttggatttcaaatctgtaacaggtaagaatcctgttgatgatataaacggagcatacgaattcgtcgtccatgaatacataagcactgttattgacgaagacttcatagagaagatgaagagtttgaagaagaaattaaagaaaaaacagaggatttacgataaagatccgtcttcttcggaacctctataccagaaaagttccgagtggttgaaaatgatttggggttatgatgtggaatctgcccttgagaaaccaaggaagagtaagcggattataaagctttgaagcatcatcatccagttagatgctaaattaacgtctcatttcagtttgttcttgcaactttggttatcttttgttctatctatgtttctggtttatcttatgatacctctatgttaagataatggttttatcttttattaaatggaatctgtttctattccagaacatgtgtttgccattctgaatcagacatgtttggtactgcaacatcaaacaaactagttagatctctcaatgttgactgaaaaattacgcaaatcagactatcaaacaattcctgaatacacacaacaatgctcaatgccaacgactctggttttttctggagttatattgaaccatatgttaacagggagcaataagattcttatcacagagtattttccggaacttttgttttcatttgtataatcaatcaatcaatcagtcctggtttgatcatcaactttcatgtacaagtctgcaagccgtggtaaagtaagtttttgctgacatcttgagaaaaccttcaacatgatcctgctcaaacaaacataacaatctaaaaacagagaaaagcctggatatcggtaaattgtgactgcagtgaaccttgttagaaactgaatctccttctagaaacagaacaccagagaaagagaatcagactttgtatcacaattggtttgatcgtcaacagaacaatatagagaagaacttgcaatatagagaagaacttgcctttctattatagagaaagtgaaacacaacaactgcttagacggtttacaacaaggaacttaaatacaaaccaacagacatgaaaggcttcacaaaagttgagctgaactaattgatcatgcactgcaaaccacatcaaacgagagccattttctgcttaacatattgaattgatcatttcatgtacataggaattgttagaaccctataaatacctacctataaatacctacctgttaaacagaaactagaaggaaagaaataaaagcaaggccaatatgaaacatttttctcttgaaacctaagaagtcatcacgattttctgtaatttcccaaaaacacagagttttggatccatctagctagatagcttccggatcagtattccttgtctctacaaaatgatcactcacaatgtagaattgtcccaggtggtacctagcgacacaccgtgcttctttatgatcttcaccgcctcaagaaggacctcttgttgtgtattgtatagctcctcttttccctgagacaaatgaagcttcaggtgtcattgacaagctttggcctggctgttttaggatcaatttcaaccctgagaccaatttcacgg

SEQ ID NO: 166323 - DNA, 535 bp, Arabidopsis thaliana landsberg; identical to SEQ ID NO: 77610
  unsure (1)..(535): unsure at all n locations

SEQ ID NO: 166324 - DNA, 413 bp, Arabidopsis thaliana landsberg
cgtggtcaccaccgcattgaacccgagattcacggtggaccgggtggacatcgaccgggtcggcgtcacttacaccgtggacaccatgcgtaacctgcggaagaagcacccgaacgccgacctgttcttcatcaccggcgcgaacgccctggaacagatcctgtcctggcacaaggccgaggaaatgttcgccctggcgcacttagtcggggtgacccggccaggggttcgtgctgaacgcgaaccacctgcccgagggctcggtaaccctggtcgaggtgccggccatggcgatctcgtccaccaactgccgggaccgggtgcgccacggacgcccggaaaggaacctcgtgccggacggcgtggtgcagtacatcagcaagcgggggttggaccggtgagcacaaatccgt

SEQ ID NO: 166325 - DNA, 793 bp, Arabidopsis thaliana landsberg
gaagaaccagaatgggggcatccgaggttagtctcttatcaagattagtgttaccttgtgtttcttatagatagtggtgttagatttatgttcatatcgactgtaaaccctatagttttcttgagcaactgcgtaatatagagctgagactgtgcttctcttctgaaacagatccgtaacatcttggagcacatgcgtagagcagggaacttgcgtttggaggtactgttttcgatttacgtataatacaaaaagattttacctgaatgatcgtttaatctttttttgtgatgcttttttcaggatgttatgcttctcaatcagtccataatgctaggtgcggctgatattcatgaccgatatagagacatgcgacttgatgttgacaacatgacatatgaggtaaagccagagcaaacccataatcatttatttgctcatcatactaactatgagtataaaatctgcaggagctgttgtctctagaagaacggattggagatgtttgtaccggtttgaacgaggaaaccatatcaaaccgattgaagcagcagaagtacaaaagtagtactagatcttcacaagaagtagaaccatgctgtgtttgtcaggtaaacaatatcagatttgcataaaattttgtatcgcaatcctgttaatgacttgcacttttgattcttcctattaataaccatgactgattgctaaaattgatgcaaaaactgtaggaggaatataaggaaggagaagaaataggaaggctggaatgtggacacgactttcatagtcggtg

SEQ ID NO: 166326 - DNA, 955 bp, Arabidopsis thaliana landsberg
atggagaaggagatctcgttgttgctattggtcatcatgtttttaaatctaacgctcactaccgtcgccgacgtcgacgccgttagggttccgttttgtgctacgaagtctgttaaagattcaatctttgggctccgagatcagacttgttctgtttctggtgttgaatcagacgagcgtcctcgttttgttgctgtcaccgaggtaattgagatttcaatttctagggtttctgcttgaaagaatctatcttttgtttcttatgaatgttatcaaatgttttgtgtagggtgatgagcgttggttgcaaatagcattggatatgattcataagaacaagtgtgattatgtggctttgcttttctatgcatcatggtgtccattctcaaggtcatttagacccagtttcgatgttatctcttctctctattcctccgttcctcattttgccattaaggaatcatccgttaagcctaggtgagttaatgaagcgccacaatctttaaactggttctgttgtggtgatgatcttttggttatttgttgtgctgcagcaccctttccaagtatggagttcatgggtttcccactctcttgcttttgaattcgacaatgcgggcacgataccgaggaacccgaatgcttgattctcttgttgctttctacagtgatgttaccggtatggcttcatatatgtagtcttctgttctgtatttaccctgatgtggatagtgtttttgtagtgaggttaggcatttagtagatactagagagttggttttgtgtgatggtattagttgtttatgatcaatagctcaactagtggaactaacaaggaatgttatgagattgtaggcattgagacattggataaaacttctctcgagagaagcgtatcagttcctcatctcggtaacgaaaacaacacagagccagaaaactgtccattcacgtg

SEQ ID NO: 166327 - DNA, 647 bp, Arabidopsis thaliana landsberg
tacaaaaactatgatctctccggttatagacttgtgtctccggttctagggctcttagcttataacgcattaaacgatgttgttttagggaataacgtgagtagctcttatcagataagtgtcctgctagcccgtactaaagatccatccaacgttgattttgggaacgtttctggaccgtcggtggtagagagaacgttcttgaataagccaatgtgcgctacttttgaacttgatggaaaagtaacgcttgccgccgaagtgaagccgtttgtgtgcgccgttaaaaccaatggacattttggtttagtggtgacggatgatccaaaatcgaatggtggaggagaaaaggagatgaagaaggagaagatcggacggtggaggaaggttgttggagggcttgttgggtctgtgacggtgggggtggtgcttttagggctggtggtggcggctgctgtagtgacggcaaagaaaaggagaagaagggcaaaaagggaagaaatggagagaaaagcttatgaagaagaagcttttagagtagtgtcaatggtggggcattctagggctttcgttgcttctgctacaaggacttctccagctttcatggaatatgagtttgttcctaattaattaattatatttacgtg

SEQ ID NO: 166328 - DNA, 760 bp, Arabidopsis thaliana landsberg
ctgtgagcatgtcaataagggaatatgtaatgatgaggttagatagatttcttcaaagaatgctagcaaatgtcttcagaaaatgttcagtgagacggattaagtcgctttgctccaagggattagtgatttcacatctaccgaaggagatccttatgaggacattgatgctctatgcatttatgtgaagtgtctgatggatttcgatgctaccaaaaaccaaattgttactaaacttcagaggttgaagaagaagtttaataatgctgtgaagaattctcttaagaagggaaagactgaagatgatattgagtttgctaaagatcttgagcaaaaaggttttgaattgtccagaaagatttggggaagcaatggtgttttggttactggtaaatcatcaaggaagaaagttggaggaacacctgcaccgaaagagatgaagttagtagctcactctactcccaagaaacaacaagaagaagcgaagaaaccggaaagaacagaggcaaaggttgtgaacacaggtctctccattggtaaagagattgcatcgttcctcaatgcagataatgggagttcttgtggtttggatgaatccacattaactgcggtttgggcaaaggttgcggatggagctgagaagagagaagtggaggagaaatggaagaagcttaaggctaagcagtttgagctatgtttgcagaggtctggactcgtgaatgaaactgcaaagatgatattcaaagcctatgaatcttga

SEQ ID NO: 166329 - DNA, 2328 bp, Arabidopsis thaliana landsberg
tagggatgtcgagtataggcttgatattcgccatcttgatacaatttttgggtttccaagtggagaaggaatccgccaagactatgatcaagatgagctaaaatctctttggaaaataatcgccggtccgaagccctactcgccagccaagagcaagagttcttcaattcgaaatcccgtgattagatacgtccaacaatgcatcgccaacaccctctttgcaaagaaagccaccagatttgttggtgaagaggagctatgcatgatagaccaatctttggtcttcattctaagagagacaacagatgggaggaagatggcaggtgatagagcagacacttcgctgagtgttgttcttttggatcacctattaagctacagagagtatgctgcaactatccatcgctcgggaattcgcggaagcctttgtgttggtggtctctaacgccaatactgtgagctgtggggatggaatttggaacccctgacgtgttgcctaagttcattgacctagactatctcaaggggaaggattttcttgagaaaacaactctagcggatcgctatctcttcaagttcaaacactcggagcttggaccttctcttctacccctacaatgcgagaatcggactttggtgaagacaaggcgcaacatcaattttatgccatttccctctgccttgaacatcgacattggaggagctcgagaggatgaaccggaatatagcccagccgactatgagcaacatgagtactttactcaagctaattatgaggagcaaatcgagtttgagcaacatattgatcaaccggagcaagggactagcgaacaagagcaagctcattatgaagaaggtgctaagcaagagggagatgagattgctgaagttcacaagaagcttggtgtgcttgaagagcttggaaacctttacaacaagacaatgaaggtttcaagaagaagatgagaaccatgaagaagtcgctgaagagtattgatgctcaaataaaagacttccagagcaagccaaggcccccgtttcccacccccaaagtaataagaagtggttcaacgagctcacctactaggagggctgacaggatcgatccaccccgagcttcatcatttgagcctcgggaagtgatctccgagttgagagagccaagcagagactgagaagagcatccacacgctcgaccaactactcgaccagaccggatgagcaaaacccttccgcctcaacatcagtccctgcttatactcaagaaagtatggaccatttcgtatccgtctacttcacctgaccgatgaggtgacaccactacctccattgtacataccatagctttttatttgtctttatgtgttttgtgttgtggtcttgaattctttctcagatttttattacacaagggactgtgtaatttaagtttgggggagggttcaagacatgtttgacattgtgttctcttttcttatttcaaattttgcatcatctaaggcacagaaaaaaccataaaaatttgaaattttttcagaaaatgatttcatcaaaaacagagtgtcatgtattttgcatttcattttaggattgtatatagagtgcttgtatttaagattgctcatttgcattggagataatgatgatttcaaaccatgagcatgtaaattcaataaagtaagttcaatgcccaggtagttagttctttgttgcataactgattgtttctctgaagtaagaccgcaccctactttaaatttacaacttgactatactgctttgattcgaaactcgctaatctgatgtcattccctactattagaacctaaccttaatttgcaattatcaggtctatgcattgtttgtgaactcatggctaccatatacatacttggattatcttattcacttcaccaccctttgttaatccaagtagctgactctcatctttaaagcagtttcgcataccctgagtttaaccttatttcaagccaaaatcatctgggtgtgtttgtgaggtctttttctgattgagcttagctaacgcgttatgtatgagccgacaagaacactctttcatgtagacctagcccacgctttttgggttaggtaggacaaggtggggacttgtatttgggaattaggattatgtatgaaatgaaaaaaaagagaacaagagtgaaaaaagaaaaaaagaaaaaagagaaaaaaaaaagagaaagggattatagcttaaggggtgatacaaaagtcttagtgtagtaaagagttttgaattaaaaatgaaaagaaagttaggcattataattcaaagaaaggctaaaacac

SEQ ID NO: 166330 - DNA, 788 bp, Arabidopsis thaliana landsberg
gcttcattgcagagattaatagccatagactgtcgctctcaagttcctggagatgatgttgggtttgtgatcaaagctccgtctttaaagtcgttgacgttgttgaacttttctccccatagtgggttccgttctttagtaaaaatgccagacctcgtgaaggcttctatcaaggttcgacatggtgattctaagatgtttatgggatgtcttacctcaaccaaacgccttgccttatgtctacaaccaccactggtaaggtctatgagattttgtgactatttatattctatttttgatttcattataatttctataacttatgatgccatttgcaggattcatgtcctataggcgtcttcaatcagctagtgtctctaagtctttgtacatgctctttaggttggtgtcgtcttatactcaaccatacacctaaactcagagttctcagattcgaacaaagacaagcaaaattttatcaattgctagatcctcttaagagatgttgcagcagttccgtagatgttcaaactcaatgggagcagccgagttctgttcctaagtgtttgatttcgagtcttgaaactgttgagtggattgattacaaaggaagagaagtagagaaaaaagtggtgatgtatttgctagaaaactctcgacagcttaagacaatggctattagatccctgaaatcgaccaatgataacgagaaactcaagatgctgcaagagctatcgtccatacacaggatttgtactaaatgtgggctttccttcacctgaagtttc

SEQ ID NO: 166331 - DNA, 1426 bp, Arabidopsis thaliana landsberg; identical to SEQ ID NO: 4706

SEQ ID NO: 166332 - DNA, 428 bp, Arabidopsis thaliana landsberg
atgggagcctacagagccgacgacgactacgattatctcttcaaactagtcttgatcggagattccggcgtcggaaaatccaatcttttgtctcggttcaccagaaacgaattcagcatcgagtcaaagtcaaccatcggtgtagagttcgccacaagaagtgttcatgtcgacgaaaaaatcatcaaagctcagctttgggacaccgctggtcaagaaaggtaataaatcctcgaaatctctctgttttatctctctattctctgttttgttccattctttgaaccaaaccaaaccgaaatggttgaacaaaaatcaaactggataattttacaaatttgttggttttactattttgaaaccccaaataatcaaagtataaactgatttagtgtaatcaaataaaccgcatttttttagaaatcctc

SEQ ID NO: 166333 - DNA, 827 bp, Arabidopsis thaliana landsberg
atggctgaaatcagcgggctgcctgatgacttgctggtgaagatactagcgtttcttccaacaaaagttgctatatcaactagcgttttgtcaaaacaatggcggtttctttggatgtggttgcctaaacttaagtacgatgattacgatgacattactgatggtttcaattccgtgtctgcattccagacatatcgggattttattgccaagaatttgccattacacagagctcccatcatagaaagtttgagcctcggatttcgttgtggaacacttcaacctgaggatttgaaatcgtgggttgaagttgcagtttctcgtagtgtgcgtgagctaagtatccttgcatattataggaatgattatgcattatcgtcgtctagtttgtatacctgaaaatcgctcgtgactttgaaaggctttaacattcgtgtggatgttcctccaacagtttgtctcctgccttccttgagaactttggaacttaaacgtgtgagatacttaaacgaagattctcttcgaatgctcctatccttttgccctgttctggaatatctaagtatagaacgacacgataatgacaatttgagagggttagttgttgatgtcccgtccttgcggcgtttatctttaacttcatatactggatgttcttctgacgattatgtaatagttacaccttctttgaagtatttcaaagcttttgattacagaagtgaaatttcctcctataagattgagaaaattccagagcttgaagaggcagatatcagtattgagcgaaatcccgagaagctttcgtatatctaaatctatcaatgtct

SEQ ID NO: 166334 - DNA, 1704 bp, Arabidopsis thaliana landsberg
gggatagtcagccaatgaagtggtctatgaggttgagagtggctttgtatcttgcacaagcacttgagtattgtagcagcaaaggtcgcgccttgtaccacgatcttaatgcttacaggatcttgtttgaccaggtccatctcgagcttactattaactctcttatctctttcttgctcttgattggatttatgtttcacttttcgtataagttactgttctgggattcttctaatgtttttctggaaaacttgattacaggatggtaacccgagattatcttgctttggtcttatgaagaatagtagggatgggaagagttacagtacaaatttggctttcacacctcctgaatacctaagaacaggtcagttactgatttgagatgcaatggcgtcaagttatgtgtttgctgtttgacaaagttatgatattgatctgatatatggatgtgcgtttattaatctcttaagggagagtgattccggagagtgtggtctacagcttcggaacgctgttgctagatcttctcagcggcaaacacataccaccaagccatgtaagtgcaccaaacatggctcaacttctcttgggaggaagttcttgatcttttagcttcttctccttatcccagaaaatgttgataaagttctgtatgctctaccattgttctgcaggcgcttgatctgattcgtgggaagaatttcctgatgctgatggactcgtgtctagatggccatttctcaaacgatgatggaaccgatttggttcgtttagcttcccgttgtttgcagtatgaagctcgtgaaaggccaaatgtgaaatctctcgtgtcctcactcgctcctcttcagaaagaaactgatgtatgcactcactaaatcaccttcctttcatgtatcaaccattcaagtattctagctcctcgtcttattctacatctctgttgttttcttcagattccgtctcatgttttaatggggattccacatggagctgcttctccaaaggaaacaacttcgcttacccctcttggtgacgcttgttcacgacttgatctaactgccatacatgagattcttgaaaagcttagctataaagatgacgagggtgcagcaacagaggtttctttcttaaccatactctcacaattgtctcattgtgtatttgggattgggctaccttgtttcttattgtaatctgattactttttccgcctgcttttttctgtgcaaaaatttcagctttcgttccagatgtggaccaatcagatgcaggactcgctgaacttcaagaagaagggtgatgttgctttccgacataaagaatttgcaaatgccatcggctgctattctcaggttagatcttttctactgccattgtttatttgtctttggggtttaagtttccagagaaagggtaaattctaatctaagaatgtgtttgcaacagttcattgagggtgggacaatggtttccccgactgtttatgcaagaagaagtctgtgttacctaatgaatgagatgccccaagaggcgctgaatgatgcaatgcaagcccaagtgatatctccggcttggcatatcgcatcctatcttcaagctgtagctctatcagctctaggacaagagaacgaagcacacgctgctcttaaagtcggatcaatgcttgaaagcaaaagaaacaggctatgatgatgataa

SEQ ID NO: 166335 - DNA, 918 bp, Arabidopsis thaliana landsberg
atggaggaacaaaactggataagaggaccaatcataggtcgaggctcaacagctactgtctcacttggaatcacaaattccggtgacttcttcgccgtcaaatccgccgagttttcttcatcggcgtttttgcagagagaacaatcgattttgtcgaagttgagctctccttacatagtcaagtacattggttctaatgtaacgaaggagaacgacaagttgatgtataatctcttaatggagtatgtttccggtgggagtcttcacgatttgatcaagaattccggcgggaagttaccggagccgttgattagatcctacacacgtcagatattgaaaggtttgatgtatcttcatgatcaaggaatcgttcattgcgatgtgaagagccagaatgtgatgatcggaggagagattgcgaagatcgtcgatttgggttgtgctaaaacggtggaagagaatgagaacttggaattttccggtacaccggcgtttatgtcaccggaggtagcacgtggtgaagaacagagttttccagctgatgtttgggctttggggtgtacggtgatagagatggctacagggtcaagtccttggccggagctaaacgacgtcgttgctgctatttataagattggtttcaccggcgagtcgccggtgattccggtttggttatcggagaaaggtcaaggctttttgaggaagtgtttgagaaaagatccgaaacagagatggactgttgaagaattgcttcaacatccgtttctcgacgaagaagacaacgacagtgaccaaactggtaactgtctgaattcttcatctcctagtactgtgttggatcaacggttttgggatttatgtgaaacttcgagaagtagattcattaaagaggatcacgaagacccatttgcaaattct

SEQ ID NO: 166336 - DNA, 4102 bp, Arabidopsis thaliana landsberg
  unsure (1)..(4102): unsure at all n locations
atggcgggtcaagaggatgagtatgatccaattcttgacaataaaagagaagctgaagcaaaatctcaggtttctgttgctgctgataaaaatatggctccttctacttctggtactccgatccacagatcaggctctagacctcagcttgatctaagcaaagccgaaattcaggggaacctcgaggagagagatcccaccattttattgcctaatcagtctgatgatatctctcatttggctcttgatatcggaggtgacaacaaatttcacttcttttttattttcactgtagttgaccattgatctagtgcttgtggttcttccagtagtatttggtgtcacttcttggttttggcaatttcgatgtttatttcttaagtgctatgtttgagaattatgaacccttttaagtttatttgcaggttctttgataaagttgttgtatttttcacgacatgaggactactctaatgatgatgataagcggaagaggacgatcaaggagagattgggtattaccaatggcaacttgagaagttatcctgctcttggtggtagacttcattttgtnnnnnnnnnnnnnnnnnnnattaatgagtgcttggattttattcattccaagcagcttcatcgccgaggtattattacttttatccttttcagtgtatgaaatgttgttttgtattataagatcaatttctggtgatttactcttcaattcgtcttcttctccatttcttttcaactaaatgaatagatccttatccttggagttcaaagaccttgcctttggggactggtgttatcaaggtaatggcatttttatgacttgattgtttttatctttatcaccttttgaggctccttctgcatatatttagctcgctctttcatttgagataccaggtaacatttaagaccctcataattattgtttttaggtgaaacgttttttatatttataagtcttgtatatccatgtaatgtgatttgctgattcggctttgattagttgattattacttgttttaaacatatgagtcaagcgtacgtgtatctttcaggtcacaggtggcggggcatttaaatttgcagacttgttcaaggaacggctgggcgttagtattgagaaagaagatgaaatgcattgtcttgtttctggagcaaattttttgctcaaggtaagacctttctttatgcaacattccatttatgttgtctctgcatacatatttgtaccttttattactagcacttgcgaaatagaaacgtaaagacagactctcattatatgtgaccggttgatttgtttgttgaagttctgagtcacatgagagaaaaacagctggatatctgtatgtgtgttttactatacttaaagttctgctaagactattgaaattttgcaattagtctacttttcttttgtctatttgcatgtgtatgttttgaatttattcttagtttcttgcattttctgcaggctattcgacatgaagcctttacgcacatggagggtgagaaagaatttgtacagatagatcccaatgacttgtatccttatcttcttgtgaacgttggatctggtgttagcataatcaaggtatttgtttacgtttgctacttttttcacaatcagtgtgtgtttggctccttgaacttctgaattgggaggtcagaagattgcatggacctgtagatttcatgcaatggcttttcaaagtataggttgatggtgaaggaaagtttgaacgtgtgagtggaactaatgttggcggtggtacctattggggcttaggaagacttctaacgaagtgcaagaggttacagagctctgattttacattatttctttatatttttgtttccaataccttacactgttttcttttgtttcagttttgatgaattgctagaactcagccaaaagggagataatagtgccattgacatgctcgttggtgatatttatggtggcatggattactccaaggtaggagtcaactttgcatcaaactacatgtgatctcatttgttataggatgtgactactctcctattgaaactcagaatgctttattactactgttctagtaattctcattaatcaatcatacagattggtctctctgcttcaacaatagcttctagttttggcaaggcgatatctgaaaataaggaactggacgattacagacctgaagatatttccttgtctctgttgcggatgatttcatacaatattgggcaggtatgcattggcgagtccaaaggattcaacgaagttcttaagcaagaataagcctaaatgtttctcatttttattcctaagcatgattccatttggaagttttgatcagtgaatgtgataagttattgagaatattatgagtttctgatttgttttgttgctgtgtagatatcgtacttgaatgcccttcgctttgggttgaagcgaatattttttggaggatttttcataaggggtcatgcatataccatggatacaatttcatttgctgtacatttctggtaacttcacttgtaaacttgaactagatgtgatatgcgtactcaccttcttcactcaaacttatttatttattgcttgactacactaggtctaagggagagatgcaagctatgttcttgagacatgaaggttttctgggtgctctaggtgcgttcatgagctatgagaagcacggattggatgatttaatgtcccatcagttggttgagaggttcccaatgggtgcaccatatactggaggaaatattcacggaccaccactcggtgatttggacgagaaggtacgaaatttagcttacgctttaccaaagtctcagtttgttctatttaatactttgaaactgacagccaaaaaaattccgtaatgacatgggacttctcaaaatatgaaagtgcgggaatatgataccatttatgccttgtgctgggtaaagtgtatgctggttaccattatagtattctttaggcagttgcattgtagaatatgcttttcttgaaattggaatcttttggcaaatgtttgatcttccatggacttactgaatattatggccgaaggagatggtcggatactttgagactgttgaagtgcactatgacttgttcctttccatggtttgtgtgctgactgaatttttttggatactcaatcattaatcttgatgattagtcatagtttatgcttgtatggatatttttcgctgtgaagtttactggttctttcctttttatatacaaagtatcattttgtgtgacaaacgaataatagaaagcaagagtaagaaaaacctcgttttcaaatctgtcacagttatattctcttttcttttatgtatatatcaaaaacgagatggaatcaagtgcttttttcccactttccttgtgctaatggtagagagatatcacatcaactagttataagtgttgtgtgtcttgactctgttctagataagttttggagtttaaaaaggctttcctggttgctttcagatttcgtggatggagaagtttgtgcgtagaggaactgaaataactgctcctgtaccaatgactccatcaaaaacgactgggcttggagggtttgaagttccatcatccagaggtagtgctttaagatctgacgccagtgctttaaatgttggtgttctccatcttgtgcccacattggaggtgttcccattactagctgatccgaaaacgtaagtggcatgtccctgagtaatgtattgagcttgtacatatatgtcctggtttgctgcttgttcatgattttggagattttatgttcgtgtgtttaatcgatttgttttaccccaggtatgagcctaacacgattgatctatcagatcaaggcgaacgagagtgagttataagtcgatgctgatcttccaaacactggttttatttgatgaagtcactttttcttatattgtttattttctggtggggtataggtactggctcaaagttttgtccgagcattcgccccccctcgttgatacggtaactgttaaagttaacacataggatttcttttccatcttcagtaatgttactgtttgggtg

SEQ ID NO: 166337 - DNA, 480 bp, Arabidopsis thaliana landsberg
atgaatacgtacccgactgagctggcggccgtgctgggtcttggccgctacccggaccacggacgatgccacgatgtggtggtcgtcggcgccgggcccgcgggactggcggcagcggtatacggcgcctcggaaggtctcgacgttgctgtcctggacgccacagcgccgggcggccaggccgggtcgagttcacgcatcgagaactacctcgggttccctgacgggatatcaggtgcggagctgaccacccgtgccactatccaggcgcagcgtttcggcgcgctgctggccagcccgtgcagcgttgacagcctggccgtggccgcgggcgggagctttacgatgagcctggcggacggaacctcggtttccgcgctggcagtggtggccgcaagtggtgcgcggtaccgccgtttgccgctgcccaactgggagcggctggaaggggccgggatctactacgccgccaccgagttg

SEQ ID NO: 166338 - DNA, 460 bp, Arabidopsis thaliana landsberg; identical to SEQ ID NO: 39558
  unsure (1)..(460): unsure at all n locations

SEQ ID NO: 166339 - DNA, 483 bp, Arabidopsis thaliana landsberg
ggagttgaaatggtggcgataacaggcaaggtggtggtggtcaccgtcggacggcgacggctgggcgcggcactggtcacgaggtactggcccgcggcgcggccaaggtgtactcgaccgcagcgctcggcgttcaccgatgctcgccggtcggtggtgacccgtgaactcgaaggtgcgctcccccgcatcgatcgacgcgctggctcgcggcgccggcgacgccgagatcgtgttcaacaacgccggcattctgctgcccggttcgctgttgaccggttcctttgacgacatttccgacaccttcgacgtcaacgtgttcggggcactacgggttgcgcgcgcgttcgccccggtgctggcggccaacggtggcggagctctggtcaacatgcactcggtgctgtcccggctcgccggtgccggcgcctacggcgcgtacaaaactgccgcctggtcggtgaccaactcgttgcggaccga

SEQ ID NO: 166340 - DNA, 2042 bp, Arabidopsis thaliana landsberg
gtgccgcttttgtcaattctatttgcacgtaaaaagaaaaatcgtctggccagtcccttttttgcaaagaggaagccaataaatccttctaaaaaacagaaataatttttgttttaattttaattcgaaatatatggatattacaagtatagccccatccgaacctattaattaccagaaaaacaatggttcgtttccgaaccaaagcacccgaaccacctttactctttatttgaaaatcaaataacttaaaccctaatatttccagagagaagcgccggcgaagaaggagaaagagaaggtgccggcgaagacagagaaagttaaggcgccggcgaagaaagtgaaggagaaggtgccggcgaagaaagtgaaggttaaggcgccgacgaagaaagataaagagaaagtgccagctgaggagcagtcgacggctcaaacgactacgacggcgatagacgctacggctccaacgacggctccaacgacgtagagcccgatgcttgatgattctacgttttatgatgctctgaagcaaattcctgctgaagaaattcaagagaatatgcaaactgatgaggtggaagatgaaaatgaaaaagaagaaccaagtgaagaagaagaatcagggagtagtagtcgaaccttgggctccgattccgattcagaggaggcagagacaaacaaagaactcgcgtgtgctaatcccgtggaagaggcggagagacaagatgacggcctagccgttatcgaggaggaggaggagaggagctccgcgagcgacgatgacgtcaatgtggaaaagtccgtggaggatgagggacacgaggacgagagagacgaggacgtgatagtggaaaaatccgtggaggagaggaccatagacgaggacatcgcaaatgtggtaagtattccatttcgtaataccgatctaattgggtaataatgcaattgtgaactgtggacagtactagtaacattgggaaatgctatgttgatatttaggcaatattggcggatgtgggtaataccttagagtagtactacaattgtgatttatcagtagttagtactagtaactttgagaaatactatatagtaaaataggagtatctgtgttatactggtaattacggggaatacttgtaggaaatacagagtaataatgtggcagtactatttacaattgagtgatatatgaatagtaggatttgtgtaatactggtaattacggggaatactttttggaaatacagagtaataatgtggtagtactatttacaattgagtgatatatgaatagtacgatttgtgtaatactggtaatttcggggaatactttttggaaatacagagtaataatgtggcagtactatttacaattgagtgatatatgaatgaatgtttgtttctttcaggatatggaggaagcgatggcaatgcagccacttggtatgtacttcccggcgttggagtataccaagaagatgaagttagcaacgagatgttatatctcggaggtgttgaagaccttcgctgacttggaacatcctctaacgaatgttgaaaataattattttatggagcatccgagtttcaagcacatctaccacctgccttccggatatacccacaaattaatggggatgtggatgctttttcttcgaacggcatctattgagaagaagaaggaggtttggttcgttgttaatggagttcccatccgctatggtattagggagcatgctttgatctctggtttcaactgcaaggcctatccagctaattatcagagtgctggtaatatgaacttcgccaacaggtacttcaaaaccggggtaattagacgtgaagacgtgaaaaccaagctaatggagatggaaccggctagatcaaaggataggttgcggatggcggtcctctattttctaacaagcatcattgtcgtgcctactaagaccggagaatgggcaagtccaattgatgatttctgtgtgaggtcaacaaaaaatcttacgttttgtaacacatttccatggggc

SEQ ID NO: 166341 - DNA, 1180 bp, Arabidopsis thaliana landsberg
ctctgttgctatatacatgtcgattaatatcttttttgggtttactacagaatacaaaatcatataaagggcagattagaatcttggtgtactgtatggaaaatgcaatcttgaacctaccagataaccaagagcaaatggtttggctaatcgattttcacggtttcaacatgtctcatatctccttgaaagtgtctcgagaaaccgctcatgtgttacaagaacattaccctgaacgcttaggcttggccattgtatacaacccgcctaagatttttgagtcgttttataaggtacatttcaaaatctctctatatgcaagtcattatgcatcatgaagctttttgacataagaggaaattgtttaatatgcagatggtgaaaccatttttagagccaaagaccagcaacaaggtgaaatttgtctactcagatgataacctcagcaacaagcttctggaggatcttttcgatatggagcaactcgaggttgcatttggtggaaaaaacagcgatgcgggtttcaattttgagaaatatgctgagagaatgagaagaggatgatttgaagttctatggaaacaccacagtgtcatcaacctcagctcatttgactaactcagattctgaagtttcagactctgagatgaagtatttggaggacaaagaagatgagactatagagaatggaactttgcaatctcctttagatacaacaaaaatctaaacatgaaagcctgaagttgtagaagcttctggagctataatttttgttgttgttacacaattaagaccagtaaaactgcagattcttaaatgtttcacagaataatacttgtttgctcaaagagtttggtaagaacaacaaacacaacatcaacaagtgtttgacttgaaggaaggaaacagtgacgtgttgaacattatccttcaggtaacagtggttatggcacatatgaatgaagaagaaccggaaagaagaagaaaatcagaagttatatattcttagtaaacgcctctaagttcctaaacttgaggaagagagttgagtagatcaagaactaatctttctagtttacttcaggcacagattacttcactatcctcctctagcttctgtctgtattgagccaatctctgcaaacacaaagaaacactcagaaccattgaaacagagaaa

SEQ ID NO: 166342 - DNA, 1663 bp, Arabidopsis thaliana landsberg
gtcgggaaaatcgccggaaaaatgggttacgggaagcataatcgatctaaaggaggtaattcaagtcgtggtcggactgataatcttgcaaggtaaaatttatctttgcgaattgaggtttagctctgttttcgatttgtcgtagttgagtaattgtgatctcgttgaaatagcagggaagatgaatcgcttcctcttgatcaaggtactgaaaagttggatttttatgttgtgtggtggtcatgtgatctgctttaattgttttagtattacgaccagtaccagtaatgctcttattgggtgattttttatgtagaacctcaggatatagcaccagttccaaaagttcaattggcaatgtgggtatgcatagtttcctttatgttttattcaaagccaatgaaacttcgaagaacaaattgttgcttcagtactcacccctgctcctttttttgtttaggattttggtcaatgtgatgcaaagaggtgcacaggtcgtaagcttgctagattggacttgttaaaagtaagtatcttgagctagtaaaaatatatatgtcctcttttttctaagtgtttcagctgaaaaattcttctgtgatgattttgtaggaattacgggttaacactggattcgggggtgttgttttaaggtatacctctttttactgtatcctagggtcatttgttatgacattggatgatgtttttagtatcgtattttgagtctcatgatattggcagtccagttggtagacaatgtgtttcaagggaagactatgatctgattaaaaggaaaggattagctgttgttgattgttcttgggcacgtctaactgatgtcccgtttgcaaagctgcgttgtactgcacctcgtctttgtaagaacttacgacttaactgataaatatgtatccagatctctaggaaatgtttctaatttcttttatggttgcagtaccatggttagtagcagctaatccagtaaattatggaagaccatgtgagttatcatgtgtggaggctttatctgccgctttaatactatggtgagtccataacatcttctcctaaaacccatccgtctcttctattcgtcatacattatccggtattctaatgtcttactctatctgttttccaatcagtggggagaaggaaactgcagaacttttgttaggaaaattcaaatggggtcatgcctttttatctttgaacaagtaacaaaaccgaagaagttcaacatcgtcacatcatttttgctttttgatcggtgaatacaattgagctatgtgtcttttaacaaggtctcgctatatcgcagggatattctaaaggagtactcaaaatgtgagaatagcgctgagatcatctcagttcaaaattcttggcttactcagcaaactcagatcccaaaacaaccacctgcgctcgaagaacgtaaaggcacatctttttctaatctctctgtcattaccacatacctaacataagctgaaatctcacttgcttcctgttatttcttgttttgggtttagatgttaagaaagatggtgaatctggtgatgaatcagaggaggatgatgaagatggcctccctcctctagagaggaacatgaaccatatcaaattagaagacagtgaggaggaagatagcgagtga

SEQ ID NO: 166343 - DNA, 1576 bp, Arabidopsis thaliana landsberg
tacatgacttcaaagcgtgtactatgcaaaggcaatacatttttcgaagatagctatcaatgttcgtgtcacaatggttacgaaggaaatccctacatacctggcggatgccaaggtacctattaacttctttgaatagagggcttgagtgtactatataaccttatgtgaagtttggaatttttgtgtccgtagacattgatgaatgcagagatccacatctaaataaatgtggaaagagaaagtgtgtgaatgttctcggatcatatagatgtgagaaaacttggccagccattttaagtaagttatataatgtttctgcataagcctttttagattgaaagtgaaaagatcaacttacaatgcaggtggaactctaagctctggattgttgctcctgatctttggtatgtggttgctatgcaaggctaatagaaagcggaaagtagccaagcagaagaggaagttcttccaaagaaatggaggtttgttgttgcagcaacaaacatccttccttcacggaagtgtaaatagaaccaaagttttcagctccaatgacctggagaatgcaacagatagattcaatgcgagcagaatactggggcaaggcgggcagggtacagtttataaaggaatgttggaagatgggatgatcgtcgctgtcaagaagtccaaagcattgaaagaagagaatcttgaggaattcatcaatgagatcatccttttgtcacagattaaccaccgaaatgttgtcaagatcttaggatgttgtcttgagacagaagtacctatattggtgtatgagttcattccaaaccgtaaccttttcgatcatcttcacaacccatcagaggatttcccaatgagttgggaagtccgtctctgcatcgcctgtgaagtcgccgatgccctctcctacctgcattcagccgtctctatccccatttatcacagagatgtcaagtcaacaaatatcttattggatgaaaagcaccgtgcaaaagtgtcagattttggaatctcgagatctgttgctatagatgatactcacttgacaacaattgtacaaggaacaattggatatgtagacccagagtaccttcagtcaaaccacttcacagggaagagtgacgtctacagctttggggttttgctcattgagctcttaaccggagagaaacctgtctcccttctgagacggcaagaagtccgaatgttgggtgcttacttcctcgaagccatgagaaatgacagacttcatgaaattctcgatgctcgcatcaaggaggaatgtgatcgagaagaggtccttgcagtagccaaacttgcaagaaggtgtttgagcttgaactcagaacatcgccctaccatgagagacgtatttattgaactagataggatgcaatctaagagaaaaggtactcaaagccaagcacagaatggtgaagagcatgcacacatccagatcgcaatgccggagtctatgtcacttagttactcttctccgaacatagtcgttgaaaacagctcattctcattggacacaaaaccactaatgcctcacaagacacagtga

SEQ ID NO: 166344 - DNA, 2327 bp, Arabidopsis thaliana landsberg
gaagattgtcgggtttgtttggagaaagctgttaaagaagtgaaacgctgcgtttctttgagagatttaagagctatgaatacagggtgttatcttagatactctgatcataaattctataatggtgatggacatcataaatttcatggtaagatttatcatcttattatttcatcatgttggttttgtgtcaattttggatatgtggattgaaaattttactttttatattttgaccattactcctatttttgttttggtttggactcggctatttttgtgtttctacatttttggttacttaagaatatagaaacagaagaaaaataataatcgaatctctaatttactcaaattataatccaaattcatgtttaggcttttttacgcattaaaccaaaataatgtagtgtttgttttgttggtagtgctttttaacaaaggagtcatcgttgctattgtcttgacaacgtcagcattcgtcatgctcatcctcttggcaacgtatgtcattatgacaaaagtatcaaagactaaacaaggtaaacatttaaatgcatatgtgatgataatgttgaatccatatatcgaaacattcgttttctagcttagaaattataggcatgtgattgcgactttcggtcatctctttatatccgtacccaatccaaaatatttgattagacaatatttattcgtttaaatgatgataattaatattccgattcgctatcagaaatgcgtatgcctaacttctggttgatttacctcctcacgagcagaaaaaagaaacttaggtttggtttcgagaaaattcaacaactcaaagacgaagttcaagtacgagactctagagaaggcaacagattacttcagtcacaagaaaatgctagggcaaggaggaaatggcaccgttttcttaggaatccttccaaatggtaagaacgtggctgtgaaaagattagtgtttaacacaagagactgggtagaagaattcttcaacgaagtgaatctaattagtggaatccaacataagaacctcgtcaagcttcttggttgtagcattgaaggaccggagagtctcttggtctatgagtacgtgcctaacaaaagcctcgaccaatttctctttggtaataaattctccttgagtctatctctagagcattgcattgtttcattaattgttagactatgcttttgtattgcattctatttgatgtttccgctaatagactttgatcggttctatcataaagagaaaagaccatttgaacaacttttgaaagctctagggctaaattgataagaaaaaagaacattaacaaatgtattaaaaatagagtagaatcttataagtgatttctttgtgattttcagatgagagtcaaagcaaggtcttaaactggagccagaggctaaacataatccttggaacagcggagggactggcttacctacacggtggatctcccgtgaggattattcatcgtgacatcaaaaccagtaatgttcttctagacgaccagctcaatcctaagatcgctgatttcggtttggctcgatgttttggtctggacaaaactcatcttagcaccggcatcgcaggaactctgtaagctacttaaaaacactagaacccaaatggttcgaatcactacccaattttcatgtgtcaagctcgagataaatatttgaaactcagttttgtaactttatacagaggttacatggctccagagtatgttgttagaggacagttaacggagaaagcagacgtttatagcttcggagttcttgttctcgagattgcttgtggaacaagaatcaatgctttcgtaccagagacaggtcacctcctacaaagagtaagaatccctacaaaactccgtcattgttatcaaagttttggggttgatatgaatctcaaatccaccattgtttcttctctctaggtctggaacctttatacactgaatagactggtcaaagctcttgacccatgtctaaaagatgagtttcttcaagtgcaaggcagcgaagctgaagcttgtaaagttcttcgtgtgggattgttatgcacacaagcttctccgtcgctaagaccgtcgatggaagaagtgatccgtatgctaaccgagagagattacccgattccatctccaaccagtcctcccttcttgagggttagctctctaactacagacctagagggcagtagtactatatctcatagcaccaatagtactacgacgtttaacacgatggtcaaaaccgatcaagcttcttatacttcttcagaatcttctactactcgttcaatctaa

SEQ ID NO: 166345 - DNA, 490 bp, Arabidopsis thaliana landsberg
  unsure (1)..(490): unsure at all n locations
gatcgcgaggcggcaaatgcaagcaggcgtgttcacgcagnnnnnnnnnnnnnnnnnnnnnnggtcgctgtgcgccgcattttatctgcaggcattcggcgagcgcacgctgcacctcgattgtgacgtgatccaggctgacggcggcacgcggactgccgcgattaccggcgcgatggttgccgcctacgacgccttctcccggcnnnnnnnnnnnnnnnnnnnnnnnnnnnnnccgctcaagcatttcgtcgctgcaatctcggtgggtgtgtatcgcggcacgccggtgctcgacctggactatcttgaagactcggcatgcgataccgacatgaatgtggtgatgaccgacgccggccatnnnnnnnnnnnnnnnnnnnnnnnnnnnnnnnnnnnnnnnnnnnnnnnnnnnnnnnnnnnnnnnnnnnnnnnnnngcaacaaggtattgacgacctgatcgtgctgcagaagaaggcgctcggcctg

SEQ ID NO: 166346 - DNA, 694 bp, Arabidopsis thaliana landsberg
  unsure (1)..(694): unsure at all n locations
tggaaatgattggttctttgtgaggctatcatcctcgcttttatggtttcagatttataggctgngggcttctatcgtggacacttcacttcctcgtgaaacagattcggatttacgaaatagcttcttgaatccaccaactcctgctatagctagacaatgttcaggtgctgaagaaatcttgggaggttctatctacgaccctgcctactacacctctctatttgaagaaagccaaaccaatataaattcacccaaagctactcaggttttttctagtttctactctctttgctttccacttatttgcagtttatattttgttaattcgggtttttgtgattttatcactgagactctatttcgacatgcctgtttactctaccaagccttccatttagaaagagtttgttaattcttgttttaaactatttgagctgtagtgaatgcaatgcaatatactgagtctaggataaactagctagaaggaaactgtgatgatccttctctatctttcagctcttcatttttacgtggttgatgcaaagaacaagatcccgtagcaatgatattttacgactgtaggatatacataagacagtgcgtagtgatcataatgttgtgatttacgacatggaggaagttactcacccaatgcaaattgtgtcacccttgtgtgctttgttcgtaaatc

SEQ ID NO: 166347 - DNA, 2505 bp, Arabidopsis thaliana landsberg
  unsure (1)..(2505): unsure at all n locations
aacgttggattaaaattggtgaagaactcaggacagttctctagaaatctgttcaggtaagctttgtgtaaaatttacaagtttattagatattggtgagtacttgactgttttgtttttgactgcaggcaaagtttgaacttgannnnnnnnnnnnnnnnnnnnnnnnnnnnnnnnnnnnnnnnnnnntgtggaggtccttgaaatcaaggcaagttacaaacattagagaagctaagactaaccaagagaggataacatgcgacccaaaaacatttcttcttttgattggcgtaaatttgtgaagctcaaaactagccaagaatttaagatatgcatttggaatttgtaaatttatctatatacaatagaaattaacattcatctgttaggttgtaagcgatagctacaaggaaagaaggcgcaatcagattccacatactagtagtcgcaggggaatgcttagacttgccgaagacatggtaatagttgtacacacttatattgttcatattgctcagcctttttccaaagtccaaacacttatgtattaactgagatcatttttttggtttagaaaactgctagtgcagacccatctgaagtgacaaggctaaaggtttgggttaagtcacgtactaagaaggatggtacaccagtgaatacgaatgctgctgaaaagattgtgagttgttttgtttcgtttgatttgcattttggcattttgaatcacacttaatattttaaaatgtatcttatgagttttaaaaaaaggcagaagagattgttaacaatgataatccatcagcaaatgaagcacaaaattcactaagccaactgttagggcctgacaatcctcgtagactgagagcaatgggtcgcaatatgaataagaccaagttagcttgtttctaagtgaagcacaagtgtatggctgaaatgcaagagaatcagcttcatctacaaaagaaggtcaatgagctacaagaagtaattgaaaaaatgaagaaccaggttagtgaacttatctatttatatatacagacttaaggctcaattagtacatacgatttgactttgtttttctttctttgtaacagagacaatcagctgaagttggtgaaaactcagctgcaagagtaagttacttttatttgatacttttgatctcttgggcgtaattatatgataatagcctattgattccttatacagagtgtgaaccaaggatcacaacctaagtgtatcttgatcgattgggctggtactgatgcaaccgttgccgagggttgtattatatcttctgatccggatgagatagtcaatggaagtcgcttaggtcctacagatgttaaagtattgattgacactacgattgtaccagaagcatacctttggagacccgtagttaacatggaaattatggagaaagctgttggtcagatgatagcttggcctgttgctatgtgtgttagcctagaggagaagctcaatctagaagacattgcacaggtaaaatgttatatattcagagttaaatgttatatattcagagtcatactaagacattggtttaatgtgtttgacagggaccaagacccacttatggaaacaagtgcaaactactggatttgtctttcaatcccgttattgttgcagaaggcccccggcagacaaaagaccaatctgcattagttaatgggcttcctctcggacctgctgcagtgaaagtatttgtggatgtaatacttcaacctgagacgttcatatggaggccaacgatggatgtgacataccttgaggactgtttatagtcttttgtagcatggcctgcccacaaagtttcctatgaaaacaccacagattcagcagttcagaaagctcctcttcagagttctcaatcaacttatccaacagcatcagcctcaaaaggaaagtcagcagcagcaagtcaacaaaatggagcaacagagaaatctcttggtgagaagcaacaaaatggagcaacaaaaggaaagtcaggtcataattcttctattcaggtatctgcagccaagggttcagaatctgcaggaacaattgcaaaatctcttggtgagaagcaaccaacagtagttccaaagtctcctgtgaagaaaactcagctagcatcacaaacccctctacggagatctccggtaagtttgtctttggtttgacatattgactaataaaatttctacatgcgtttaatcctggtttataatgtaacatgtcagcgccaaaaaatatctgaaggtttgaaggctaatcagaagtgcaagttaatggatataagtggaaagaagcgggtggttggtgcaggacgagtgcattcaatagacccagatcaaaatgtacaccatgttcgtttgggagagaatgcagctagagtttgggtagatgtagtgaatgtagatgatgcagcagtctggaggcgatcagatgaaatcgagtatatgagagatcacttggttcacaattgca

SEQ ID NO: 166348 - DNA, 1153 bp, Arabidopsis thaliana landsberg
aggtatgaaaatgtaaatttgagaataattcattttttatgttattataaagtcaggggtttgcgaaggtgaagatgagacatttgctttttgagttgactatcaataacgtttttagaatggtagccgggaaacgattttatggtgagggcacagagcaagacgaagttgcgcagcaagtgagacatctgatggacgagattgtgaccagcgctggcgccgggaatgcagctgactatttaccaatcatgcgttggttcactaattttgagaaacgcgtcaagaacttagcggttcggatcgataagtttttgcagagtcttgtggatgagaaacgtgcggataaagaaatgggtaccactatgatagatcacttgctttctctccaagaaactcagcctgattactatacagatgtcactcttaaaggaattataattgtaagtattaaggaatccatatagatagtctatatgtaagaacaataatcaaactttatgttggcgaattattgattttgattttgaatttacaggtaatgataattgctggatctgaaacaatagcatggactttagaatgggcgatgctgaatgtgttgaaccatccagaagtattaaagaaagctaggaccgaaatcgatacgaaaatcggttttgaccggttaatggatgaagctgatactaaaaatctgccttatctccaatggattgtgttggagaccttacgtcttcacccggcagctccaacaaatgttccacatagtacgtcagaggattgcatgttggcaggatatgatgttccacgtggttcgatgttattggtgaacatatggtccatgcatagagacccgtctatatgggaagacccagaaatgttcaagccagagaggttcaaaaatgaaaagctaaatcaaaagttgttgtcgtttgggatgggacgacgagcctgtcccgggtatggcctagctcatcgggtagtgagcttggctcttggatcgatgattcagtgtttcgaatggcagagaattggagaagaatatgttgacaatagtgaagacaaaactgtggtcttgatgcgtcctacgacaccgttgctagccatgtgtaaagctcgtcccattgtccatgagattcttgatgcttttgcttga

SEQ ID NO: 166349 - DNA, 1165 bp, Arabidopsis thaliana landsberg
ctaacactgccaaattcatcggttgttgcatcgagggtggaatgcatctcgtgttccggctatctcctcttggaagcttaggctctctcctccatggtttctatatccacccataaacttaacggatatacatatcgggcttttaaggttatcatatctaaatgctcaaattaatttgtacaggaccatcaaaatataagctgacttggagcagacgttacaatgtagcgttaggaacagcagatggactagtgtatcttcatgagggttgtcaaagacgaatcattcatcgagacatcaaagctgataatattcttctcaccgaagattttcaaccgcagatttgcgacttcgggttagccaaatggcttcccaagcaattgacacaccataacgtatccaaatttgagggaacattcgggtaacaatttgaaattttttaggaaaagtttttttttatgtggttcagttgagaatttggttggacaatgttttaggtactttgcacctgaatatttcatgcacggaatcgtggacgagaagactgatgttttcgcttttggagttctcctcttggagctcataaccggacatcctgcccttgacgagtctcagcagagccttgtcttatgggtgagtatatagaccagtttgacatttgaggctaaaccggaccggttcactatccttttatcagtctggtacgagttacgtttcctttttgcttacaggctaagccgttgctagagagaaaagctataaaagaattggtggatccatctcttggagatgagtataaccgagaagagcttatccggttaacttccacggcttctttatgcatcgatcaatcttctcttctacgaccccggatgagccaggtataatattgtaattccatcccggttaaggtttcaaagtgggaaagaaccaaatgtcaaattcgttttggttccggttttgatactgtttctttaaatgtatccaggttgtggaattattactaggccacgaagatgtcgtaatgactccaagagaagcgaagataaagatgatgcaacgaacgtattccgaagaattattagatagtgtagaatataactccactaagtacttgggagatcttgatcgcattcgagaggttgctttagcctcttgaaatcga

SEQ ID NO: 166350 - DNA, 3759 bp, Arabidopsis thaliana landsberg
atgcccggcattgacccaagtataatttgtcacgagttgaatgtggatccaagcttcaaacctgtaaaacagaaaagaaggaaactcggagtggaacgagcaaaagcggtaaacgacgaagtggataaactcttaaaaataggatctataagggaagtgcagtacccggattgggtggcaaatacagttgtggtaaaaaagaagaatggaaaggatagagtgtgcattgatttcacagatcttaacaaagcttgtccaaaagacagtttcccactcccacatatagatcgccttgtggaatcaactgccggaaatgaattgctaactttcatggatgccttttcgggatacaaccagatcatgatgaatccagaagatcaagaaaaaacatcattcatcacggataggggcatctattgttataaggtaatgcctttggggttaaagaaacgcggagcgacttatcaacctttggttaacaaaatgttcaacgagcacctcggaaagacaatggaagtctatattgatgatatgctagtcaaatcattgaaaaaggaaggggtgtcaagcatttagaagaatgtttcgctatccttgaccaatatcaaatgaagttaaacctggggaagtgtacgttcggagtcccatctggtgaattcctcggttatattgttacaaagctaggaattgaggcaaatccaaaccaaattaacgcctttctcaatatgccatctccaagaaatttgaaggaagtacagcggttaagcggtcggattgcggtattgacctgtttcatttcaagattaaccgataaatcattgcctctctatcaaattttaaaagggaacaaagagtttctttgggatgagaaatgcgaagaagcattcggacagctcaaagcatatctgaccactccacctatattgtccaaaccagaagcggatgagaagctctatctatacgtcttggtctcgggccatgcagttagcgggctcttgatccgagaagaccggggagagcagaaaaaaatttactacataagcaaatccatgacagatccggagaccatgtatacgatgatggaaaagcttgcacttgcagtagtaacttcagcttggaagcttcgctcgtattttcaatctcatccaatcgaagtgttatcaaatcaaccgctctgaacaattctccatagcccgaaccaatccgggaggttggcgaagtgggcggtagagttaagtgagtatgatatagagtacaagagccgagtcgccatgaaggctcaagttttggctgactttttaacagaattgccggtacttggagggcaggagcagccagaaaatcagacttggaggttacatgttgatggatcctcatcaaaaaatggattagagtctcccacctcggaaatccttgagcagtcattccggttactattcactgcatctaacaatgaagcagagtatgagcgttcattggtggactcagattggcacaaggagttggagccgatgaagtggtcacctactgtgattcgcaactggttgttaaccaattcaatggtgattatgaagcaaaagactcacgaatggaggcatatcttgaggtggtcaaagacttggccaaaaagtttaggaaattcgaactcattcgcataccacggggagaaaacactaccgcagatgcgctcgcagccctgacatcaacatccgatcccgaagtcaaaagaatcattccaatagagtgtattttggaaaggagcattaaggatgaaaaagagacattcgtcgtcacaagatcccgagctgcagccctagatcgtggtgaacttgctattgaattaccacctgtcaaaaggcgaaagtcaaaagagataattgtacctaagcctactgtgccggaagatattgggctcaaactaatagaagaaatcacccctggcgccagagtcgaagctgaaaccgaaccgtgggttgacgaggacatactagcaccaaatgaacatcccgaaccagaagctcgagtatttcacgaaattgaccaaattccggctaaagattgggggggctgattggagggagccaataaagctttacatcgttacaggtgagctcccaaagaacagatggaaagctaggaaaatgagaatcattagcgcgaaattttggctatcaaagaactctttgtatagacgaggtgtaagtgatccctacttactttgcatttttgggcccggagtcgagattgttatgagtgaagtacataaaggcatatgtagaagtcattcctcgggaagggctatggctttcaagattaagaggatgggatactattggcctactatgatcacggactgtgttaagtatgctcagcgatgcaaacgttgccaactccacgcacctctcatccatcaacctttagagttattttcttcgatctctgccccatacccgttcatgtgatggtcgatggatatcattggaccattgcacaggtcaactcgaggtgtacagtatctcttggtcctaaatgattacttttcgaagtggattgaagctgaagcatatgtaaacatcgaagattcggcggtaaaaactttcatttggaagaatatcatatgtaggcacggcgtcccatacgagatagttacggacaacggaccacaatttatctcacatgaattcgaagctttttgctcggattgggggattaaagttagttattccactccgcgatatccacaagggaacggtcaggtcgagggtgcgaacaagacaattctaagcaatcttaagaaacgattgagtcatttgaaaggaggctggtatgacgaacttcagccggttctatgggcatatcgcacaactcctaggcgctcgaccggagaaaccccgttctcattggtgtacggaatggaggcagttgtcccaactgagcttaatgtaccaggacttcgtcgaacagaagctcctttaaacgaagaagagaattctgcgatgctggacgattcgctagataccatcaacgagaggcaagatcaggccctgatctgaattcaaattatcaacaagcggcagctcgatattacaatttaaaaataaaaagcagccctttctttgtgggtgattatgttttgaaacgcgtgttcgatagcaagaaggaggaaggagcaggcaagcttggcattaattgtctctttaggttttctttcaaagatgtgattccattcaaggtcggagtgattcgcggaacattcacgtcgtcctactcgccctgcattcaaagaatatctcaaaaacgaatatttgaaaaatcaaggaaaattggaaagtttccttaagtgaaaatgggccatggcacaagagtaagtccaaacaaaaattaaaaaaataaaaatctgagttcgggggacatttacagaaagggctcgggaacaggccccttcatcgccggtttggggttcgaggtggatgtctcgttcttgacgtctactttgggttcattcttcacacgcttccaagggttgttgtcctcttcctcgtcgtcaacctctttgctgtcagacggaatcacttggaccggagcgtttacgggaccagaaacttgacctcgagcacggaggtacatccaaagcatgtgcgggatcttcgccacacagtcaaagttcctccattcccattggaagggatctctctccatggccctcaccttcctctcgataccggcaatttaggccttgagcgtttgcctcttgaggcc

SEQ ID NO: 166351 - DNA, 1379 bp, Arabidopsis thaliana landsberg
ttttacagtaacaacatggaagcaacaagaatgggttttggtggtcttagcgttcctctctctctcacgcccaacctctctctcattcctcagcgtttgcttgacaagcacaatctttccctgaaaccggtaaagatacaccacttggtatgtgtaaggtctactaagagtagtgatgatcttgagactagtcgtccttcgacgtacttttctccttctctttggggagatcactttctctctgtttccctcgaccacgctgtaagtgcattcatatgagccttttttcaagaatcatgtcgcagaaaacatggttactgactagccaatttgtattcattttctaggaatttgttgaactagaaagagagattgaaactatgaagccgctggtgaaagacatgctcatgtcttctcaaagcagcgacaaggagaagattcgtctaatccatttgctcgttagcctcgggagctcttatcattttgataaggagattcaagatatccttaaacacagtttcacaaagttggatgacataatagttggggaagatgatttggaaacaatctccatcatgtttgaggtctttagattttacggtcacaagatgtcttgtggtaagagtatatcattttccttgaatcgcatacatgcatgcaacatattaattcgtatattatgtatatgtttacttatatatatgattggctatatatacggttttattgtagacgcctttgatagattcagaggtgatgatgggaggttcaaggagcatctagccagagatgttaaaggaatgctacaaaactcattatacgcacctcgatactgtaacatagaagtactagtggcaagagaatatatatcttactacgaacaagaagatggtcacgaccagatcctgctcaagtttgcaaagcttaacttcaacttttgccagtttcattacatccaagaactcaaaactctcaccaagtgacatactcttcttccatcttgttaataacatcggtctcggtttcaatttttccaattcatttactttcatgcatggtttcagatggtggaagaacttagatcttgcatctaagttaccttacattagggatagacttgtggagtgtcacttggcgtctgtggcagcgtatttcgagccacagtattcactcgcgagaatcatcgtgactaaaatcatgatgatggtgggttgttgttgatgatacatatgatgcatcatctgcaactcttcccgaagttacagctcttacggaatgtttgcagatgtactctctctctctctctcaatgtatatgctctttctttctcttttaattaatgccagcgtggaaaaaaatattggtttgaccaggtggaa

SEQ ID NO: 166352 - DNA, 1740 bp, Arabidopsis thaliana landsberg
  unsure (1)..(1740): unsure at all n locations
atggagagtgattggggaacatgggaggagcttcttctcggcggcgctgttctccgtcatggaaccggtgattggaccgtcgttgccgacgaactccgttctcattctcttcctgagatttttacacctgaggttttgtctcaatctcctcattttctttgactcggagaaattttcgattaaactaatgtcagaatcaaaattgaaatctgtttaggcaatttaagcaaaatttgttatgttaatgtgattaatttttaaaatttaaaaatagaagataaaaggctttaaggcagaacaacagtgttgttgtcggtagatttagaagcatagattcattatcacttgtgtgtcaagaaaggtttagggtaatgtcaaaaaaaaaaatactcttgttagacaattgtaaataactcttatgcttctgttgaactgtgaaacataaccacactgaattcgaagtttcctaaataggttttagttatgcaagaaattagaaaatgtcagtgtggttgtgatatttcaggctcaatgcagacattgtctctctttctgaatctgccaaattctattcttgtttgcagatatgcaaggccaagtacaaagacttgcgaaaacgttatgtgggatgcaagtaaagaattgttttctctttcttgttcttctacactttttcttgttggatactggacttttgtgacctaaaatttaccgtgtttcttcatattcttgtagagcttggtttgaagagcttaagaagaaacgagtagctgagcttaaggcagctttacttaaatccgaagactctattgggttagcatttgtttttttatatttctttctattggcttaaacgttttcatgtcttggaatcaaaggcaaaaccagattgtgaatgttcaattctgtgctatgaaatactgtttttaggtctttggaatcaaagcttcagagtctgaagtcagaaagtaatgatgaatgtcatcaaaacaattatgattctagccgaacgttatcactcgaaccctccccaaaatccgagggcgggggagaatgcacgagcaaagatacatccaaagacttgtcatcagttggtagtttcacacagcaagagctgaccacaacaaactggtcaccggaagctaagtcagaagctccagtggtactagagcaagagaagacgaaaaacctattacacaacgacattttcgagtcagtgtacggaggtggaggacaagtgcttccaagtatgaggaagaaacgaggcaagagaaaacgaattgattgcagtgttggtgtcggtaaagaagtgatggaagttagcgctgtggaagaaagcgatttgttggatacatctgcggatattgctagcatttctaggagtaaagaagttgcttctactagcagcagtcaaagccgaggtcacggtttggctttacccaaggagcttatgaagatatacaacactattgcacagaacgaatgtgcactcgtcttccgtagacggcttgatagccaggtgatgatcatatatagtaatcctttagtctttgcttgaaaccactttttcgcttatctctttctttctttttggtgctaaacagaaaaggggaagatacaagaaattagtacggaggcatatggatttagacactctacaatcaagaatcaacggttgttcgatatcttcngcaaagagcttttagggacttctttggtggcaacatgcactttttttct

SEQ ID NO: 166353 - DNA, 2080 bp, Arabidopsis thaliana landsberg
  unsure (1)..(2080): unsure at all n locations
gaacctcgcatggaagtaatgtctcctggatcaaagaatctacagacttatttagtgaacagaatgttggtttatgtgtaccgagaattttttaagcgtggtgggggggagcacccaattgctgcagatgagctgtctttcttattttctaacttgacagatgcaatcatcaagaagaatatgaaaattattgcttgttggaaggtatctcatcatattattacttccgcataagttgcagcatctaggagttgcacacttgcgtttttttttcttcttttcttattgcgtcatcatgctgatctattacatgtacatacacaatgcagagggataaaaatggccagtcttattggaccaaaaaagatagtttactagaacctcctgagagtgagctgaaaaagcttgtggcaccagagcatgtaaatttctcctttgggttcatttcattggtttatacaccactctgttttccactgtccaaagtagcattaaatggaaagatgcataatattctctattttgttgtcctaggtatgttcttatgagagtatgctagctgggctgtatcggctcaaacatttagggatcacccggtttacattacctgccagtatatcaaatgcattggctcagctcccagacgaagctattgctcttgctgctgcatcacatattgagcgggagttgcagattactccatggaacctgagcagtaattttgttgcttgtacaaatcaggtgggcatcacttatctatatttgggagttagtagtttacccagccagtgggttttatctgtaatttatgttaggaacttgggagttagtcatcactaatcagctaatccgtaaaagtcgtgtcgtgtttattcttggttctcttttatagataagccagggtgatgcattattagttctttgcaaacaagactagaaactatttcagatatatcttctctagttttgttaagaacctttctgaatcttgtcagtggaagtggatttgatacttctgatcagtcatagctcatgcttttgtacttggccggttcaatactcacatgtctgattttcatttgtgggtttgagtaggacagagcaaatatagagcggttggaaattactggggttggtgatccctctggacggggtctaggatttagctacgtcagagctgcgccaaaagcaccagctgcagccgggcatatgaagaaaaaggcagcagccggccgtggagccccaactgtcactggtacagatgctgatcttcgcagattaagcatggaagcagctcgagaggtacacttctttggttcagctaaaaatacttacaagttacccattttcttctaaactattactaaattaaatcccatcgaaaatttgaacataagagatggtttggctgttatctttgtnnnnnnnnnnnnnnnnnnnnnnnnnnnnnnnnnnnnnnnnnnnnnaaactcgatggcatcgtatagctatgatacggaagctatcaagtgagcaggctgcatccggtgttaaggttgaccctacaaccataggcaagtatgctcgtggccagagaatgtctttcctgcagatgcaacagcaggcccgagaaaagtgtcaggagatttgggatagacagcttttgtccctttcagcttttgatggtgatgagaatgaaagcgaaaatgaggcgaatagtgacttggactcctttgccggagatctggaaaatctacttgatgctgaggaaggtggggagggggaagaatctaacatttctaagaatgacaaattggatggagttaaaggtctcaagatgagacggcggccatctcaagttgagacagatgaagagattgaagatgaagctactgaatatgctgagttatgccgactgctgatgcaaggtacatgctttcaactaagcatttgtgctattagcttaaggttcattttatcaataaatcactgactggtgatgcttatgtagatgaggatcagaagaagaaaaagaagaagatgaaaggtgtgggagagggaatgggctcttatcctcccccacgacccaatatagctttgc

SEQ ID NO: 166354 - DNA, 1322 bp, Arabidopsis thaliana landsberg; identical to SEQ ID NO: 55851

SEQ ID NO: 166355 - DNA, 418 bp, Arabidopsis thaliana landsberg
  unsure (1)..(418): unsure at all n locations
ggtccagcaaagatttatgcactcccattcagatgaagagcggttccacatgttaagtttgatcaaatttgtgaataagcgcgaaggtgtagctgttgttccttcaattccggagccgccaagagaattagattccctggagcgcgtttttaaattgttactggagcatgaattgggtgtttctgaaagcatcaacaatgtcgttgatgtttgcctgcaggaaaaggattattccacacacaatttcatgcaatggtatgnnnnnnnnnnnnnnnnnnaagaagcgctggggcgcagtattctggataaattgcgtttgattgacggagataaaggaggtctttatttgtttgaccgtgacatggaaactgcagcagcgaatgctgtcaaagcaggaaccacagctcagaaagcataa

SEQ ID NO: 166356 - DNA, 2228 bp, Arabidopsis thaliana landsberg
ggaggagccagcaaacgtctgcatcttccttggcggatcatggacgcgtttctggtgccaaagtttggatataattctgttaaaagaaagttcaacgagtaagtccactctaatttcctactaagagtgtgtctagtgagtttctagagacgagttttataggtggcttagggtttatgtgtggtagatgatggaactttatagtgatgaattgtaatggtcgtttgcgcgttgttgattgtagaattggactgattgaagtaaattttaattgatactaggcataagagtagcttgcctattcacggtgaggcttctgcaaaaacagctttatacagggaacgattcatgttgttgtcgcagagagtttctcgtgcagagcatttttctaggccagcatttgatgctgaaatgtcgcagtttgagaacaatgaggttggtctacgttttctgtcaaatgtggttgttctcatttttcttttgggttatttttgtgttcaaaactaaactaaggagtttgtactgtgttatgtctagtagatatcttcaatccagtctctgatttctcaaaggggaaggaaatgggtgatgggagtgatatcacagttggaagatggacatttctacctggaagacctttcagcttctgtagagattgatctgtccaaagcaatatcctttttttaagttggttctaaaatctgcaaaaactggacattgcatttcaacatattgtttaatgtctcatgctgataaagacataggaaggaattgcgtttgagttttttgtgctttgaatagttttctttgacaatcagtacaagataacaacaggattcttcacagagaatactataattttggcagaaggcgaaatgcaggttaacggtatctttcaggtaattagaattgaaggtggcaattttgggcctttctctcccccattctgagttaattactttttaactagggagatatttgtataatttgctaaggtgcacattcatagattttacgattttgttttatttttcatgttggggtcaagatattaggctattagctatatgaaggatcatagaacctagtcatgtatagggtccattctgtgacaaaacatacgtacacctgtctccaataaacacttgatcagattgcctgtaacaaagctcagtttttcataatacgttctttgaccaactcatcctcttctaaaagtgtattctcatcttgtggtgaaggtgattacatgtgaatttcctcccttagaagacagggacaaaacactaaaggcgcattctgaatatgatttcttcggaggcggcacactaactaaagaagagacggtaatctttgattcgttgtttgtactcggattgagaattttgtaaattttcaatgcaatcccttacatagtaggtaaaccacactaaaaataatgtgttttttgcctgccaacagattaaacttgcagaccttgaaagacaagcggtgaatgacacatttgtcatattgtctgacatatggttggacgacgaagaggtgagttggtgtaccaagtactctatttagcatcaatattttgtgacattgcttgatcgccacaatatgttgtccgtagagaaggttatgaggaagctggaaactgttcttgacggttttgaaagtgtggagacagtaccctccttgtttgtttttatgggaaatttttgttctcgcccatgcaacttatcctttggttcgtattcaagccttaggtaagggatcattgtagttagaatcttcaattgttaaatgggaatttcttcttatatattgtcgataacctgtgtccatttctttcgcagggagcagtttggtaaacttgggagaatgattggaaaccatccacggcttaaagaaaatagtcggtttttattcattccaggtcctgaggacgcaggtaccatcatcaccaccattactatgtaaataatctttaactgagatccatgaggtaacatgacttataaaatctcatcatatttgacaggtccctcaacagtcttgccaagatgcgctttaccgaaatatttaaccgaagagcttcgaaacattattcccaatgcaatattttcaagcaatccttgcaggtgagttttctatacgatgtgtgaactctctattgctaatcattagattttttttctttttcttttgaattgtgaacattggccagacataatcgt

SEQ ID NO: 166357 - DNA, 1383 bp, Arabidopsis thaliana landsberg
atgacgacgaacaagcaggtcatattcaaagaccacgtgagtggtttccctaaggaatccgatttcaatttcaccaccaccaccgtcgaacttagggttccggaaggttctaaatcggttcttgtgaagaatctctacctgtcatgcgatccttatatgcggtctcgcatggggaaacctgatccttccactgctgctcttgctcaagcttacactcccggccaggtaatgatgataatgtttattttgtttggtttgcatgtgaagaaactagatgcttcttattgatgacaatttggtgttcttgaagacactgagaagaaattgtgtctctcttggttctgtttttttgctatgtctatcgtgttgactgttgttgttgccgttgtgtgttttggtgtagccaatccaagggtatggagtgtctagaataatagaatctggacatccagattacaagaaaggagacttactctggggtatagttgcatgggaggagtacagtgttatcactccaatgactcacgcgcatttcaagatccaacatactgatgttccattatcttattacactggacttttaggtatgttaatctcaacctttttcatagttttgtaaggtggaatcactttgtaaaattttggaaatctgcttcttgatgatacaatgttttgacttgagacagtgaggtcataacctttattatggatttctaaaaaatcttagaaacatatgaatggaattggttataacttcagtctagggtttcaactgttttgtttgttgatctatttcatatattcactctttgatgggtttttgtcttgtcctaataggtatgcctggtatgactgcctatgctgggttttatgaagtttgttctccaaaggaaggagagacagtttatgtgtcagctgcatctggtgctgttggtcagcttgtgggacaacttgctaagatgatgggctgttatgttgttggaagcgctggaagtaaagagaaggtgaggaattgataatcatttccatattttgcttccttatgtttctttgttctccttcaaaagaatgattaattagccgttttacttttgggggatccgctaggttgatcttctgaagaccaagtttgggtttgatgatgcatttaactacaaggaagaatctgaccttactgctgccctaaaaaggttcggtgaactacttatttctaagcgttttatgcctataaatgttagaatcggtttgcataataaagtggcaatacttttcgattgatcttgtcaattgcgttttgactaatctaagagatattctccttttttccaggtgtttccctaatggcattgacatatactttgagaatgtaggaggcaaaatgct

SEQ ID NO: 166358 - DNA, 3068 bp, Arabidopsis thaliana landsberg
atgcaaactgattacaaagcttttgtggagattgttttcgagaattgggaagatattgtccagacctggcacctcgacggttactctttcttcgtggttgggtaagttaaacaatcatatttgcatccacacggtaaaatttggtagcattctctaaaccaagatagagttcttaagaaaatcgaaagttgtgtacattttcaagactattgactgatgatcacttggtaacaattaggatggaacttgggaagtggagtgctgccagtagaaaagtctacaatctaaacgacgcagtctcacggtgcactgttcaggtgagagtcctctaagccttatatattttgatcacacagttagccataaaagctcagtatgggttataaaaaggtggatcattggacgaattcgtgtaggtgtatccgagatcatggactgccatatacatagcactggacaatgtaggaatgtggaatatgagatcagagatatgggaaagacaatacttgggacaacagttctacatgcgtgtttacacaacctctacttctctcagagatgaatacttgatccctaagaacgctcttctgtgtggcagggccagcagcagccacagatgagcgatatgagtggaatggaatatattgatagacttgtaatgatttgctaagtttatattttttttatatttttattttgggattcatgtttaagaaagtcttgaaagagctgtacggtgtaggcttttatcctgcgtagtatcaaattgttaggaacaaaagggttcgtctctgaatagttagtattttactatttttagtcaatattacgacttggtgaattctgaaacctagtgagagtattacttctaaaatccagtatcttttggattttcgtttgtctttgagagtattactttgggaactaacttcttatgatattgtatgttcaaagatttttcaagtcaacaaaatataggtgtgaagaaaacgaaaattgtttgactgcatctttgaacatgttattcaactttgcatttccattaatatttttttctcccaaacatgacacaacacatatataaacgttgtcacatcctcttcgtcaaacataaaaaatggaggtcaaaagcgtgaacaccacggcgatgatacttggtctattttttctaatcagcttcgtcgctgcggaagatccgtataaattcttcgaatggcacgtaacttatggtaacatatctccgctcaaggttgcacaacaggtgatttatctttaaccgtatccacaccaaattatttgttggtttgttaattggatttaagtttgtttaccattttatctactagggtatattgatcaatgggaagttcccaggaccggacatcgccgctgttaccaatgataatctcatcattaacgtattcaaccatctcgacgaacctttccttatatcatggtatatatgtttctttttccttatacaaaaaaaaaacgaatgtctagttttcctttgtaatcaatctcttgcttagagttaaggctgtaagaaaaagacacataactttagtttatttatgtgttcaaattcatatattagatatatatgtcagttgcatctatatggtataaatcgttccgtaatagataacaaccaaaaatttgggatcatatatataatgcttcaatttaaatttagacggtgtatatatttgcatggcgtttatacatgaaattcttagcagaggactcattgttcctatttgatgtctttttgtaaaggagcgggattcgaaactggaggaattcataccaggacggagtgtacgggacgacgtgtccaatcccgccggggaaaaactacacctacgctcttcaggttaaagatcagattggaagtttctactacttcccctctctcggctttcacaaagccgccggtggatttggagctattcgtatctccagccgccccagaatccccgttccattcccagcccccgctggtgattacaccgttctcatcggtgactggtacaaaaccaaccataaggtacgattcccctcttacgtatggcgcaagaaaaggggaaagaaatagtagggcgataaaatgattatattttgttgtcgggttagacttagagaatgggacaaagtgtttgtgtttttaacaaatttggaaagctgcatgcatgatgtatatctgtacttaaacgttgttgcttgttggaattttggaattaaaaattgtaatctctccttataggacttgagagcacaactcgataatggtggaaagcttccattcccggatggaattctcatcaatgggcgcccgtagtggcgccaccctcaacattgaaccaggttttgctttttcacctttcttgtcttgtttattggtgattctctgactgtaagtgttaataagttatgatgtgagtttttctgtaggtaagacttatagactgaggatatcaaatgttggattgcaaaactctctcaacttccgaatccaaaaccacaagatgaagttagttgaggtcgaagggacacacactattcagactccattctcttcgcttgatgttcacgtcggtcaatcttactcggtccttataacagctgaccagcctgcaaaagattattacattgtggtctctagtaggtttacctcgaagatccttattaccgctggtgttcttcattacagtaattctgctggacctgtttctggacctattccagaagcaccaattcagttgcgctggtcttttgaccaagcacgagccatcaagtattgtttcatttttttttattatttttttttttttttgtattgtttcattctttcattgacaattacaatctttgttagttacttagtggtatacaaccgtgtttgagcgggtttgtttgtgtcttataggaccaaccttgcagcgagtggacctaggccaaacccacaaggtacataccactatggcaagataaaagtcactcgaacaatcaaacttgctagctctgctggaaatatcaatgggcaagcatcgatacgcggtgaatag

SEQ ID NO: 166359 - DNA, 2922 bp, Arabidopsis thaliana landsberg
ctttcatcgctcaaactctcccgaccgatgaattcatcaaattcttcaaaatcgtccttgaaggggaaaccctctggaactcattcacccttgattggcttataaaggctaatctcaagctcaaaatgagtccacttggacagctcctccaacttccattgcctcctcctttacctcaaggaacgtcagctcgggcccttgcttcctggcgcaaaacgttttccaaaccgagggctgaggcctgtgaggcaaataagacatttctcatgtccaccatcgacaaaaaagagtatagtaggaccttgctagtcgacgacagcagcgccgagggggccagatccgctgaacgtcatggtggccgttcgcctcgaagaaacaatctcctcgtcgcggctctccttgtcctctccctgaggtggattgagtagcgaaccagtcgctgacttaattcgcaaaaagagagacagaccagcccgaggtagctcttctccaaggagagagaaatcaaaggctcgaactgatcgttctcctaggtcatctcctccacctcgattgatgggtcctcctccccctgtggtcacatctccccctcctcaacttagtggcgagaagactaaccgaggtgtgactcctcgacaggaagatgctgagtctcgggatgctcccctgaaatcaaaaatcgttcttgtttctcaagccaagtcgctttcaggttcggtaaaaaagtttccttttctgacttctgcgttgttcgtggcctcaataacccttgaccccttctctctttttcagctatggaaacagagggtaacgttttccgatgtttcaagacccagaaggatgcgatcttgccgaacttcgatagatggcgtcctacaatccacgaacgctttttacttcatgcctaccattcatctcaggttagtttcatttctatttttctaatcttgatattcctttatgtactaacttgcttttccggatttattctcgatgccaggcaaacagcgaactcaacgacatggttgagcactatgaaggactgctgatttctctgaggagcaagaaaggtcctatttcaaagccattctatacgagaaacgtattcgccttgctgcttttcccgcttcatcctttaaccctcagcacttcgaggagttctttacccaatcatccccttgggtgaatcgggtttaaattgggctggtaaactttcatacctaaagcttatcatctatcggtttcttttatatatatatatcttttgaaaacgagcccgttgagactgccgcactcgaggatcaagtgagcccgttgagctgttctcctcaggatcaagtgatttgaactgttctcctcaggatcaagtgagcccgttgagactgccgcacccgaggtgcctgctacatcgatagggattgttgaacctgatcctgttttgccttcagctccttcgatcgtggatagtgacacggtgatcatcccaaatgatgaaggtgatgtcgggcatgaaccgggagcctcttcagagcaagtccctaccgtcgaaccaaatgaaaccgagccggttgatgttgagctcgagatggctacggattcatagtggctgcgcccacttaaatttgggatttgtcccaaacatttaagaatttgaaatttaatattcagataaatatgttttttcctaaagaggctttttttttgtttgaacaagattttgccttagcaggcttttaaactttttccactataatcctttgagggtattgctaaaatggaatgcaggtttgcaaagtccgcattaggtatttttgaccatgtggttaagtttcgagatttctcggcttatcaggcctttctcttagttagtgagaactgagctcgttttcaacgtgaattccccaactcgagtttagtcagttcggtaaatttgttggacttgggccttaactgttttactttgtatttaatcggcttttcgtccttatacgttgttcgcggcctgaataacccttgaccccttctctctttttcagctatgtaaacagagggtaacgttttccgatgtttcaagcccaagaaggacgcgatcttgccgaacttcgatagatggcgtcctacaatccacaaacgctttttacatcatgcctaccattcatctcaggttagtttcatttctatttttctaatcttgatattcctttatgtactaacttgctttttcggatttattctcaatgccaagcaaacagcgaactcaactacatggttgagcactatgaaggactgcagcttagtagggagcaagacatttgcacctggaagggcaagttttcttcccttgaggctgacctccgctccctctctgattccaaacaaaagttggaggatcaagttgaccttttctcttccgaactcatgaaatcgaacgccgaattgcaagatcagtatcgcagacatgacaaactccaagatgaactctcggttgcccaaggcaggctttttgaatccaaatcggccgcctacaccttgaacaaccagttcaccaaactcgaggcgaagtacaaagcaatcaccaaactttgagatgctgagttggctaagtcggcgtctaaagccagaaatgaggtgaagggtcgcaggatggagttgattcaaggggccattcttttcattcaaaccaagaaggcacgttcagaactagaatctgatatcaaggagcatgaaagcaacctactcttactggaccaaatccacgaagatgatttctctgaggagcaagaaaggtccgatttgaaagccgttctatacgagaaacgtattcgccttgctgctcttcccgctataatccttcaaccctcagcacttcgaggagttctttacccaatcaccccctgggtgaatcgggtttaaattgggctg

SEQ ID NO: 166360 - DNA, 732 bp, Arabidopsis thaliana landsberg
  unsure (1)..(732): unsure at all n locations
aaagaaaagcttccatgnaagcggcgatagcaaaagancgaatcacaagaaagagagtcgtactcggagagcttccaaacttgtccaacatcaagaaatctcgaaaagcccctacaaaacagaagaagaaatcagtttcgattccgacactcgaaatcttaaattcagacattgatacaagatctgatgatccacagatgtgtggtccttatgttacctcaatcttcgagtatcttcgtcaattagaggtaaataaacaaaacccatctctagtttcctagatttcgcaatctgagttagtttcttgattaacacaaattcaggtaaagtcaagacctttggttgattatatagagaagattcagaaagatgtaacttcgaatatgagaggagttttggttgattggttagtagaagttgctgaagaatacaaacttctctcagacactctttacctcgctgtttcttacattgatagattcttgtctctcaagactgttaacaaacaaaggcttcagcttttgggagttacttcaatgcttattgcttcgtaagctttttcttgttttgtttgtttgaatctcttttttttttttgtgggtttgtttatttggattttggttttgaaaaatttgtagaaagtatgaagagattactcctccaaatgtggatgacttttgttacatcacagacaatacttacacgaagcaagagattgttaagatggaagct

SEQ ID NO: 166361 - DNA, 3061 bp, Arabidopsis thaliana landsberg
ttttgatcttttaaggacttggccacgggcgagagtccaaatttcgcaaatttgcccgaatgcatggacaattaaccttaattgctcaaaacacaatagactatcaaggggaaaagatgggcaagtttgggcatgaacgggcaagtttgggcaccagtgggcaagtttgggcaaaaacggccgtgccgcaggcgaagtttgccccgccatgcgttgaccgaccgttgaccgcgcctaggacgcgtggctcggctcacttggggcctaagcaaagttaaggtcccaaagccgaaaactctgcccgaatcgttacacgcattccattgattactgagtgagttctggataatggtttaagtttcataatcatattctcatgcatccttgattgattttgtgagttatatgaatcatgtgaatggttacattggattgcatatgtgatctttagattcttctgctattgtttatggttgagaggttgtgttgaggtattgatgattctatgagtgatttaacaatatgtttcataatatcttaaactttggggtcttggtacgtggtgcttgtggtaggaggcaaacaccataagcgtgccaagattgtgatatgtctgaccttcttagtgaactgtgctatcgtggggtcttgtaacgatgtcacttgatcgccatgaagtgcgaaaaactcggagacacggggctagctaccctggccgagtgtctacaagacggtgtagcattttgttgtgatgctcggttgcatacctttggagtgtgtgtgtttggtgttgggtttgaaggcagcatatcgggccctttaaaacttaataaaactagagtcttaatgcatttgcatgttttgtagttgcttcgacaagctacctttcgttgccattctctgttgcgtgttttgggatggggaactaatatctgtttcaggtagacccaactcactgagtaatgttagattactcatgattctacttgtcttacaggaaaccttagtgggaaccattagagggatgcttaggacgtaggaaagccggtatagagttttgttgctttttgtaaaacttaatagtttttggttcttgattggatttgagcatatatgctcgaggcaccattgttaaaacgttttggttacttggttctacgagaaattatatgttataaaatattattttcatacaaagagtgtgtttcatgcaatattagccttgtctggactgatataactcacgatcatggcaagggctgaaaagcctaaaccgcgttcgtgagggatggttcatgtcggtaatccggctaagggtctaaatttgtttggaacctaagttgggttgtctgtatgagctatcattgtagcgttttcgggttgcccttggcttgtccggccatagagcgaggggggcgttataggcagcccccacggcgaaccttgaagggcccaagagaggcgaggcaaccgcgaggtggatgatgacgagccagaagctgctcgagggagaatcttcacgattttgggagattcagctttttgtcaagacacaacggattcaatcaaagcttatcagaggaaggccggttcaaactgtaactggacgcggttatttaacggaccagacgacgaagtcactttccatgagagcgatactaacggcctgtatcggccgcacaatgatcccttggtcattacaatgactatcagagatttcaatgtcgagcaaattttagtcgatacagggagcacgctggacatcatttttctgacgaccgtgcgagaaatgaagatcgatatggcgcaagtcgtaccgactccacgacctgtgctcggattctcttgagagaccaccatgacccccagcaccatcaaattaccagtccgagccaaaggaataacgaaaatcgtcgatttctccgttactgaccagccaaccgtttataacgcaattatcagaacgccatggctaaatcaaattcgagccgtcgcctcaacttatcatctctgcctgaactttcccacaagcaacgtcgtgaagaccatttggagaaatcagaaaaatgcccgaattcgcttcatggcagcacacaaacttagaaaccccgtcaccgaatcaacagccgacgcaaatcacaagaaggctaagttgggacgagccgaagaaaaagcaatctccgagcagttatagcaactaatgatccgggaatcaacgagaccagtttctgacccagtaatatacgtttgtcttgatgaggagaacctcgaacgatgcgtggaaattggcggagatttgggcgaagaggtgacgaccgagctaacttctttcctcagggaaaacgtcaacaccttcgcctggtcctcggaaaacttgcctggagtaagcgtcaaaatcgtagagcacgagctcaacgtcgacctaatgtttaaacctgttaagcagaagaggagaaagttatgtcgggggctgtgaaagccgaagtagagaaactgtttaggatcggctccatcaccgaggcaaaatatcctaactggctcgcaaatccggtcgtagttaaaaagaaaaacggcaagtgaagagtctgcgtcgacttcaccgaactgaacaaagcctgcccgaaggacagtttcccactgccgcatatcgatcgcctcgtggaatcaacctctgggaacaaactgatatcgttcatggatgcttttgctggatacaaccaaatcatgatgaaccccgaggaccaagagaaaactgcattctacacagagcaaggtattttttgttaccgagtgatgccattcagacgtaaaaaacgctggggcaacttattagcggttcgtcaacaaaatctttgcgttatagatcgggaaaacgatggaagtgtatatcgatgatatgttggaaaaatctatagaagaggaggaacacatagcccatctgcgcgagtatttctggtagcttaacctctataacatcaagcttaatccagccaagtgccgcttcggagtgagatccggtgagttctgggatatctagtcacgcgatcggcatttggatcac

SEQ ID NO: 166362 - DNA, 2885 bp, Arabidopsis thaliana landsberg; identical to SEQ ID NO: 18053
  unsure (1)..(2885): unsure at all n locations

SEQ ID NO: 166363 - DNA, 1184 bp, Arabidopsis thaliana landsberg; identical to SEQ ID NO: 11896

SEQ ID NO: 166364 - DNA, 1067 bp, Arabidopsis thaliana landsberg; identical to SEQ ID NO: 7096

SEQ ID NO: 166365 - DNA, 1866 bp, Arabidopsis thaliana landsberg
gtagacgataagtacatgtactcggtggaaaacaaagacaacaaagtacacggttggatatcgtcggaccaacgtatcggtttctggatgatcacgcccagcgacgagttccatgcatgtgggccgatcaaacaagatctcacttctcatgtgggccccaccactctttcggtgagtacatacattctttttcaaaaaaaaaaaaaaaaaaccaatttctagttttaattgtaaaatgttactaaaaatttaaaataacagaaatgtgatatatggtttggatgattgtgggtgtggcatgattgattcgatgtactattgattttattgagtctacattgtgtatttctgtttatctcttattcaattctaagaatattgtgtgttttagatgtttacaagtgtacattacgcgggaaaagatatgaacacaaattatggaagcaaggaaccgtggaagaaggtgtttggtcctgtctttgtttatctcaattctgcttcttctcgtaatcttctctggaccgatgctaaacgacaggtcttttacctatcaatgaccccattctttcattcgctttaatatcatcatcattattgtttacgtaaaactaaaatgttttagaaactatatatatatatatatatatatgtagatggtttccgaggtccaaagctggccttatgatttcgtgaaatctgtagattaccctcttcatcaccaaagaggaacagtcaagggtcaattatttgtcatagacaggtaaataaatctatgattttcttagaaaggtttacttacaattacatgcaattgtatatcgtcaaaataatgtttttcaatccatatgtgagttattacaaaatgttgcagatacatcaaaaacgtgacgtacttattcgggcaatttgcttttgtgggattagcattacctggtgaagctggttcttggcaaaccgaaaacaaggtagtacactactactatatttgaaatttgtaaatatataccattacattgccatgacaggtacatgcaaaagagagtgatttttgtcatgagatttgtaaaacaaatttactgttactttcatgctacacaatatatatcgtccgtttaggtgatcgaaagtactcatttgctccgatttaaagattgatctatgaattgactatgcggatgaagtaacgatcttttttgccaaatggactaaactaacggcttttaataatcttttacaataaaatctggacaaagggatatcaattttggacacgagcagacaaaatgggaatgttcacaatagcgaatgtgagaccagggacgtatagtctctacgcatgggtttctggatttatcggtgactataaatatgtgcgtgacattaccatcacaccaggtacgtttcttttatttatataacatcttttagtataaacattacacaacatgaaatgtgtgttccgtgtcccgttgatccaactacagacgcattaatggccattatttggtccatatgtttttatgtaagggttataattgttatgtgccacagctgaagatgtaataaggcccattactaggcctaagtatcgtggtgcatataattatgtatgtgtttggtttggccgataggtagggagatagacgttggacacatagtgtacgtgccaccgagaaacggcccaacactgtgggagatcggacaaccggaccgaaccgcggcagaattctatatcccagatccggacccaacccttttcaccagactttatctaaattactcaaatcctcaagataggtaacatattaagcatctaattaaatattatttacaatatacttttattttaatatactaaatggtgtt

SEQ ID NO: 166366 - DNA, 5212 bp, Arabidopsis thaliana landsberg; identical to SEQ ID NO: 35616
  unsure (1)..(5212): unsure at all n locations

SEQ ID NO: 166367 - DNA, 2030 bp, Arabidopsis thaliana landsberg
tacaattatacctttcacccacgaaatgtgaacgcgtccaatgctcaaaaccaatgtccgttaggtaatctgcacatggcccatgcatagctcttatctcggcaaagatttgattgaagtcgcttagccggtaagcccgcgctgcactggcgaccaaataactcaacccctccgacttgaacattgatattatgttcctcttcagatggacaacgcaagctgcgtgggaagacattgggtatacctgcagagttttgacaatctattaggtttagtaaacattcccccataacaaacaaagacgcaatatccgctaattgaattatcggaaacaggtattgttaacttctaaaatttttgttgcggcgttattgctacgaactaaaccacctacacacaaattcatatagaagacgtttgaactaaaatacttgttacacgttaacattagttcgtacgagacagactaggttaagttaactaataacgtttatgttatcgcgcctcattgaatgtaacataattatgtctaggggaataaacgtaccctaaagtcaatttagctagtagataaattatcacttagcgcacatacgtgttatcttctaaacgtaactagttagcagataagttaccttgcgtatgcttgcatatattgacaagtgcctgtccgaaacgaagaccaaatccggatcatctgatattgtgtctgttagcctctccataaaccatgtccacacatcatcattctcgctgttcactatcccaaaagcaatggggaacacttgaaaattggcatcttgagcgctcacagctattatatactctccatctcccataccaaagcatcctcatctcgaatccctacaatcctctctttatctccttcacttccctttcttatcaaaaacttttcacaaatttatttgtttcttccatcattcaatctcctaatctactgaattttggttttgaatttctccaacctttgttcttgacgatgaacaggcgctcgcttttgtcaaagattcggaacaaagctctctccccatcaaagaggtacccaaacacctttcttcgcatgcagcagctcgaggactttcagaaccatcacccttggggtcgagtaggagagatcaagcaagttttgcgatcgatcatagtgaatcaagccaagaggaggaagtgatgcaagaagaagagaccttcaggtctccagctgaaaatactcgatcccgaaagtcgagtaagctttctacaagagaattctcgaggaataaggaagatatcactcaagggaagaagcccgtggggaggaggttggagctggtagttgaagactccgaggaagatatggcttcaccaaaggaagatgatcaaacggagaaaggaggcgatgatgatttggaatcaaagaagtgttcaactcgaaatgaatactacaagctgctaaagcgcaatgagttattaggaactcggtaccctcatcccgagaccatggagagactcggcatctatgatgatgtagactatatgtttaagcaatgcaacctgaatattcacatgtttcggccaatggaggggtatgagaaagagaccattcagtttctttcatctgtggaattgctcttatatggagagtcagagggacgatgaaatcaggccatacggaagtttgggatacctggagttttgtgtgtatgatgtagagtatcggcttccaatagagcatctcgagctgatgtatggatttccaagcggaaaagacacaagtcatcgttttgacaagagagagcttcagtcattcagggccacacttcgtaagtgctctatttgcaagagagcggaatggaacctttgtcaatggggcactagaattgatggagacagcactgcaagagttgcttggtttagcatcggatggtacggttctagttggagatcagacagacactttggtctcattctacctaatcgagcacctgctgagttacagaggatgagctaagggacttaagaaaccaggaaga

SEQ ID NO: 166368 - DNA, 1783 bp, Arabidopsis thaliana landsberg
tgaatgctaagctggattcggttcataacttactcacagagaagaagcatgtccactttgcagctgaggaagagactattgagcctgagcctgagtcaaaggaaggagtcttctacatagatggtcagggatagaggaagtttgggcagccacagggcaactttagtggtaacaggtttacagggaaccaaggttcctccaactacactctaaagcctgctttctaaaagacctttcctcaaagaagctttcagaggaactacggtaattcaacctaccaagccccccctccaccctcaacagagacaagaatggaatcaatgcttgagcagattctggagagccaaacaaagcttgttgtagagtttaatggcaagtttgatgctgtctacacagatcttaatggaaagatcgacaatctgagctctcacttgaagaagctagatgtataggtacctcaaactgctcagtccatcaaaagacaagatggttttcttcttggcaatccagatattaatcctaggaagagcagcaatgctatcttggtcagagatgaagacaatgtatgggaggagctcgacacagaggatgagttggagctcacagctgcagaactagtgtcaattgacacatactagttttgatcgacactgtatggtcatccatctacagaaacaagtcatgaacatcgtgtcgatcgacacactcgaagcgtcgatcaacaattggtacgcactgcaccttatgaggttcatatccctatgcagctcgagtctgtttatgctcctaaggttccatatctgagaaagcgtcattctaagcacgagattcatgatgcaaaatgcaaaagaataatggagaagatcttgaccaccattattaaagatgctttagagaactcatctgctcaacttatgagatatgtcaagcccttggtcaagaatggaatcaactccgaggaagccaatcttctcaccagagatatcagttccatcatattgaagaaggtcaagaagggcaagtccaagagagtagtgatttctgatttcgtggtcctggcatatgatgaagaacccaaggattctcttatccttggtagagcttcactagctacagctggtgctaggattgatgtgaagaagggaaggatatctctcaatatatgcgatgtggagatggagtttggcatggatggttcggaatataaattgcttgtcagtagcattgcaacaaacaaagacacacctctaaggctgctcagatttcaactccaacgccaactatagaggctgctacagctcagcccacagatgagcattacagagagacaatgtcgatcgacaccacaccctcatgtcgatcgataccatcgcgcttcacagacagatgcttctgcacctcttccacagcccacaactgctttagttccctgtgataggtactcctctatctcttatccaactgttactttgattatttctttagactctttgaaatgtgcttcacatgtaaacaagaatcgagattctcgagagcatgtttcttctgctgatcttgcagataacagaaagagtatcgatcgacaaatgatgctgcacggagccgatctgtttacacacccccttggaaggcgagattgcagcataagtctcatgttcctccatccaagtcctgaactctggcaagtcaagctattgactataaacaagcgcttagtgggaggcaacccactggtatggttttctttttctttttcttttattttacgtttttcttttatttt

SEQ ID NO: 166369 - DNA, 5012 bp, Arabidopsis thaliana landsberg
attgcctgtgcgatctaagagcctctgacagcttttttttttttcagtgcggcaagaaggttagagtttattcagtataaaccttgtgacctgactttgatccttgcggataggtcttccagaaaacccttcggcatgctgaaagatctactagtcatgattaatggagtagaagtgcctacagacttcgtggttcttgatatggaagtagagcataaggatcccttaatactgggaagacccttcttagcttcagtgggagcagtgatagatgtcagggaagggaaaataagtctcaaccttggaaagcacatcaagttgcagtttgacatcaacaaaactccacaagggtcaaaagaagatggaaaaacctccggaaatgacagagtgatctcagaagaagggtatgagactgagaaaataaaagagcttaaaaagaggtctgatacgcaagaagaaactatagagaggctagctcactctgttgaggaacttaggagtaagctgaatcagatggagaaggaagctcaacctaaaggcgggattaacactatcccgagaaaaaagttcacttcaagatggtctgaagagatagattaccctctagaagagaaaaaagcctaatttgaagaaaggggaattgagtattctgtcgcacacctctcaagggaagatggtgagtatgatgatgagaacagagaggacttatgcagatcctcactattactcatgttcttctttataagtgtgaggagtcaagctagagagtttaaacactactcacttgggaggaagtcccatgactatccctgtaaataaatgtttcctttcttgttatttttgatttgttttagttgtttttgtggttctcaggagcaaaggaacaacggggagatagagggaaaattcaaagcttttactctacagagggcctagagatcgagtacacagtctagtgaagtgctaaaattcgaaatctttctgttacacctggagaccaaccactcgagtgaggaggtcgagtataggtgtgattttaaaacagaatttctttataaaaaaatatcattttactcgaccaacagaagctacagagtcttacagagagttcattaagtttacagatgattgtaggatttcctgagattttcctagtgaagatagagtcatgattcaaaacaaagagacagatgagggacccactgctgctgccatgtctcccacgctccctacaaggtgataacgaaatctatccccttcttctctccatcacttgtcttcaacgccatcatcatccatccatcaccactcgaccccatcactttctctcttcatatattcgacctcttcttctcattcttgcatccaaaagacacaacaagccgccatctctttccctcacaactctcactcgaccaccgcccgctctctcacttactcggcttcatcgctctcatcgccatctctcaacatactcgacctcgcgatatcactcgagctcgccgcttctcaccgcctctccatcgtcaccgcctgctccctctctccaaggaaacaactcgagctctccatttcactcactcgacctctaccaccaagccggcttcaccacttctagctcttaaccactagaccaccttcaccatcaaccaatcaaatcgttttctcctccattaaagcttgacatactcaaccgctgaacacttatcaccttcaagctcctcatctcttcatcgtttccaacaccgctgctctcatcccccacgaaagcttgtcatcatctctcactcatcaccagttcactcgattcagcaaccaaactcgacctcgtctctcttgcctctcatagtcactcgatctctcctcaccatcttcatcatctcccttactcgaccaccgtgcgtctcgctccaccatcgccatttaaaagctcactcgattgtcaaagacaagaagagtgaagctcaaccaccgccactcgaccgcgtttccctctacacattcaacactcgaccacggtgctaccatctccacacccgctcttgttcaccatacactcgaccaacaactctcaaagtaaaaaaaaaaaagaaaaaaaaattccaaaccgacagtttcactcaaccggtttactcgaccggtacgctggtttagattgtgtttttggttttgctattactaacatattaacgtttatctttgagtttcgtctgttttcaggtttcatcatgagtaactacagtggaaaatcctctatggaccctgattataatgtggatgaagctaagtcctggtccactagaccggagtgagagcaacatgtttacgagagctatagggatgaatttgaacgctctgcagctcgacgtaatcaaagaagagctgaaatcgctagaggaaagagggcgatgtcgagtagatatgagctgattgatgaggatatcaaaactgagtatgagccagagtcatggcgcaaggagacgaagctactgaacaaatccgacgaggttacagtggaggagtatatcagattctttgagatgaatgacttctggggaacgaggtatccctgctatgagactttagccgagttgggttactggaggacgtgcatcatttgttcgagaagtgttatctggagacactcatgtcttaaccttacgtataaggaggagacaattgagtttctttccacactgtaagtagagatgtatgagggtctcacggactttgagctggataccatggggttagggttcttgacgttcttagtggatgaatagcggtatcagctttcgatcaagaagttggaagaactgtttggtttccctagtggaaagggaaccaaacccaggtttgacagggaagagcttaaggatttgtgggccactattgggaacaatctactgctaaactcggcgcggtccaagagcaaccaaatccaaagtcctgtgatccgctactttcagcgctcggttgccaacgtttttactccagggagtctacaggcaccgtgtctaacacggacatggagatgatagatttcgcgcttacagggattctccaccgtacaaagggaaagaatgtcttgagaggcgatctcaacaacgcaccaccagtaatgcctctgttgatccatctgtgtggatacaggaagtggccgttgacgaacgacaagaagaaggtgagagcagcactctgcgtgggtggcgttgtgtcaccaattctggaagcttgtggagtaccgctcaaggaaccagggttagcaccgaggatgatggacttggatcatttgcgccgatgtgaattcttggagtatgacatggcaggcgacttccaccgctacaggttcgagcattcatcgattagaatcaccaacattcttctcccctgcattgacgctactagattctcgagggaaggaacatcgacttcaagcctgcgcttgaagatctttatttcgagggcagtccgccaactgaggaggttagtcacaccgaaggagctacaacagaagatgttgatgagacagatgatatagatgaggcggattttggcacaagcatgtatcatttcagcgagcatatacctccatcaagggaaagcaagagtttgagcgaagctccgttcattcttcgactgaggtaagcgcctcacttcaccattgtattatatcatctgttgtgatttgttcttcattttgtttctgtgattggatttgtcctgcgtactctgttccaagtttattcacacaatggactgtgtgatttaagtttgggggagggctcaggaagtgtgtgttgcattgtgtatatttttgagtctgcattcatctaaggcatagaataaccaaaaaatttgaaaaattcagaaaatgatttcacaaaaaaaagagtgttcatgtagttgaattacatttaggatcgagtctagagtgtttcatttaggattgttgcatatgcataggggataatgatgagatagccttgtaagcattttggttcatcggataaactcagtgccctcgttgctagttgtctgttgcgtagtcaatgaatttgaaataaaaccgaaccatgcctagattgctctactcgaccacactgtcatgatctgataccattccctatcaattggaacctgaatctgatctttaattatcatgtctgcatcaaatttgaactcatggataccctaaaatacttggattttcttattcattttgatcactcttgttaatccaagtagctggctctccttagtagagcggttaacccaaacccaaacctagactttctttcaagccctatatcacttgtgagtgttgtagaggtcttattccgattaagcttggtagaaagtgttaggttcgtaacgacagagatagtgtctcatgtagttctagttcggatttttcggactagataggactaggtgggtgcttatactttgggttgggatgtgtttaaaagaaaaaaaaaaaaggggaggttgattcattgatgagaaaaggtaaaggactctaggtgaagtaagctaaaaaaaaagcagaaaaagtctagtaaaggttttgggatttgtaaagaaaagaaagagttcttgttagctattgaagatgggcaaaagcccttggttttaaaatgttaaaaacaggaaccttagttgttaaagaaatccaaatccgctagatatatcaaggtgttgaagcttcgcctagagttaagagaaaagaaaagaatgattagaaaaagggcttaaaagattcatgaacgcaaagggtagagtttagttcttgtattgggattggagataggattaccattagagcttcatttgatgtactctgggtagatgggatcttatctctgtatgcatagattgagacttacctttagcattctactaaagcttaatcattttttgagagatcccctgttactaaagcctattctgtaagggaccgtcttggtgtcttgtcctttaacattaaccgaacccgttcctgtttgatg

SEQ ID NO: 166370 - DNA, 2062 bp, Arabidopsis thaliana landsberg
  unsure (1)..(2062): unsure at all n locations
tgaatgctaagctggattcagttcataacttgctcacagggaagaagcatgtccacattgcagctgcaaaagagactattgagcctgagcctgagtcaaaggaagaagtcttctacatagatggtcagggatacaggaagtttgggcagccacatggcaacttcagtggcaacaggtttacatggaaccagggttcctccaactacactccaaagcctgctttccagaagacctttcctcaaagcagctttcagaggacctatggtaattcaacttaccaagcccccctccaccctcagcagagacaagaatggaatcgatgcttgagcagattctggagagccaatcaaagcttgttgtggagtttaatggcaagtttgatgttgtctacacagatcttaatgggaagatcgacaatctgagctctcacttgaagaaactagatgtacaggtagctcaaactgcacaatctatcaagagacaagagatttttcttcctggtaatcctgatgctaacccaaggaagagctgcaatgccatcttgatcagagaaggagatgatgtgtgggaggaattggacactgaagacgagttggagcttgcagttgcagagatggtgtcgaccgacaccctcctgtgtcgatcgacaccatatgggacgcttttctcagagacgactcaatacgacggtgtcgatcgatacccatctagtgtcgatcgacactagatccggactgcaccttgtgaggtgcaagtacctatggagcccgagcccgtttacattcctcctatcccttatccgaggaagagtcgttctaagaaggagattcatgctgccaagtgcacagccataatggagaagatcctccatactcttcataaggatgcttctgagacatcttccgcctcactcaacaggtatgtcaagcgacttgttgacaaaggaattagcttagatgaagctaagctacttaccagagacatcagtgcaattatgctgcctaaggccaagaaggagaaggtacagagagtagacatagctgagtacatccgcaccattactcctggttagaccactgagaggcttttagatccaggtagctttgttcttgattgctctatctccacaagcagattctgccgctctttgtgtgatctgggatcaagcattaacctcatgcctaagtctgttgctgagagactaggcatgactcactacaggcctactcgcatcactcttctcttcgcggatcgttccaagcgaatccctggaggaatctttgaagatgtttctgttaaggttggtaactccataatccctgctgatttcgtggtcctgggctatgagaaggaactcaatgatcctcttatccttggaagagcattcctagctacagctgctgctaagtttgatgtgaagagaggcagaatctttctcaaggattgtgattcagagatggagtttggcatggatggttcagagcttactaagcccatcaggtgcattgcctccagcacagacacacctcctcagactgatcagaatcccaccacagagccacacacaacgctccaacacgttcagctcgccaatgacagttgcagaggaacggtttcgatcgacaccactatccctgtcgatcgacaccctcgggtttcacagacagatgattctgcacattctcttcaacccacaccacttaaggacctatgtgataagttctcttctctctcttctcctgttttatctttgattaattctttagattattcgaagactgcttcactagataacaagcctagagttcctcgaaagcttgtttctcctgttgtccttgcaggtgacgtgatgagtgtcgatcaacacacccctgagtgtcgatcgacacctgcagctgccccaaccagatctgagtggcgagnaggcatcagcaatcatccaccactccacccacatcctgaactccgccaagtcaagctatagactcaaaacaagcgcttagtgggaggcaaccaactggtttgatttttcttttcccttacttttattttcttttatttt

SEQ ID NO: 166371 - DNA, 728 bp, Arabidopsis thaliana landsberg
aacaactagtaaaggattgaaagctttaaaaagaatggccagaaaaatcaatttcccatcaggttataattttataattttttaattatagatgcaatacatattagttaatattattatttttcttaagttggttgttagctttcagtaggatcaccggacttcttaactcctaatcaattgtttggggtagattactctggaaatgtcttatcggatataacaaatatctctggagaatccatcgtctctaccattagattaatgtccaataataaggaaaaagtatcaaatgggcaaggttcgatttatatttgaaaattagctatttatattatgtcccagcatgtttggctaacttctaatagtttaacacacattatatcattacttcctttaaaaaaattactattttggtttgttgattgttaggagtcccacattcaacacaattacagtccaaggagaattttgcaagctttttatgtgccaatctgctcactgacgaagaacttgatcattctgaagcaatatattctgatagtggtataatgttaatcatactttttaaaattgccactttatttcatcagtgtaaaattgattagtttgtgctactttcatgtcatatcctgtctacagataggccacatgaattcgatgatcatatatttgactgtagtagtcaagaagagtatgagtcggacaaagattcaccgagcgattag

SEQ ID NO: 166372 - DNA, 1336 bp, Arabidopsis thaliana landsberg
atggcgtatcattcgattccgagctctgggtttcattacttgaattctccttttggtgacacaacctttactaaagtctttgttggtggccttgcctgggagactcaaagcgagactcttcgtcggcatttcgatcaatatggtgatatccttgaggctgtcgttattactgataagaacactggtcgatccaaaggttatggctttgtgagtatcctactttttgttcatgctttggtttctaatatctgaagttggtttattatactgcttgtaataaacattctctgcttccatggtatgcttatagattattgggtactaaatgttgctttagattggtgaatgatctgcttgacttatgatttctagttctttgaataaactcaaagaagttgaattcgaaaatacgtgttttgatgaaacttttgtctatctttgctaattagaggagtctctttcatttgtttgttctgatgtatctgttggtttatgttcatgattgtagaatgacttaccgctatgtttatgatttgtatggaggatttaggtgactttccgagatccacaggctgctaggagagcctgtgtcgatccaacacctattatagatggcagacgagcgaattgtaatctcgcttctcttgggagatctaggcctccaatgcaatatgcagtgataccccatgctcctggtcagtcttacttcagtattcatctattcttttcttcgcattacatacagagacctttataattttggtgaagtattcaatttttcaaggattatgaccgtgttaaccttgaatcactgcattgcttcttttatttggttaggacgggtaagacctccttccccatatgttggaagtgtgcagagtcctcgcggtttgcattttggaagccatccgtatcaccaaccccctacttataactaccaacaaggagtggtgtacccttatgggtgagttatgcaatttgaagctcagaacatttcgttgctattgtaaatctgctataacagacaagctttgatgagtgtatcagttctaatgttctacatgctagaccttcagtcactttgatcaagtggcatttaccaatcacatcatggacaatcatctagagattctattgcgttaggggttgtatcttctgccacttagggttcttgagtgtagcactatcatgtgacatgttgtgattggtaacttgcaggaataccaaaatataattggtgaggatatgtggccgagctcaatttgttttggacaggcaaggtcatgaatgttttttgacttgatagggcaaaattatctagatttttggatggaca

SEQ ID NO: 166373 - DNA, 1997 bp, Arabidopsis thaliana landsberg
tttgctggacgttagtattgaaactaatcgtttttttttttatgatttacagcaaggaccaaggaagttactctctcggagacggaacttgagctgttaacccttctccgacgtggtcagactgactggtccactttcaccagaaatcgcatcgtagctgctcttgccgtagctccagcagttcccgtagctccagcagttcacgcaatcgttcctccagaagcacagctagatccaatcgaagaggtttcgcggattgaaccggttcccgaagctaacctgcctataggtacgagttccgctatatatatatatttttttttttaaaagtacgagttattgagacagttgcgcaacttgaattggttactaacaaatgtcgtgctctatctactcagttcctccagactccagctccacttcagaactcccgctcatcagaagaatgaggcgtccaagccttcgtgttcaacgagtcaacgcccgggctcccgctcgtgccggtgatttatcagttgcggtgactgcggctcgaaacactctagctgtttccagcgcatctgcctcagcatctcatccctcgcttcctgagctcaacatcgggacctcagctacagcaggtcaatcggataacaatcaggtcgctcaggtatttaggccatctgcagttgttcgtcctgatggtgcaccgtcctctccgaagagggctcggacacagccggaggtgaatccggcggctgagttggtcgtgagcgatcagagggtcgcctctcctagagaggagaggatggaacctgcggctgctactccggaggcagctgcgtctgcggctagacgatcctcgggcaggtcccatggcggaggacgaggctccagaggtgggggccggtcttcaaaccggtctcaggaagtgaggcagacgtccaactccggcggaggatccgcgggaagcaggcctttccactggtctttcactcacgaccgtgatcacccgatcgttgaggacgaggctgggttagcgaacctgctttgccacatcatagggaggaactgtcaggttcctggagtgaagaacatggccgagacggcggcctatgctgacatgatggcgaaggagggccatgtaattatcgataactgtctccttctaattccattcttatgctagtcgtaactttctgttttgccttcggtaggcgatagctgccacaaacaagctggtcgctctctatgagcaccgtctaagccaggtcccctcagcgaatgagctcgaagaaggaaagaccctcatccgggagctgacgtcgactgtgaaggctggtcaggatcgcgaagtctcgttccaggtatacctcggttttgatttgtttgtatataatttgtcgatgattcgatgattctgatctgattgttatttcaggtggagatcgaaaggctgaaaatggagctatccacttcaaaagacctcgagaaaggttatgatgagaagatcgggttcatggagatggagatcggggggttgcaagccgacaagcggacggcgaggaaccagattcatcgcttggagcagaggagggaagagctctccaaaaaggtgatggacctgacttcgactgcacaaggggcgaagaaggcggttcacgatgctaaggttgagttggctgctgcgtattcgaagctgctagctggggtcaaggagaagtgggttgccaaaaaggagtacacggtactggaggggcaagcggctgaggtggaaacgaacctggctttgatcgaccagatcaccaagactgctatcgatctgaccgtggagaaacctcggctgcaagcagagctggatgacctagaggcgcggtgcaaatcgaaggaggtatcaaactttactctaagcaagttggatctctcgtaggtttcagagcaacaaagacgcgtttccgggaggtctcgcggagggttctggtactgtcttcgctacgccagccggagaatcgagggag

SEQ ID NO: 166374 - DNA, 772 bp, Arabidopsis thaliana landsberg
aacgaaattgttgatcctacaaaagtttggatttttgacagcatctgtggtaggttccgggaagcaccttttctgccattagagctattttaccggaactcggcactcgtaagagaccgacttgtatgtctttggaacgccattggagtttcatgaatgtctgcgagaacgttatcaagtatatggaatcaggttcgatctcctgtcccaaacgtggtctcgtccgttcaaaacaagaatgaactattccacatcaactcaatccgttgataagaacatttaccttttgacatcagaagaatgtgtacatcaggtgtacaacattagtaaaggtgtattcacttcttatagggagccttataagtctgctattggttcgacgacatggacaatgactggtgtttgtgtgtttgaaaacgtcttttactcttatgatgctgagtatggactgttttggtatgacaccaagcttgataagtggaacgctgttaaaggtagcacgatgggaaggattgaggattttcagcttgggaagacttggtcaatcgcacttaaagaatattacggaaagctagttctgttgtggacagatagggatcataacccttttgacccagaagtaattgctgaggatgctaggatgacagttcggtacacaataattgctctaagaaggaccgaaacagagatttatggagaggtcgaggaaattagagttttgggcacattacctcgccggtatagtttgggacattgtgtgtcggttttggtc

SEQ ID NO: 166375 - DNA, 868 bp, Arabidopsis thaliana landsberg
cgccatccgaaacacaaacgctaacgcggccgcagccgcaaactcacaaaactttacttcagaggccgccgccgcaacttcaatcacagactcaaacggcgcctcctaagtctgatttgttcaagtgtagcatctgtgaaaaagtgtttacttcgtatcaagctttaggtggtcacaaagctagccacagtattaaggccgcgcaacttgaaaacgcaggcgcagacgctggagaaaaaacgcggtcaaagatgttgtcaccgtctgggaaaatccacaagtgtgatatatgtcatgttctgtttcccaccggacaagccctaggtggacacaaacgccgtcactacgaaggccttctcggcggtcacaaacgcggtaatgacgaggctgttctcaagttgagtcccaatagcaataagagcgttgtaacaaaagtgttagatgcagaacagagtttaagggcaagtgacaacattcacaaacgcaatcaggacgaggttgttcccagcagagacaagtggagtctcagtaatgtgagtgttgttaaaaatgtgttggatctaaagctgagcctaggggaaagtgacggcggtcacaaagacagtcaggacgaggttgttgttcatgaagacaagtatagtcctagtagcaatgggagtattgtaacaaatgtgtccgatccagagcagagcgtaaggagattgatagatcttaataacccgccttcactcgagtttgatcaatctagaggcggagacgtggaggaagttgaaagtgcaatgatattagcaaagcagccttgataagaaaaatgattttttcaattctaattgcattaagggtcttaatttgtgattttgattttgat

SEQ ID NO: 166376 - DNA, 1627 bp, Arabidopsis thaliana landsberg
atgcaacctctgaacactttcttcggtcccgctgagtttacaagaccatttaagatttctgcgaagtgttatgttgcaaaggcagtgagcctaataggaggtcatctcaaacccggtgagttggattggttcttgttgcacccacagttcaagcatttcttccatatgcctaaagactcaaatcatatgttgatggatatgtggatgctcttgcttcgcacaacgcgtttagagaagaaaaaagaatgttggttcatagtgaatggggtcccaatccgcttttctctcagagaaatgacactgatttctagattaaactgtaaggtatttccaccttccatggaaggattggggagtttaacgtttgtcgggaagcactttgggcttgggtcaacaataacatatgcaaaagtcaaagcaaagcttctatcaatgaagaaaccgggaacagagcgtttgaagatggctgtgttatacttcttgtgtagcataatcatagggaagaaaaaaggagggaaacaagcaccctcggtaacacctttctttcttaggatcgtggatgatcttgatatatgtaagacattcccttggggtcgcttggcatttgaggagaacatgaaagaaatctttcatttgatggaccactttggtggagttgtgggcgcaccatgggtctttcctagttttgtaatacctttggaggtaattacattttgaaattgtacatattagtataacttgcttcatctaaattttgatgatcttatgttttgtgtagtatcttacgtttgaggcaattcctgttctgaagaaaactttccaagaaaatgttagtaatgcacatgcacaccgtaagtgtccgcggatgtgcaagatgaaatttaaagcaagcaaaatgaaagggttttctttgagggaaatttatgactgccttggaacaactaaggtaattttgttttgaaattgtatacataagtgtaacttgcttctatattcatcatcctatgtaatttacttatcattatcactctttttgtataattggttttgttatttacaggacattcatagtatcttgactccatcttctcgtgagacacatcttctagaccgtatcacggatgtagataatggttggaatgatgtggatgatccaattgctgatggttgaaccaagcacttaattgaccaagagaggtcaatatggtttgaggagctttataaccaagatgtggctacccgggaaattgagaacgaggctgtagttgatgtggaacctgataatatgactttggatgatggagaacctaataatgtggatctggatgatgaacctttggatgatgtggtccaacgagtttggctcagctaggagacagatttcttcaactagaagaccgggtgaataagaggcttaaggaaatcattgagaaatttgatggcttggatgacagactcaaatctgtggaattgtatgtgaaatgggtaagaggtgaagaaggttatcctatttatgaagaaactaggcagacacaagcacaagtaccagagagagactttgaacaggtcaagctgagaaggaccaggcagagatagagcaggcggagaaagacatgttgagaaggaa

SEQ ID NO: 166377 - DNA, 599 bp, Arabidopsis thaliana landsberg
gcgaccgacctgggcttcatgcggatttcacagagctcctccgcatgcatttgcaaatgcccaatgcgtacaacaacgaaacggtcgacgaaaccagcaaagaggacgactgggcgcagatcaaggtggcggtgatggaagcgctccgtaaatgttctgtgttccgtgagcaggaaggccgcatgactgccgacaaattcgccgaatacatcggcaccattcagaacctcctcgaccaggtggccgaacaggacaaaacccgcattcccgccgttcgtgagcgcctggaaaagcaagtaagggacctgctgaccgacgacaatttcgatccgaaccgtttcgagcaggaactgatttattatgtcgagaaattcgatatttcggaagagaaaatccgtctggcaaaccaccttacctatttcatcgaaacgatgaaagcttcggaaagcaacggtaaaaagctcaatttcatagcgcaggaaatcggccgggagattaacaccatcggctcgaaagccaacgatgctacgatccagcatttggtagtacaaatgaaggatgagctcgaaaaaatcaaggagcaaacgatgaacattatc

SEQ ID NO: 166378 - DNA, 1855 bp, Arabidopsis thaliana landsberg
tagctatacacgccatcaaccgcaagtttcacttcagaactgcgcgttctactcctaagtttatggttctgaaatgcatttccaagacctgtccatggcgtgtatatgcatctaaggttgattcttctgacagctttcaagttcggcaggcaaatcagagacacacatgcacgattgatcaaaggcgtagataccaccggttagcaaccactcaagtgataggcgagcttatgcaatctcgctttcttggtattaaacgtggtccaaacgctgcagtgattaggaagttcctacttgacgactatcatgttagtatatcatattggaaagcttggcgagctcgagaggtggcaatggagaagtctttgggatctatggccggtagctatgcacttattccagcttacgctggactccttcaacaagcaaacccaggcagtctctgctttacagagtatgatgatgatcctactggtccacgccgtttcaaatatcaattcatcgcattcgcagcatcaattaaagggtacgcatttatgcgcaaggtcattgtagttgatggaacatctatgaaggggtgatatggtggttgtctcatctgagcatgttgccaagatgggaattttcagatcttcccactggcttttggaatcgttaacagcgagaatgatagtgcatatgaatggttttttcagcggctaagcattatagctccagacaatccggatttaatgtttatctctaaccgccatgcaagcatatacacaggattgagtaaggttagacacaaccatccatctcacgttgcttcatatagtatacatatatcgatttacttaatctgccaataagctggttctattttgattggataatgaatgatttccctaatattgttgcaggtctatacgcaagccaaccttgctgcttgcacggttcacctttggcgcaatattagacatctatataagccaaaaatcctctgccgcctaatgtcttaaggtgcacaagcttttcatgtcactgatttcaatcggatattcctgaagatccaaaaattaaacccaggatgtgctgcatatttagttgatttgggtatgtgtgtttctcagcttacatatattgatagtaacgtggcaaacttgaagttgactccataaccatgtattttgtaatttgtataggtgttcagaatggaccaatgtgtattcaaaaggtaggcatttcaatattatagatagtaacatatgtgagtcttggaacaacgttatcacagaggcacggggagtacccgctaatttgcatgttggagtacataagaacaatgttgatggattggtttgcaactagaagggctcaagctgaagactgccctacaacattagctccaagagtgcatgaaagagttgaggaaaacaatcaagctgttatgtcaatgtctgttaagcctatttgcaactttgaattccaggtctaagttcggactagggaatgtttaattgtcatattggacgagtctacttgtttgtgcttggaattgcagggtttagggatcccttgtgctcacgcaatagccagtgctgctaggcttggcgtccatacagattcgttagaagcaaacaaatattttaatgagttagtgaaactaagttacgatgagaaaatctatcatattcactatgttgcttcagaggtcgcaacaggaattgctttaggaactacaggcgagctgcatccatcttttgttcgtcggccaccagggagaccaaggaagatacgaatattgtttcgtggtgaattcaaggctagttcctaacggtaaacagtacaaagtccattatagtggttaaaagct

SEQ ID NO: 166379 - DNA, 4721 bp, Arabidopsis thaliana landsberg
  unsure (1)..(4721): unsure at all n locations
atggcaccttatacaattccacccagttctcaatatttccaactgtttcaccattactctttaccaacaaaactacattctctagaaggaagagctagttcgagaattttttatctggtcaagggctggtcggctttgtcattggttctatctttgctctgacgcaaactcggactgctactcacaacagtgtcacctttgaagaacaaattcaggagttttacacttggcaccaaccagaccaagttgttaagtcttggttacttggttcgtttgctgaagatatcttaagtgtggtggtcaactgcttcgcttctcatcaggtatggatgactcttgctaatcactttaatagagtatcatcctctcgcttgtttgaactgcaaagaagattgcaaactctggaaaagaaacataacatcatggaaacttttctcaaagatctgaaatatatatttgatcagttagcctctattggtaaccatgttccagagaaaatgaaaatcttttctgctttgaatggtcttggaagagagtatgagccaattaaaacaaatattgaaaactctgttgactctactccaagtctttctcttgatgaagttgcttctaagttaaaaggctatgatgaccgtcttcaaagctatgtgactgaagcatctatctctcctcatgttgctttcaatgtcactcactcagacaatggctaatttcgcaacaacataggaaaagaaaggtcaaactctagccgtggcaggagttcattctcgactagaggacatgattttcatcaacaaattttatcttcatctgtttctcagtcggaaaactcaagtgtggtatgtcaaatctgtggtaaagctggtcaccatgctctgaaatgttggcataggtttgacaacaactatcaatacgaagacttaccaatgactcttggtacaatgcgcattacaaatgttacaaaccatcatggccacaagtggattccagattcagcagctacagctcatgttaccaataatcaccaagttttgcaatagtctcaaccctatcatggttctgattttataatggtagttgatggtaacttcttgcccattactcacactggttcaggtagtattgcttcctcttcaggtaaaatacctttaaaagaagttcttgcttgccatgatattgctaaatctcttttgtctgtttcaaaactcacaagtgactacccgtgctctattgagtttgatgttgatagtgttcgtataaatgataaggcaaccaagaagctgctgataatgggaagaacacttgaaggtctctactgtctggaggatcctaaaatccaagtcttctactccactcgtcaaaactctacaagtcttgaagtttggcacatactaagatgcgcaatgctctttttaagatgcttactaagatgttagtgttactcttaaagcaagttattggaaagctaattggtccagcacaatctagcttcatcccggagaggctcagtttagacaacattattgtggtgcaagaagctgttcactcgatgagaaggaaacaagggagaaaagggtagatgcttttgaaactggatttgaagaaggcatatgatcgtattcggtgggacttcctggaggatacgatacgggctgcgggtatggaggagagatgggtccaatggattttgcaatgcatcactggtctgtctatgagtatcctttggaacggagagaagactgctagctttaaaccgtcacgtgggcttcgacagggagatccattgtttccgtacttatttgttctctatcttgagcgactttgtcacatgatcgatcgatctgtagctgcaaaagagtggaagcctattggtctgtcttagggagggccgaagatttcacatatttgttttgtcgatgatctaattctatttgcagaagcaacggtctctcaaataagggttatacgaagaatcttggaaacattttgtgtagcttctggacaaaaagtgagcttggagaaatataagatatttttctcaaagaatgtttcatgagacttggaaaagttgattagtaatgagagtgggattaaatcaacaagagaattggggaagtatcttggaatgcctattctcgaaagatggataaataaagatacgtttggagaggttcttgagagagtggctttaaggctagcgggttggaaaggccgttctttaagctttgcggggagattaactctaaccaagtcggttctctcctctattctgatacacacaatgagtactctctctttaccacagtcaacgttggagggattagataagctggcgagagctttcttgtggggtagttcgttagagaaaaagaagatgcatttggtagcttgggatagagtttgtttgccaaagagagaggggggtcttggcattcaaaagtcaaagtttatgaacaaagctctagtatctaaaattggctggaggcttattcatgatcggcagagtttgtgggctagaatcttgcgcaaaaagtataaagtgggagagattcatgatcgaacttggatggagaaaaaaaggccatgctcgtcaacttggagaagcatcgtggcagggttaagagaagtggctactccgngtagtagatgggtgattggtaatgggcgagaaattcgtttttgggcgggataaatggttatcgtatcagtctctgaaagagcagttctagagataccaaatacagataaggagttgcgagctcacaatctatgggtggatggcatgggttggagacttgacagaattttgccctacgtttctcataatactcagttggagttagcctctattgctttagataacgtgactggcgtgcgggataggttatcttggggtactctgccgatggtgcttttacggttacgtcggcttatgagatgttgatggaaaattctgagtgccgaacagatatgtcttccttttttgctagactgtggcaggtgatggctccagaaagggttagaacgtttctttggttggttactcaacaggttatcatgacgaatgtggaacgagttcgaggtcatattggagagtcaagtgtttgtcaggtctgcaaaggtggggacgaaccaatcttgcatgtgcgaagggattgtccgtcaatagcgggcatttggagaatgatgcagacatcacatttgctgatgtactggttgatggactttctgacgaacttcctgaagaacttgctgaacgaaggacttcctgaactactacgtgtcgaaccaagcaaggaaagtgaatcatccatcaaccttggatcgtttatgttggagatttcaaaccctccaaatgaagaagaagcttgcaaaacatctttggccgaaatatcaaaaggaatcaaagagaaattcaaaggaaataaactttccttattcgacgtaattaaattagcattgattgctaaggaggattgcttgctcgaaatccttgatccaccatttaatccagagaatgcatctagacataaagctccatcaatgcccacgatttgtacctcatcatcaccaccaatcacgctttctctattatatcgattgatttgtatttaacttagaatattttcttttaatgtagcttagtcatgtaagagttataaaaagctcatttgtttcattgtaaaggaccacgaaatttgaaagtaatagaaagagttttctctaaagcttaggctttgtttttgtttaattaaagttaggtagattcctttacttagtaaacgtgtgaatcaatgtctcttgtgtggattccttgagacaaaggttcgtgatcttatcacaaaggctttcacacttttgagtggcgatcatcaatccaccatcaaaaccctgatttgatctcacacgagagaagcgaccgctagcgtgtcagatttccacttcgaccatctttccttcacaagagagaagcgatcgccagcttgtgaagccaccatatctatccccgtgtgagactcaccccgagtcttgcattggagaaggttagtgccggttcgcaggagacatgattttttcaatgggtctcttcttggttggttatatttgaatctgggaatggtgaatgatgaggtcgggtattcatgggcaaccttgttctccattgtggtttggtggagttggaagtggccgtgtggctacgtttttggcgagattggtaaatgtagagatagagttcagtttgttaaggacttcgcttctcaagtaagtcaagctcacaaactgaatcgctatacgggcagatcgaatactcaaatggagagaatggtggcctggaaatgaccgaaagaagattggatgaagcttaacactgatggcgcttcacggggaaattcgggattggctacagtaggaggagttgtgcgtgatggtcaaggtcgttggtgcggtgggttcgccttgaatattggtgtctgttacgggctttatattgcttgggagaggcggtttaggcgagtggagttggaggttgattcagtagttggtggtgggttttttaactgagggggattagtgatactcatcctttatcgttcctggtgcgattgtgccatggcttcttatcaagagactggttagtccatgttactcatgtttatagagaagctaaccgtcttgcggacgggttagcgaactatgcattttctttccctttatggttt

SEQ ID NO: 166380 - DNA, 1961 bp, Arabidopsis thaliana landsberg
  unsure (1)..(1961): unsure at all n locations
atgatctaaatgtccaggtggagacactgattccgaagtcagatacctggaggaaaattctgcatctacttccgctctgaaacagtcaagccaacttccaagaaaatcaagtcannnnnnnnnnnnnnnnnnnnnnnnncatgctatcaccctgcgcaatagaaaagcacttccaaccaaaaaggaacctaagacagtcactgaggatagtgtatatcaagatggggaggaattcagtctcagtaaagatcaagctgacaaacaacttgagcagccactcgaccatgttactcgaccaccattcctagtaacatcaccaactgcttcgaaaccagttgatgtcaggaataaagaaaagttctttgttcctcctccttacaaaccccatcttccatttccttgccttcacaagaaagcattggtaaataagtatagagttatgtttgccaagaacatcaaggaggttgatcgtggagagaattcaagaagtgcaaggaatagtagtattgagtcacaaatgcagtgctattatacagaagaagataattccaaagaagcttagtgatcctggttcattcactctaccatgctctttaggtccattggctttcaacaggcctatgtgatttaggagcatcagtcagtcgcatgccactctcccttgccaaaagattggggttcactcaatacaaatcttacaacatattccttatcatagctgacagatcagtaaggatctctcacggtttacttgaaaacctaccaatcaggattggagttgtagagataccaactgactttgtagttctggagatggatgaagagcccaaagaccctttgattttggaaagacctttcttagcaactgaaggagctatgattgatgtcaagaaagggaagactgatctaaaccttggcaaagactttaagatgacctttgacgtcaaagatgcaatgaagaagcctaccatagaagggcaactcttttggatcgaagaaatggatcagttagctgacgagttactggaagagcttgcagaagaagatcaccttaatagtgctttgaccaaagatcaccttaggctaccagaagttgttagactcacataaagcgatggaagagttagaaccctttgagtaattgaatggggcaacaacagaggtagtgacgatgagtgaagaagggtcaacacaggttcaacctgctcactcaaggacatactcgaccaatcactcgatcgcaactgtcagcgacactgtggagctgatcattccaacttcacatgactggtctgaattcaaggcacccaaggttgatctcaaaccacttcctcaaggtttgaggtacacattccttggttcaaactctacctatcatgtgatcattaatactgagttaaatgatgatgaagggaaccaactattgtctgaacttaaaaagtataggagagcaattggttattcattatatgacattaagggaatttcatctagtttatgcaatcataggatccatcttgaaaacgaatcctattctaacattgaaccacaaagaaggttgaatcctaacgtgaaagaagtagtgaaaaaagaaattttgaaaattacttgatgttgatgtcatataccctatttctgacagtacatgggttctccggttcattgtgtgcttaagaaaggtggaatgactgttgttaaaaatgaaaaggatgaattgatccccactagaaccataactggacataggatgtgcattgattataataagctaaatgatgcatctaggaaagatcattttcctttaccattcattgattaaatgcttgaacgcttagctaatcacccatactattgctttgttgatggatataatcctttcttcccaataccagttcaccctaatgataaaaagaaaaaaactttcacatgtccttatggaacttttgcctataagggaatgc

SEQ ID NO: 166381 - DNA, 2857 bp, Arabidopsis thaliana landsberg
  unsure (1)..(2857): unsure at all n locations
aaataaactctctttgcagagattgttccattaataaaagtcacaaattacctttctctcaaacctccatgtctttgttctcgtcctcttgaaattttgcttagtgatgtgtggacatctcccatcatgtcaattgacaattataaatattatgttataattgttgatcattacacacgctacacttggttctatcctctcaaactaaagtctcatgtcaaagaaacatttatcaaattcaaagctctagtcgaaaataggtttcaaacaaaaattggaactttattttctgacaatggtggagaatacatagctcttcgggagtttctatcaacaaatggcataagtcatctcactactcctccacacactccagaacacaatggcctctccgaaagacgtcatcgacatattgtcgaaactgggctatctctccttactcatgcctcaatgccaaccatttattggtcctatgcactatccactgccgtttatctcatcaatagaatgccgagtcccacactctcacttcagtcaccataccaaaagctctttcaaaccaaccctaactactccaaactcaaaacgtttgggtgtctctgctacccttggttacgaccatacaactccaccaaacttgaacgaaagtcctcttcgtgcgtgtttcttgggtattcattaactcaaagtgcgtacctctgccttcaaccacaaactcaacgcatctatgtctctcgccatgttcgctttgatgaaaacacgtttccgttctccgctcaatcatctccaaataaatctgtctcaacccctcctcataatctatccgatgagtctgttccgactgtgtatgtgccacttgtccagcctccgccgccttcgccaccgcattcgccaccgttctttggtccttcaccgtcaccgccactggaaaacgcaactgattctgcacctacatcgtcggattcgtcaggccctacatcagaccaatcaacaaatgcagaggtccaatccgctacacaagcccatcatagtcctattccctcaaattcggcccacactaactctgggtcagcccatgttggtgaagcccaaacacagacgacgacctcatctacctccgctgctacctctgccgctgctaactcaacttcgtcgtccacccctacttcgtctacccggacagtccaaccagttccggtcgttccaccaccacattcgatggcaacccgttctcaatctgggattgtgaagccaaatcccaaatacacctttgctgccacgcttgctgcgtcagacttggaaccgagaacagtggctcaagcgctcaaggatgatcggtggagacattcaatgtctgatgaattcaacgcccaaatcgccaaccacacttggaatttggtcccctctccgccacctacagtcaatgtcatcggttgtaagtggatttatcgaacaaagtttaatcctgatggctctgttcatagatacaaatcaaggctcgtggctaaaggttacaaacaacaagccggtctcgactacattgaaacgttcagccccgtcattaaatcaacaacaattcgtttggtttttagatgttgcagtcaaacgcgattggccgatccgtcagcttgatgttaataacgccttccttcaaggaacgttaaatgaagatgtctatatgtcacagccgcctggttatgttgataaagacaaacccaattatgtgtgtcatctcaagaaagcaatttatggccttaaacaagcacctagagcctggtacatggagctacgaaactatcttctgtctgttggcttcacgaattcgctagctgacacatctctattcattctgaagaaagatagtttgtatgtctatatgctcatatatgttgatgatattcttgttacgggcagcgacaatggtttgattcaacaaacactaatggcgctagcgaaccgtttctcggtcaaggaccatgaagagttgtcctactttcttggtattgaagcaaaacgtgtctcctccggtctacacttgagtcaacgacgttacattcttgatctcttggctcgccacaacatgctacatgccaaacccattgcaactccaatggccacaacgcccaagctgacattgaactcgggaaccaaactccccgatgcaacagaatatcgtcgtgtcgtcggtagccttcagtatcttgcattcacgagaccggatatatcgtatgctgtaaaccgtctctctcagttcatgcacactccctcaacagatcattggcaagctgtaaaacgggtactccgatatctagctggaactccaacacatggaatcttcattagtcgtaatactcctcttactctacatgccttctctgactctgattgggctggagacagcgatgatctagtctcaacaaatgcatatgttgtctaccttggtcgcaatcccatttcttggtcatcaaagaaacagaaaggcgtagctcgttcgtcaacagaagcggaatatcnnnnnnnnnnnnnnnnnncgtctgaactgtcatggatctgctcactgctcactgaactaggcatctccataccttctacgccggtcatatattgtgacaacattggggccacttatctctgcgcaaatcccgtgtttcattcacgtatgaagcacatagccttggactaccactttatcaggaatcaaatacaagccggtcatcttcgtgtcaaacacatttctaccaaggaccaactcgcagatgctttaacaaaaccattacctcgttccacgtttcaacttcttacaaacaagattggagtgtcgaagacccctccatcttgagggggcatatcaaggatc

SEQ ID NO: 166382 - DNA, 426 bp, Arabidopsis thaliana landsberg
  unsure (1)..(426): unsure at all n locations
agcaacttcaaatacaaccgcctgaacaaagacgacgcnnnnnnnnnnnnnnnnnnnnnnnnnnnnnnnnnnnnnnnnnnnnnnnnnnnnnnnnnnnnnnnnnnnnnnnnnnnnnnnnnnntggccctggccgatcttgccaagttcttcaacctgccgaccatcctcaccaccagcttcgagcaaggccccaacggcccgctggtgcctgaactgaaagcactgttcccggatgccccgtacatcgcccgcccaggccagatcaacgcctgggacaacgaagacttcgtcaaggcggtgaaggccaccggcaagaagcagctgatcatcgctggtgtagtgaccgaagtgtgcgtggccttcccggcctggcagccctggaagaagagttcgatgtgttcgtggtcaccgatgcttncggcacct

SEQ ID NO: 166383 - DNA, 1984 bp, Arabidopsis thaliana landsberg
gacttcctgaacaaagatgtagtagaaggctgggagttggttgaaaatctagcacaatctgatgggtgctacaaaagactatgatccctcaatcagaagaactggaggaagtgaggacaaacagagcaaggatatcaaggctctgaatgaaaagttagacaagctgttgctggttagcagaagcagataaattacatcactgatgaagagcacttccaaatgcaagaaggggggaatgatcaaactgaagagctgtgctacattcagaaccaaggagggtttaacaagggctacaacaactacaagcccaacccaaacctctcctacagaagcaccaatgtagctaacccccaagatcaagtgtatccaccacaacagaatcagtccaagccttttgttcagtacaaccaaggttatgtccctaaacaacagttcaatggtggctaccaacagcagaatccaccaccagggttcactcaacaaccacaacaagccctagcagcccaagatcctgacaccaaacgaatgcttcaacaaatcatccagggtcaaactactggagctctagttctggaagaacgattggctgagattaatagtaaagttgactgttcctacaatgagttaaaaagcaaatatgaggatctcacatctaaatgacatacatggaacgccaagctgttgccaatacctcctcaacgtatccagggcaacacccaggaaaagccattcacaattgcaaggaatatgcacacgcagtcacactccatagtggaaggaaattgatcaacaaccagccaacagaaaagatcactagggacagtgaagttcaagaaggggaggatttaactccagaatcagtccatagagtcgaactcgaccaggatactttgcctgccaaccgagcacaagttccagttcatgagaaaccagctgctgaagaagataagaggaaagtgttcattccaccgccctataaacccaaacttccctttccaggaaggttcaagaagcagattttggaaaagtacagagccatgttctctaggcatatcaaagagatagagctcaagatgccactcatagatgcttttatgcttattccagattctcacaagttaatacaaaatatgatcatggaaagaattcaataagttcaaggaatggtagtgttgagtcatgaatgcagtgccatattacaaaggcggatgattcctaagaagttaggtgatccaggttccttcactctaccttgctccttaggccctctagttttcaacaagtgtttatgtgatcttggagcttcggtcagccttatgccgctatctattgcgaagaggctaggattttccaagtacaaaccatgctacattcagctagttcttgctgataggtcagggagaatacctcatggcatgttggaagatttgccggtgaggatcggatcagtagaaatcccaactgacttcgtggttctagagatggatgaagaacctaaggatcctctcatattgggaagacccttcttagctactgctggagccttgatagatgtcagaaaaggtaaaattgatctaaaccttgggggaaacctcaatatgacctttgatattaagaaaaccatgaggaagccaaccattcagggtcaagttttctacattgaagagatggatagattggcagatgagttgcttgaggaacttaatgagaaagatcatttacaaagcgctcttaccaaggatggagaagagggatacctatacttagaaacccagggttacaaagatctattagactccaatagaccggtagaagcatgggagacatttgaggaattgaatatctgttcagaagaagtcagttcagtcacagaaaaggaagaaagttctactcgacctgtgtactctagcagtcaatcgagcaagataacagaaggaactaactcgactggaacagccgaggatactcgatcgagcaacatctc

SEQ ID NO: 166384 - DNA, 581 bp, Arabidopsis thaliana landsberg; identical to SEQ ID NO: 76120

SEQ ID NO: 166385 - DNA, 676 bp, Arabidopsis thaliana landsberg
tatggaaaccctagcctagaaagtgaacaagaaaaacgtaaagatcaaaatggaagagatcaacggcaccaacagccactacctgccgcagccatcgtcatcccaactgccgccgccaccattgtattatcaatcaatgccgttgccgtcatattcactgtcgctgccgtactcaccgcagatgctgaattattggattgcgcagatgggaaacgcaactgatgttaagcatcatgcgtttccactaaccaggataaagaaaatcatgaagtccaacccggaagtgaacatggtcactgcagaggctccggtccttatatcgaaggcctgtgagatgctcattcttgatctcacaatgcgatcgtggcttcataccgtggagggcggtcgccaaactctcaagagatccgatacgctcacgagatccgatatctccgccgcaacgactcgtagtttcaaatttaccttccttggcgacgttgtcccaagagacccttccgtcgttaccgatgatcccgtgctacatctggacggtgaagtacttcctccgggaacggtgataggatatccggtgtttgattgtaatggtgtgtacgcgtcaccgccacagatgcaggagtggccggcggtgcctggtcacggagaggaggcagctggggaaattggaggaagcagc

SEQ ID NO: 166386 - DNA, 471 bp, Arabidopsis thaliana landsberg
atgcgtcctatcgaagagttaataaataccaatgaacctggctgggagctggttagtaattgggtaaaggcagccaaaaataaagtagaagtacttcctgcagatcaggctaaggcaaaagatgcactctttaagacacaggtaactacacgttctccaatgggggctataatttatgagtcgggaggtttgttaatcgacaatggttggattaggattttaggctcaggtcataaaaaattaaatcgttctttacctgattggaatttagaaaaaacatttaagcaatttggagaaatagctccttttctgttgattgctgatgatgcgatcggaggtttctttgcaattaatgggggagaattaggaaatgacgttggtaaagtctaccctctggcacctgagactttaaattgggagccacttaatttaagaaataccgatttcctgaatttctgctttaatggtaac

SEQ ID NO: 166387 - DNA, 477 bp, Arabidopsis thaliana landsberg
gaggactatgagaaaattctctccgaatatatttatcatcgtgcccgaatggaacggccgcaggatcgcgaagccttggcagagcgcatatcgggcttgtcgatcctcataaacaacgcgggagcggctcacgacgaggaagggaacgacccgaaggctttataaagagcatcgaagtcaatctcatcgcgcccgccgatatcagcttccgcttccacgggcagatacgctcgcgcggcggagcagttgtaaatatcggatcgggctcctgcttcctcggactcaagggttaccccgcctacacggccgccaaatcgggcctcctgggcttcacgcgcgccatggccgatcgctgggcccgcgacggcattcgagttaatctggtcgcgcccggatttatcgatactcgcatgaacgattgggtgaagaacaaaaaggccctattgcgcagtcttcccgctggtcggttcgggaggc

SEQ ID NO: 166388 - DNA, 1971 bp, Arabidopsis thaliana landsberg
  unsure (1)..(1971): unsure at all n locations
ctccaaaacagacaagccaactaccaggcaaagtagttgagaatccaaaagaatatgctcatgctatcacactgcgtagtggaaaagtacttccaactagggaggaaccaaagacagtcactgaggacagtgaagatcaagatggggaggatttaagtctcgagcaaccactcgagcaaccactcgaccgtgctactcgacctatcttcccagcagaatcaccaactcctccaaaaccagttgctgtcaaaaacaaagaaaaggtctttgtccctcctccctacaaaccgcagcttccatttcctacccgtcacaagaaagcgttgacagataaatatagagctatgtttgccaagaatattaaggaggttgagttgcggatacctcttgttgacgctctagcgctaatcccagactctcacaagtttttgaaagacttgatcgtggagagaattcaagaagtgcaagggatagtagtattgagtcatgaatgcaatgctatcatacagaagaagatcattcctaagaagcttagtgatcctggttcattcactctaccatgctctttaggtccattggctttcaacaaatgcctatgtgattaaggagcatcagtcagtctcatgccactctttgttgccaaaagattggggctcactcaatacaaatcctgcaacatatcccttatcatagctgacaggtcagtaaggatcctgcatggtttactcgaaaacctacctgtcaggattggagctgtagagataccaagtgactttatagtcctggagannnnnnnnnnnnnnnnnnnnnnnttgattctggggagacctttcttagcaactgtaggagctatgattgatgtcaagaaagggatgattaatctaaaccttggcaaagactttaggatgacctttgacgtcaaagacgcaatgaagaagcctacattagaagggcaactcttttggattgaagaaattgatcagttagctgatgagttactggaagagcttgtagaagaagatcatcttaacggtgctttaaccagaagtggtgaagatgggtttatgcatttggaaactttgggataccagaagctgttagactgccataaagcgatggaagaattcgaaccctttgaggaatggaatggaccagcaacggaggtaatggtaataagcgaacaagggtcagcacgagttcaacctgcatactcgagaacatgctcgaccaatgactcgacctcgactgccagcgactggagagctgatcattccaacttcagatgactggtctgaactcaaggcaccgaaggtgtgatctcaaaccacttcctaaaggtctaaggtacgcattccttggtccaaactctacttaccctgtgatcattatgctgagttaaatgatgatgaagtgaacctgctattatctgaacttagaaagtacaggaaagcaattggttattcattatccaacattaagggaatttcacctagtttatgcaaccataggatccaccttgaaaacgaattctactctagcgttgaaccacataggaggttaaatcccaacttgaaagaagttctgaaaaaagaaattttgataactgcttgatgctggtgtcatcaaccctatctctgatagtacttggggttctatagttcattgcgtctctaaaaagggcggtatgactgtttttaaaaatgaaaaggatgaattgatccctactagaactataactggtcatagaatgtgtatcgattataaaaagttaaatgctgcatctagaaaagatcattttcctttaccattcattgatcaaatgcttgaacgcttagctaatcacccatactattgctttcttgatggatatagtgttttttttcaaataccaattcaccctaatgatcaggagaaaaccactttcacatgtccttatggaacttttgcttaaagagaatgccattggtttag

SEQ ID NO: 166389 - DNA, 1611 bp, Arabidopsis thaliana landsberg
atgaaagagaacgtaatcatagattttaaattcgaaggtcgcatgtataatgtgatgatgaagacattaggagagaagatagctctctcaatgttagaagataggatattgacgaagcttggattagatgcaaataaggttaaattgcatatgaggtacaatccacggttgttcggagtagaggaagagatgaacgtttgtgatgatgaggatgtctttgcttatgtaacatcagcaaaaaataaccggagaagtgttttggttgtggaggagatttctaaaccgcccgagccggagcaattgcccgagcaattgtctagagttggtaaaagtactgttgttaagaactatatagagttgaattcagaggaggatgaaatgagagtggatgatggtgcactcatcgtcttattagaagaggaacaaggaaatcaacatcaacttgaggcaatagtggaggaggatcacgggactcaagaagatgaaacacgctatgatgagtctatggataattctgataggggggaacagtatgttgagtcgccacctgctgtagaaccgggtatgtttaaaaaagaatgggaagacggaattgggttgaccttacgtcaagaatttccaaacaaggcggcattgcacgaggtggtggatagagctgcatttgctaacagttttggttatgtgattaagaagtcggataaggagcgctatgtcctaaagtgtgccaaagagagctgttcttggcgtttacgagcgtccaatatctgtaatacagatatattctcgattagaaggtacaataagatgcatagttgcactcggctaagtaaaggtagtagtaggctccggaaaagaaaaggcaacccacaattagtcgcagctctccttcatgatcattttccgggacaattggaaactccggttccaagaattatcatggagctagttcagacgaaattaggtgtgaaagtatcatactcaacagtgctaagggggaaatatcatgcggattgtgatttaaaaggaagtccggaagaaagctacaaggatatcaagtgttatttttacatgttgaagaaggtaaatgatggtacagttacttatctgaaaatggatgaaaatgataaatttcagtacgtattcgtagctttgggagctagcattgaaggctttagagtgatgaggaagtttttaattgtggatgcaacacatttgaagaacggatatggcagggtgctagtgtttgcctcggctcaagaccctaaccgtcagcattacatcataacgattgtcgtactcgttggtgagaatgatgctagttgggattggtttttcgagaagctaaaaacggttgtacccaatacttctgaattggtcttcagaaccgacataaatgcaagcctcataaaggccatacggaacgtgtataccgcggctcatcacgggtattgtaattggcatttgtcccaaaatgtaaaagaccatgctactaacaccaacagagacgtactcgcatggaagttccagaagttaagtcggaactacaccgttgctaacttcaaccgggcgtatgaaaagtttaagatgagataccccaaggcgactaagtat

SEQ ID NO: 166390 - DNA, 1242 bp, Arabidopsis thaliana landsberg
gtctccgccattttctttctgttgcttcaacaaccagaacaatcttcttcagccattatactgagcttgaagaaacgccatggaagctcctctggtagtagtggtaaccagtacagttcaagcagaccatcagctggtttccaagggaacaggagcacgtgctctctcttcctcggcacgtgggttcgtgataactcttatcctctctataaaccggcggattgtcccggcgtcgttgagcctgagttcgattgtcagatgtacggtcgtcctgactctgactacctcaagtatcgatggcaacctcagaattgcaatttacccacgtctgtacacatactcatcttcttcttctttcttttttgtcataaagttttctaattttcgtggttaaatctttgagttttctggtaatagtgtatacctgtgtcgttattggtaatgaggttcgatttcgtcagaattttactgagctaagttgtcaaaatgtattcttttggcaaacccatttgaaagaattctactttaagatattacgactgctcaaaatcagagattctgtggttttagtgtttgatttctggtctttcacaaatggattaggttcaatggtgctcagtttctgttgaaaatgaagggcaaaaccataatgtttgcgggtgattcattggggaagaatcaatgggagtctttgatctgccttattgtttcatctgcaccgtccactcggacagaaatgaccagaggcttgcctctctccaccttcagattcttggtaatgctttcttcttattcttcaatggctcacatcttgtttttcaggttcttctataagaaaactgttttttgatgtataggattatgggataacaatgtcattttacaaagctccgttcttggtggacatagatgctgttcaaggcaagcgtgtgttgaagctggatgagatctctggtaatgccaatgcttggcatgacgctgatctcctcatcttcaacactggtcactggtggagccacaccggatctatgcaagggtaagttaccacacttccaatgacttgattttctagtgtgaaagtttctttatatatcttcttgtgaacacagatgggacttgattcaatcaggcaattcttattaccaagacatggaccgttttgtggcaatggagaaagcacttcgtacttgggcgtattgggtcgaaactcacgttgatagatcccggacacaagtcttgttc

SEQ ID NO: 166391 - DNA, 2010 bp, Arabidopsis thaliana landsberg
atggtcgacaagatatgggttcatcttaacaggtatgtgaaaacatgttatagtcatgtatatagtggtttaattgatatgttaaattttgtaaatggttttttgctttcatcttacttctatgcagaaccgatcctggttatgagagtggtgcttgggattttgtgaggtctgtggctgcaggtttaggagaacatgcgatgattatttgcccgtgtattgtttgtcgcaacgttgatcgtcacttagctgttgatgttgttgatcatcttgtaacaaggggaatggattggagttataagttggggacgactggtatcatcatggagaagtgaaatcagtatctgattgtagaaagaacgcaagtcagtggaaccaagagattttagggttgttcaaagctgctgagtttatagatgaaaagctggttagtcaaggtgatgttgatgaggctgatgataaggaagaagttgagttttcagcaaagctagctgatgcagaaacacctctctatccaggttgcacaaatcacagtaagctctctgcgattgtttcactctttagcctaaagactcaaggtggttggtctgatagaagttttgatctgcaactcgagtccttgtcaaatatgctacccaagggtaatgtcttgcacacatccttgtacgaggtgaagaagtttcttaaaacttttgatatgggttatgaaaagatacatgcttgtgtaaatgactgctgtttattcagaaatcagtttgagaagctcgacagttgtcctaaatgcaattcttcacgatggaagattaacacgcgaactggtgaggtgaagaaaggtaatccacagaaagtacttaggtactttccgatcattccacgtctcaagaggatgttcagatcagaggacatggcgaaagacttacggtggcatttcagtaacaagagcaccgatggaaaaatgcgtcatccggtagattctgtgacatgggatcaaatgaatcagaagtatccatcatttgctgcagaagaaaggaatgttaggcttggaatctccacagatgggtttaaccctttcaacatgaagaatgttaactatagtgcatggcctgttttgctagtcaactacaacatgccacctgacaagtgtatgaaagaggagaacataatgttgacattgctgattcctggtccaactcaacctggaaacaatatagatgtgtatctagaaccgctaatagatgatctcaaccatctgtgggaaaagggagagttaacttatgatgcattcagtcacacaacattcacgttaaaagcaatgcttctgtggaccatccaggattttcctgcatatggaaatctagcaggctgcaaagtaaaaggcaaaatgggttgtccaatatgcgggaagcacacagatagcttgtggttgagtaattgcagaaagcacgtgtatatgtctcatcggaagtctccgtcacccacacatctttataggcgaaagaaagcatggtttgatggtaaagctgagaatggaagaagaggtaggattctgactggtcataacatatatcaactctgattttggaaatgtaaaagtaaaaggaagaaagaggaagatgaacgattgtactggatcagcttttggtactgatgatgaatccattgcatcagaagaagaggaagaacaattagatgaagatgagctttcaagatggaagaagcgctcaatcttattcaagttagagtattggaaggtatgatttattatcaaagttattcaagttcagattatttggagtaagttttgaaaaataaatgtcgtagccattaaagttattatctgttactattttgtctaggaaatgccggttagacataacttagacgtgatgcacgtggaaagaaatgttgctgctagccttgtctctacaatgctgcattgtgggaagtcagagggatggtattaaagctcgaaaagatctgcaactgcttggtattaggaaggatttacat

SEQ ID NO: 166392 - DNA, 2430 bp, Arabidopsis thaliana landsberg
  unsure (1)..(2430): unsure at all n locations
ttatcaatgatttgagattgtttttacagagtctctagagtgttttatagtgcttttggagtgtttttggtgtatttacaggttttgtacattctaggggttatcaggcgattatgggacactttggagcaaaaacagagcagaaaaccagtcttgaatgtagtgtcgatcaataccagacttgtgtcggtcgacactggtctgccacaaagttttcacaaaaactgtacgaaatttgcacaggcctagttttgcccaaataggcccagaagttaatatttaggcccaagacgtattttagacatataattaggtttttaatgtcaatgttaaacctaagttttgttaagttttgttttgatattaagatacacttttggagacaagaatccaatccgtgaatagaggattttgaactcctttcattcttaatcttattattcaatgcaaagtattcagattatgatttgtgtttctcttatcatgtctgagtaatcccacgattaaagaggatgttcaggtcagagcaagttgcaaaggatctaaggtggctattttactaacaagagtagtgatggaaaaatgcaacaccctgtaaattctatgacatgggatcaagttaatgccaagtaccctgagtttgctgctgaagaaaggaacattcgtctaggactctctactgatggtttcaatccttttaacatgaagaacaacaagtatagttgttggcctgtgtgctgttagttaaatacaatatggctgctaacctttgtataaagaaggaaaacattatgcttaccttattgatttctggttcgcaacaaccaggtaatagcattgtcatttatttgggaccactagtcgatgaactacttcatatttggactaatggagagttaacatatgacgcctacagtggaaatactttcactcttanagctatgctcctttggactattagtgatttcccagcttatgaaaatcttgttggttgtagagtgaaaggtaagatggcttgtcctctatgtgggaagaacactaacagtatgtggttgagtaattgcatgaaacatgtctacatgtctcatctcaaaggtctatcagctacacacaagtataggtggaagaaaacatggtttgagggaaaagctgaacatggcgtcaagggtaggatattaacaagtcataatatatctgtgctgctaaaaaattacaaaaataattttggtaataagaaagagtctgggaagaagagagctaggactgtcctgttgagactgactcagtcgatgacagtgaagttagtgaatcagacgatgaagaagaagaagcatctataaatgaagaggagtgatcaagatggaagaaaaggtctatccttttcaagctgccttattgggaggtatgattattcaaacttttacaatacttttattacaaatagatttttgctaatcttcattaaattgtatttgctttaactcttttggttaggatctacgagtgagacacaatctagacgtgatgcatgtgagagagaaatgtggctacaagcattgtctccacattgttgcactgtgggaaatcgaaggacggcataacaactcgtaaagacctctaacttctaggtattagaaaggatttgcaccctcaagaaaaaggtcaaaggatctaccttccagctgctccttggtctttgtcaaagttagagaagaaagtgttttgtaagagactttatgacttctacttgcatatcattagaggactgcaaagtaatggggatgagatcacatgattaccatgtcttgatgcaacaactactaccagttgcagttagaggtttactcccaaaaggtacaaggattgtaatcttgcacttatgtgcattcttcaataagttgtgtcaaagagtcatagacttgcagcagaattgaaactgagatagttgaaacattgataatgtttgagagattctttcctccaagcttctttgatatcatggtgcacttgtgtgtccatctaggaagagaagcccgattaggtagacctgtccatttcagatggatgtatccatttgagaggtaatccgtctactttaagtgttatggcttttcttatataacaaattcatatgctattctggtttgcattgattcttgttgcaggtacatgaaagtattgaaagactttgttaggaatacagcaagaccatagggttgcatagctgaatcatatttagcagaagaatgcatggagttttgcagtgcttttttgaaaaagacaccaagtgtagaagagaaagctgacaaaaacacgaagtatgaaaatgcctcaatcctagagggtcgtccaatatatgcagccacttcagttagtctcagtgaaattgagaaatagatagctcatcttgctgtcattcagaatacggcc

SEQ ID NO: 166393 - DNA, 1394 bp, Arabidopsis thaliana landsberg
cggttacaagccattcttctcgctgacagtttcgccacgaaactccttcccttaaccttagaacgccccaatgtcttgttaccgctagtgaatgttcccatgattgattacaccttagcttggctcgaatctgctggcatagaagaagttttcgtcttttgctcgatgcaagtcatcgattatctgaacaactctgactggtactcgcacaaagactttacggtaaaaactatagagtcaccgcaaaactccaccagtgctggtgatgctttgcgttatatctacgagcagcagattgagacgtctcagattcaaggtgactttgttcttgttaatggatgtattgttagtaacatgcccctgacgcagctgattcaagaacacagagatagaaaaaagaaagatgagaaagctatcatgactatggttatcagacagtcactcatcaccgatcatcaactcttcatcgctgtaaatcctttaacaaaacagcttctttattacgatgaggacaacatctgcttcgataaatcattgctggatcgtaatccatctgttttgttatgtagtgatatgcaggattgttacattgacatatgttctcttgaggtgcttagtctatttgtggataacttcgattaccaacatatgcgttgtgattttgtggaaggtgttcttgctgatgacattatcggttacaagattttcactcatgagattagctcgtgttatgcttctaggattgaaaatttcaggagctatgacatggtgagcaaggatataatccagaggcggacattcccgtatgtaccggatatgaagttcagcggaaatcgcactcttaagctcgagagacaagggatctacaaggcttctgatgctactcagttaccatctgctcatgttggagcttcctatgtcattggacatgccacaaatattgggagtgggactaagatcttgaactctgttattgggaatggatgttctattggatcaaatgtggtgatccaaggctcatacatatggaacaatgttacggttgaagatggatgtgagataaggaatgctattgtatgtgatgaggtgaaagtgtgtgcaggagctattgtgaaacctggtgttgtgttgtcttttaaggttgtagtcgggagggactttgttgtacctgcatattcacaggtttcactactccgacaaccaatggaagaagacagtgatgaagaaaatcttttgtcaggtgtagatttgcaaatggagtctaagcttggtcttgatggagcaggttacatatggcgccaagcgtgtgaacacgcctggaagcattctgttccaccaatccccaaagataaacttgctgagatcattaaggccattgacgatgatggcacgga

SEQ ID NO: 166394 - DNA, 667 bp, Arabidopsis thaliana landsberg
atggaagaagagacttgcttggactgcaagagagcaaccacaatggtggttgatcacagtagcggtgacaccatctgttcggagtgtggccttgtctccgaagctcacatcatcgaatactctcaggaatggagaactttcgcatccgacgacaatcacggtgacagagacccaaaccgtgttggtgctgcgacaaacccttttctcaaatcaggcgatcttgtcaccatcatcgagaaacctaaagaaaccgcttcctctgttctgtccaaagatgacatctccactttgttccgtgcacataatcaagtcaagaaccatgaagaagacctaatcaagcaagccttcgaagaaatacagagaatgaccgatgcactagacctagatatcgtaatcaactctagggcttgtgagattgtctccaaatatgatggtcacgctaacaccaaattacgtagagggaagaagctaaacgctgtatgtgcagcctctgtttcaacggcttgtcgtgaactgcaactctcgaggacattgaaagagatcgctgaggttgccaatggtgtggacaagaaggatatccggaaagagagtctggggataaagcgtgttcttgagtcacatcaaacctgcgtgtctgcttctcaagcgattatcaacaccggagaac

SEQ ID NO: 166395 - DNA, 1608 bp, Arabidopsis thaliana landsberg; identical to SEQ ID NO: 19586
  unsure (1)..(1608): unsure at all n locations

SEQ ID NO: 166396 - DNA, 551 bp, Arabidopsis thaliana landsberg
atgggagcattttgcaagttgatcgatgcggttctcttcttatactttgctctcatggcggtaattgcgccgcttatcgacggtcaaacgagtcttcccggcgatatcttcccggcgtttatcgtcgatctgaatcgctggtacattgatgaatttggagattatctagtcaaagagaagccgcatttcctagtcggactcgtctggcatgagcttttgcttctttggccgctctcgatcgtcaacgtctacgcaattctcgctgggaaatcgtggtttggtaccacctcaatggtgtacggagcttccgtcgtgacttctatggtacatttagatcttaatctcgctgtttctgatcaatttggatataacgtgtttgatttagagtaagattttgttgatttatggatctgaaatctgagattaatgaagattataggagaaatgattattggtgatcaatgttaaagtctgtgaaactggaccattacaaagtatgaactaggagcagactagtgaaatttgtataatgcttgattcaagatttcata

SEQ ID NO: 166397 - DNA, 1221 bp, Arabidopsis thaliana landsberg
tgccggtacactaaaacaaaccggcttgttcaagaaaccgcgcttggacgatcggttttccctaaaccaatcggcgagcttcacggccattccggtctagctcgactcgctctcttcacggctcgagctgggatcggtctagtggacgggacacgtggcatgggcgtagctaacgccggtgtggttttctttaacggcaggttattagccatgtcagaagatgatcttccttaccaagtgaagatcgacggtcaaggagatcttgagacgatcggacggttcagattcgatgaccagattgactcttcagtgatagcgcatcctaaggtggacgcgaccacaggagatctccatacactgagctacaacgttttgaataaacctcatctcaggtatcttaaattcaacacgtgcgggaaaaagacacgtgacgtggagatcacgctccctgaaccaacgatgattcatgatttcgcgataaccgagaattttgtcgttataccggatcagcaaatggtattcaaattatccgaaatgattcggggcgggtcacccgttatctacgttaaagaaaaaatggcgagatttggagttttgtcaaagcaggatctgaccgggtcggatataaattgggttgatgtaccggattgtttctgtttccatctatggaatgcgtgggaagagagaaccgaagagggagacccagttatcgtcgtaatcgggtcatgtatgagcccacccgacacgatctttagtgaatcaggagaaccaacccgggttgaattaagtgagatccggttaaacatgcgtacaaaagaatcgaaccgtaaggttatcgtaaccggagtgaatttagaagcgggtcacataaaccgtagttacgtgggccggaaaagccagttcgtttacatagcaatagccgatccttggcccaaatgcagtggcattgcgaaggtagatatacaaaacggcaccgtttcagagtttaattacggaccgagccggttcggtggagaaccgtgctttgtaccggagggagaaggagaagaagacaaaggttatgtaatggggtttgtgagagaaaaagagaaagacgagtcggagtttgtggtggtcgacgcgacggatatgaagcaagtcgcggtggtgcacttgccggagagggtaccttatggtttccatggaacgttcgtgagcgagaatcagctgagggaacaagtt

SEQ ID NO: 166398 - DNA, 302 bp, Arabidopsis thaliana landsberg
tcatgtccactgcaagctgctcgacggtgacacctgcgcttgcaccgattacgttatatcggcaactaaaggttccggactgcatcaaggtgacgccgggaaacctgcttaccatctcgtggataccgcggacctgcgcctatcgccggctggcggagggcaaaagccttgcctggtggcacccgctgatcgccggtgacatgcaggcaatcgaggacgtcggcgtttcggtgcgcggccgcaccgtcagcgagaccgaggtgaagcccggcgactgggaaaaccacgccgtcgactggccg

SEQ ID NO: 166399 - DNA, 186 bp, Arabidopsis thaliana landsberg
tccaacttattcgaatcttcaatcttgtaggtgatactaagtcgaattgatgagaagttagatagtgaattagatgttcggaccgacccattatccgaattttttcttatctcatattttattggattatcgattccaattctcaaagtggacaaacctaaattttgttatctgcttttttcttct

SEQ ID NO: 166400 - DNA, 344 bp, Arabidopsis thaliana landsberg
atggttcagagagtccttgagctgctgcatgcgaagaaggtgttggacacctctttgatggggagagagctctgtttcggatccttgacaagagcgtgcgcctatttgtcattgagaacaagaatgggagagactcaaaacccaaatttagtaggttaggaaatcgaatgatggagaaatcaaatgaattttgcaaagtttttgataagaaggggaagtgaaggaaagagagaccgttatcagaattcgagaatgttttggtatgcgagaagcacacatcaggttgttgacttcgggaattgcgatagggaggggccccgcagtcattatgatgaaaccacaag

SEQ ID NO: 166401 - DNA, 3947 bp, Arabidopsis thaliana landsberg
ctagctagttcatccagcttgtccagctcacctagctggtttagcttgaactttctctttcttcctacttagtattttggttcgttcctcgaccatgatctagttttctcctaaaacaaaccggcctcgatcaccagatcacattctgggaaagtgaaaccactgacctcaataaacctcacaatgacgctcttgatatccgaatcgacgtaggcaactacgaactctcccgtataatgatcgacacgagaagctcagttgacgtactcttctacgacgccttcaaaaaaatggggcacctcgattccgagttgcaaggcagaaaaacgccacttaccgggtttgatggagatacgaccttttccctaggaaccatccagctcccaaccgtcgcacggggagtaagacaactcacgaacttcctcgtggtcgataagaaagctcctttcaacgtaatactgggaagaccatggctacacgtcatgaaagccgtcccatcgacctaccaccaatgcattaaattcccttcttacaaggggatagcagtcgtgtacggcagccaacgcagctcccgaaaatgctacatgggtagctacgaggatatcaaaaaagctgatcccgtggtactaatgatagaggacgaactcgcggaaatgaaaacagtcagatccttggacccgtctcaacgtggaactcgaatatcgctgataacgcaggtctgcatagacgaatcagatcctaaacgatgcgttggaataggtcacgacctcgatctaacggtacgagaagatctcacaacctttctcaaggaaaacaaagatagcttcgcctggtcaagcgcaaacctccaaggactaaacctcgagttaacctcacacgaactcaacgtcgatccgacctaccgacctataaaacataaacgtcgcaagctaggtcccaaaaggaccaaagctctgaacgattggctcgctaaccgagtcatcgtaaaaaagaaaaacaggaagtggaaagtatgcatcgactttacagacctgaaaagcatgtcttaaagactgtttcccactcccgcatatcgattgactggtcgcattgttcttcatggacacattctctgggtacaactaaatacttaccgacaaaaaaaaaacggcgttcattacggactgaggcacttactgctataaagtaatgccctttggtttgaaaaatgacggagctacctaccaacgattggtgaacagaaagttcaccgaccagctcaggaacacgatggaagtttacatcgatgacatgttggtcaaattggcttacgaaaaggacgacatcccacgattaagagaatgctttaaaatcctaaacaaatttgaaatgaagctaaatcccgagaaatgctctttcgaggtcccatcaggagaattcctcggatacctagtaaccgaaagaggcattgaggccaatcctaagcagattgcaaccttcatcgaaataccatcaccaaaaaatggcacgagaggtccaacgactgactggtcgtattgccgccctcaacaggttcatatccaggtctaccgacaaacgcgtccctttctatcagctcctccgacaggagaaaaagttcgattggaatgaggactgcgagcaagccttcaaacaattgaaagcatacctgtttgaaccacccatactcacaaaacctgaacaaggagaaccgttgtacctgtacacggcagtctcccgaaccgcgataagcggtgtcctggtgagaaaagatcatgaaggacaaaaaccgatctattacgttagtaaaacgttgatagacgctgaaacccgttatttagcaatggaaaaactggcactggccgtagtcatgtcagctcaaaaactgagaccatattttcaatcacaccccatcgtagtgaagacttcccaacaaatcagaaccattctgcacagtccaacccaatgcggtttgaccactgcaacagacagcatgatcccaactacccaactctcttgctcttttgataggctgaactccttgtgctgtatgaaagagatttcgagaataatgtatgactctcaaagctctagaccaaagctaggtgatcaagattcagacatacgctggataacattgtgcgaagagattccaagataatctgcaatccaagtgttgccatcactgatgcaaagactaggattccctgaaaggatttgaaccaaaaatcacatattgagaaatcggaaaaactttattgacttgtcgaaggcgttaatagttgctcagagatctcaatatcccaaaacatgcttgcttactccgattcactaacataacatataatagaaatatactaatggaagacagatcatgtgcattagtctttaaaaggatgatacaaaccagtgtttgcatgcgtttcttgccaatgggatactgatacgggctgagtgtctgcatagagaagagcggtaaaccagatgatgaagccagaaagaagatcaagaagagagtccaatgtagaggcaatgatagctaaagagccactagtgacagaagcatagactttagcagcaaaaagaagcatgtttgcaatgtttgatattctaatcgccaatgtctcgcttttagccaaattatcctgctcttcctatgtacacaaaacacaaagaaattcagaaaagtatcaatcaataagaacaaatgcatcatggtttcaacaaatgtgacaagtagtagcctcatttaggctaacctttgacattccaggaacaaagccacgttctgcaagttcatccatttcagtaaagccctcaagcatctctacttgctgctggtaataatctgccacattgtcttccggacctgaaaacaccaagacacatagcttcacaaaatcatatttgatctcttcacaaaatcatatttgatcacaaaatcatatttgtagacactacatgattagagacaaaaatcaaagatcaggattaataaactcgactaatcaataccaagattcaactaaatctcaacttcataacaagagtaaaaatatatctttgaagaatcaaaaatgctaaagatagcaaacaaaggaggccgaattcaaatgttatcagctgctgctaaagattgaaactgaagaagacgataagaaaatggaaatgcggagaggaggagcaaattgtttacccaaacaaccaagacagttgtgtagtttactcggagatttcttctccttgtgttccggtgaaacctggaaatcatcgaaatttaactgccaggaacggtcaccgttaccgtgaaactcgagcagcgagatcccttcgtcggaatctggactagctggctcaaccatttttccggcggcggagagagactttgtagtgtgtttttttttttgagagagagagagagagtggtaaggaaatgggaaatttgaagagacggcgagggtaagatcggtaattaagagaaagattgaggctagctactacgactgttgtggtagtaagacattcctccacagagatacttggaccagcctttagaagagacgtctctgctaattatccacgtggcgttctctcaatggatttgggatctcgcacgtgattggaggagtcatcatacacacgtgtacagttgagattcaactgcaattaaacgaccccgtgacatggttatgagtcacatatgtgccctctcaaactcttattatgtagtataaaaactgtattagatacaaccgacccaagatatagaagaacctttgaaaaatggtagaagccagttcagctaaagctttcttcttcacaaatctcgtaaaatattagacatgtagagcaggcttgttgttctcttattgtcaagcataagtaaatgattattgtttagtttcgtgaccaattgttttttttttggttagtcattgttcgatttgctt

SEQ ID NO: 166402 - DNA, 730 bp, Arabidopsis thaliana landsberg
tccactgttcccaagcccatacgggcaaaagaacctgctcccaaagttggctctgcaacagaacagaactcttaattgtagtaacactaatgtatccactcacagtctcacagtttccaactctcctcaaacaccatcttaaacttgacttctcttctacttctcatcttcacacttgcccttttaaactcatcctctcaagcccacaacactcacattctctttctctccctctcggtcttcagctcaaggtatagctacattcatacgcatttcattttaggttggctttccaagttgtttgtgcacttattggaagttaatataatccttagtcacttttttgtatgtgtatagataacatagactggaagatcattaccatcaagtagaagtggagggagaagaagagatcaagccaagcaaagatgccaacaagacagacgaaaacacatcatcattaagaatattcccctgcctcttttgttctagaaagttccatagctcccaagccctaggaggccaccagaacgcccacaagaaggagcgaaccgctgctagaagagccaaaagggcttatgattttgtcaacaacaatgacttccttcacacgttacctgttttcttatcctctccctctcaacatcacttgaccatcttaggctaccctgcttctgcctccgttgcctgttttccgacggttcatcccgaccatccgattttcaaatcc

SEQ ID NO: 166403 - DNA, 2054 bp, Arabidopsis thaliana landsberg
atgtttaggatagatttgcatgcatgttgcatatttgtgttgatttcaggtgatttggagctgttgacgagctatctggaagaagcggacatgatcatgtcaaaccactcgaccccgaggtcgagtaggagcttcaagatctcaagagaccactcgaccccctggtcgagtagaagacatcaccacttcacctcaccactcgaccccaaggtcgagtgtcttcatcccataacctgaccatcactcgatcacatcactcgacccaaggccgagtgtcttcaccttcattgccagaccactactcaacctcatcactctacctggaagtcgagtatcaccatcaccaccactcgactgccactacaagaaaacagacaaacgacgactacgaaagacgactaacaatgtaatcgtccttttttgcgactaacttacgactgctggacgacgacgttacgacaacagtacagttagtcgctggatagtcatatgttagcgactatgttatttagtcggtagatagtcgtccagttacgactatctgacgacaacattattgagaacaatacgtagtcgtaacttagtcgtactttagcgactacatctccgactacaagcaatagtcgtacattcggcgacgataatacgactattttgcctttgtcgtaacatagtcgcataagtgtcgtataatatggttggaaaacgttttccgcgttgctgggtaggtacacctaatttctgagcgtctacaaggtttagtcgtatagtagtcgtaaaaaatcctctaaataatccacaatactcttcattctcattcaccaacaaatcaaaacaacaataaaaaaaaaaaaacaatttcgaaagaaaaatataagtttagtttatgctatcatggcgggaaacttcaattatggtggtggaggcggtttctatcgagattggatgtacaagagatttgatgaagtaacgggaaatttgtcagccgaatatatcgcaggagtgaaggagttcatgacattcgctaatagtcagcatatagtacagagtagtcgaggtaaatttcattgtccttgtagtgtatgcaagaatgaaaaacacatcatctcgggtagaagagttagtagtcatttgtttggtcaaggatttatgtctgattactatgtttggtataagcatggaaaagaactgaatatggatataggaacgagttacacggatatgacgtattttagtgagaattatgaagaagtgggtaatgttgtagaagatccatatgtggatattatgaacgatgcatttaattttaacatggggtttgatgataactatcatcaggatggtagttatcagaatgtggaagaaccggtctgtaaccattcaaataaattctacgacttgttagaaggtgcaaataatccattgtacaatggttgtcgtgaagggcatctattagcatctcgactcatgcacaacaaggcggagtataatataagtgaaaagttggtggactccgtttgcgaaatgtttacatattttttaccagaaggaaaccaggctaccacttcacattaccagaccgagaagttgatgcgcaatttaagacttccatatcatacgattgatatttgtcagaacaattgtatgctattttggaaagaagacgaaaaagaagatcaatgtcgattttgtggcgcacaaagatggaagcctaaggacgaccgtcgaagccagattataatgatggtgggtttctagtaacaatcttaggttaggattcaaactagtaaaaatgagaacttaagagccctactcgatcattgggtcgagtagaaccaaaatgtgacaaatttgaattactaaaatgcaatcaaaagaggatacaaataacaggtaaataaaagtgcaatcaacaggggatacaaataaatctaatggaatttctaaagatggattcattgataagggcaactagaatgttcatcagatgcctaaaaggcgccaggtagataccctcgacgaaagattcaaataccgggtaatttcaactgtcg

SEQ ID NO: 166404 - DNA, 745 bp, Arabidopsis thaliana landsberg
aatgtctttggggcgaatagggtaaggaaggatagcgtgaggtttctcaaggactcgggacttggcttagaaggtatatgcagcaaatgcggcgtgtgggaagcatatagggccagcggtatggtggaatagatgataggttgggtggttccacaagcaggctcgtttaaaccttatacatatggtgcatcatatggaaatccgggctggctaccgctggtggtgtacgtgttgagaactggtgaaagggattgatgtggagggcttgggttaaatgtagggcgatgcttgacaccgttagcggagctttgtggagtttacaatggcctatacattgctttggaacagagaattacgtgtttggagttttaggtgaattcagagttggttatttacaaaaaccgtctcaatatctagttgagcttttggcaaaaccaacaaaaatctcaaaatcttttaatgaattttggttttaaaaaataataataggccttttacccttttgcaaaatcaacaaccgttgtttttcctgacacggttgtactatgatttttttgtaaattaaaattaaattgtccatatttcacatgtatataaacaatctaattaccttgcagacatattagctaactttaagttctctttacatttaggattttatgcttttattttagttttggtggaggttgctccgattaatatatatgagggaagatgttgttagaccctgtttccaagacgaatt

SEQ ID NO: 166405 - DNA, 662 bp, Arabidopsis thaliana landsberg
tacgtacatgatactagagaagacttaaaagagctaaacatttaaagagtttatgttttgttgtaccattggttttgatgggtttctttgaccaggaggagaagcaaaaccaacacggcggaggaaaaggaagagcaagagtgttgtggtggcagaggagggtgaaaacggaggcaatgggtggtttagaaagagaaaattgagtgatgagcaagtaagaatgttggagattagctttgaagacgatcataagcttgaatccgagaggaaagatcggcttgcttctgagttagggcttgatcctcgtcaagtcgccgtctggttccaaaaccgccgtgcacggtggaagaacaaacgagtcgaggatgaatacactaaactcaagaatgcatacgaaaccaccgtcgttgagaaatgtcgtcttgattctgaggtacgttctcacattttctaaaagataagtaaattatttggtattttggttaataatctttaaatataatatagttatagcttttatttaagttgatcaaagataaaagttacccgtttttctcttttaatcaagagttcctatttgtgaacataaaatattgaagtgttttaccaaacaatgttgttatttttttctataaaggataaagatattttctaaattattt

SEQ ID NO: 166406 - DNA, 951 bp, Arabidopsis thaliana landsberg
atgaccaacaaccagatcccccttaccaccgttgacgtggagggaaaccctgttcctccaatccaggtaaacgctcctgaagtcaacgctcccgcagtcctagcaaagctgaggagcatgatggcacaactccagaagaaggtgaacgatcaggagcaagcaaaccgatccttggcccaacagctcgaagtggctacttctcaagggcaggtcaggaccacccgctttggcgcacaacactttcctgatcggtgagcagcggcagatctcaatccaacgagactcgtgttcaacacacaccggtaacacgacgaggccatttcggcggactgcgccagcactcggcggactgcgccagcactcggtggaacccgagcaaaacatgacgaaccgagtagaggaagccgacccgcaggtcccgattccccgagccgaatctgacgaggctgaccagatcaaagtctctaacggccaaaagattcggaggaaaacattagatgggctgaggagtaagctagggagtaggaaataaatgccatcaagctcttcctagccaatgcagatgccgagatgaagctcgtacgatcacagatgcatagcgctgtctcctcagtcccaaacatcgatcgcattctagaagtatctcacaacacgcctttcactcacaagatctctaacgcgataattttagacccggggaaactgagaatcgagtacttcaacgggtcatccgacccgaagggccatttgaaatctttcataatttctgtggcccgagccaagttcaaaccggaggagagaaatgctggtctctatcatctgttcgtcgagcacttgaaaggaccagccctagattggttctcaagactcgaagggaattctgtcgacagttttctggagctatcgacgctcttcctcaagcaatactcggtcgctgtctcaacagccgaa

SEQ ID NO: 166407 - DNA, 998 bp, Arabidopsis thaliana landsberg
  unsure (1)..(998): unsure at all n locations
agaatcaagacggatatcaatcagaaggcaagcatcatcccactgttagagcaatggaggaaacaagggtatgaagttaatccatctcaccttagaggtcttattaagaatcttagtgactgcaaaaactttactacagcacttgaggttagttaagttcgatctttattctctaactcgagtggtctttaggaaataacatagattttgatatgatatttgtaatgtgtcaggcatcaaagtggatgtttaaacacagtgtgtttgataattttccggaagattgtgcagctcagcttcatctagttaacactgttcttggtttggaagaagctgagaagatgttcaaaaacatcnccgagaagatgagggattactctgttctcttgagctcttacacgaaacctgtgagaacagtagataaagccgaggccacgtttaagagaatgagagagctagggttcttgttaaaaccctacctgttcaactctatgatttgtctctatggtcagctccagagactagatatggtcgagaagcttctatataagttgaagaagaacaatatggtagtcggcagtctcaaggtgttcaatgtttcgagagtatacgcgaatataaccgcgatgaagaagtttaaaacgtgggttagtaaagaaggaatcgaactagaaagagtcacaatcgttgcaatgacaaaagcttaccatagagctggttcaatataaaaggcgcgatagaggtgcatggtgataaagcagggagttaaccagacgtgtatcatctttggaatttgtacaagaagaaagggaagctgaaggaagatggatatcgaactgtgattaactcgttgttgaagttgatgatgtacaaggagcagagaatatatataaagagtggacgccaaaagggccaaagctagatataagcataccgggttcgctaatttctccgttttgcccggaaggaaaggcagcgaaggttgaagaattgattaa

SEQ ID NO: 166408 - DNA, 534 bp, Arabidopsis thaliana landsberg
gtggacatcctgatctccaacgcgggggtgcagatcatcaacccgatcgaccagttcgccttcgccgactggaagaagatgctggcgatccacctggacggtggcttcctcacgaccaaggccgcgttgaagcacatgtacaaggatgaccgtggtggcatcgtgatctacatgggctcggtgcactcgcacgaggcgtcgaagctgaaggcgccgtacgtcactgccaagcacggcctgcttggcctggcccgcacgctggccaaggaaggcgcgccgcacaacgtgcgttcgcatgtgatctgcccgggcttcgtgcgcacgccattggtcgacaagcagattccggagcaggcgaaagagctgggcatcagcgaggacgaggtgatcgagaacgtgatgttgaaggacaccgtcgatggtgtgttcaccacggtcgaagacatcgcgcaaaccgcgctgtacctggccaccttcccgtccgcggcgctgaccggtcagtcgatcgtggtcagccacggctggttcatgcag

SEQ ID NO: 166409 - DNA, 493 bp, Arabidopsis thaliana landsberg
gacgatcagaccaagcagatgctggagcgttaccgcgccgccacctggcaggcgcagcagctcaacgtctacgcgcagcagcttgaagagatcgccaaccagcaggaggccgagaaggcttcgctgcagcgccagctcaccgagatggacaacaccgatcgtgagatcatgccgctgatgctgcgcatgctcgacagcctcgacaagttcgtctccatggatctgccctttctgcgccaggagcgccaggaacgcatcgcctcgctcaagcgcctgatggcggaccccgaagccaatacctcggagaagttcaagcgcattctcgaagctttccagatcgaggcggattacggccgcaccctgggcgtggaacgcgccgaggtcgatggcaaggtggccgatgtgctgcatgtcgggcgcgtggcgctgttctatctctccatagacggcgatgccgccgggcgctgggacgccaacagcggcaagtgggaga

SEQ ID NO: 166410 - DNA, 2164 bp, Arabidopsis thaliana landsberg
  unsure (1)..(2164): unsure at all n locations
ctcacgaaattaatcccacgaggaagcttcacctccatactacntaagcatcatcggaaaccaatcttcgtattctctctccagactcaattttcttctccagtaaccacactcacctccaaaaaccctaaagatgatgagcaacagcaaaaactctccttcaccctcaactaccttatcgactcatgtggactatctccagattccgccaccgtagcctctcgtaagctcttactagattcaccagaacgacccaacacagttctcaaccttcttcgtgaccatggattcaccacagctcaaatctcatctctcgtcaagaaacgtcctgttctcttattagccaatgctgaatctgtcctcctcccgaaactcagcttctttctctcaattggtgtctcaaaatctttacttgctcgaactttagcttctgatccaaccattttgactagatcccttgttaatcagcttatcccttcttacaatttccttaaaagcgttcttgattccgatgagaagattgtggcggcgttgcggaggacgacttgggttttccttgaggatcacactaagaaccttgtcccaaacatcaactatatggcggagactggtgttcctgagaaatgtatcaagctgcttctcacgcattttcctgaagctgtgatgcagaagaaccatgagttccaagcaattgctaagcaagctcaagagatggggttcaatcctcaaaaatcaacatttgtgttggccattcatgctctctctgggaaaggaaacaaatcgatatgggacaaatgttttgaggtttatcagagatggggatggtcggaagatgatatcatgtgtgcgttcaagaagcaccctcattgtatgatgttgtctgagaggaagattaacagaacgatggaatattttgtgaatgagatgaatatggcgcctagatcgatcgcacagtgtccagtggtgctcttcttcagccttgagaagaggattatcccgaggtgttcggttactaaggttttggtatcgaacgggcttgtgaaagaggattggagcttgacgtctttgttggttccagtggagaaagtgttcttggagaagctcgtgatcaagtacgaagaggagttgcctgagttgatgaatctgtatctaggatgcaccaaactctgagcttttgtttttgactgttttcattatcaaatgtcagatgctgagagacatgaatctttgtgaaaagagtctagtgtgtaatccaattttggtagtgaaaggaaagctgattagcaagcccaacgtgtgttttaaagacagaacaattgaagacttgcatgtagaagtagaatcgtcatctcaatataagggccaaagccaagaatcggtctgcctatatgatttgtatacacacacgcacatatacatatacagacacgccttgatagagtatacaaacgtacatatgtatgtgttcataagaattggtgtgacagtaacagagattctaaatcttgcagacgagagaaagagagagagagagttttacaacaatatttcttacacgaaacgatgatcctcattcaccgaaccgacctgcaaaaaacgaatattttatcattagtgaggaataatacatagagactaataccaaatctatctgcactagtctaaatgaacttacaaagtaaggagatgtgaagacagttttcatttatcaacgcctacatcaagtgctttagagcccatcatcacattcgaatcgatttgcttatcaaatttcttctttctcctctcttcaaagtcttggtatccttccatctatccatttttatataaatgtatgttacacaaaacccaattcaaacaaacaactttaaaaagtgttctttcgaggttatggattattgaattaccagctgaaactgatccatggaaataggattgttatgcaaagaaaggttttgcaaactcttgcaatgtatcagcaatccatctggaatctggaaaacaacaagtgttacagatttcaaaggaagaagatagtgattcaataaacccaaaaacaaaaaaaaacacatttcaatctgtttacctggttcacttgattattgtctaaggaaagcgactttaactgaatcagattgcagagtgatgcaggaagctcttcaac

SEQ ID NO: 166411 - DNA, 291 bp, Arabidopsis thaliana landsberg
ctcgacggggtcagcgctaccgacgtgctcgacgccatcctgacgctgatgccgctcgacgatttcgtcgatgacgccgccttctgcatgcaggtagtgggcgatgccaacaagcgcgaaccggtgatggatgccttcgaagccatcgtgaagaagcacgaacccaaaatgggcctcgcctcgctggagcgcttcgccttttacgagcgggtgaggcagggctatgccatcgtccagaccggcgagcggcggctctatggcaatatcctgctcaagaaaggcatcatccgg

SEQ ID NO: 166412 - DNA, 1359 bp, Arabidopsis thaliana landsberg
atctatatatgtagcaagtgtgtgttagtacctctgagaaaaggaagatttggttcttcatatttctatttcggttgcgctaagtacccaccgtcggaggtcattgatgttcctcagcaccatgaccataaactcaagctagagatggtgaaaagttgcttctcttgtgccacttgtggaaaggatagtgatggatattcatacaagtgtcatgaatgcgatttgaagcttcatgtaaactgccaaaagcatccggccgaggtaacccatttttcccatcccttacaccctctaagactcgtcaaggttgaaccacctgcttaataccgataagaaatgtcgtttgtgtggagaaaaaacttgctaattctgaagtcttttatcattgttccgcttgtaactttagcttagatctccaatgtattttttatccaccaaaacaaaatcctcacgacccaaacatccatggccatcaactcacccttatgccaaaatccatctctttttcttgtacctcttgcgggctaaaaggagaccggagcccatatgtatgtcttccctgtgatttcacaagccacaatgattgctctggatttccatgggtcataaacatcaaccgtcatgaccatcgcgtttctcgcacttctcttattggtgcagtgaattcggtatgtggaatttgtcgtaagaaaatggattggagttgtggaggttatttttgtaagaggtgtcccacctcagtgtttcataccaagtgcgctactagaaaagatgtatgggacggcaaagaaatgaaagacgaagctgaagaagaggaagatattcaatcgttcaaggttatcgatgaaaacacaatacaacatgtcagccataaagagcataacctaaggcttgacaagtctggtatctttattgaggataggatttgtgaggcatgcgtttatcctatctatcaccactacttctatagctgcatgagttgtagtttcattctccacgagagttgcgcctatctgcctctatggaaacgacatgtggtaagcaatgaccgacatagctataaatattgggattatttaataagatgtacggcatgtggattgctttccaatggttttagatacgaagcaatgtacgcttcgttggatttgcgatatgcttcagttactgagccatttgtccacaaaagtcatcctcatcccttattttacacatcgccaagaggaatctgcagtgtttgcaacgacgaggcacatcatgtgctcagatgcatcgaagatgattgtggatacgtgatggactacaagtgtgctctggtaccatatgaggtaaaacataatgttgaccagcactttctct

SEQ ID NO: 166413 - DNA, 136 bp, Arabidopsis thaliana landsberg
gtgacgcgaaagtgaatgccaagtcagcgtgaacagtacgggaatattgttcacctatttataggcacgggtcgcagcccatgcaaaattacatccaggccctttgcttttggcaataactctatagtaatctatc

SEQ ID NO: 166414 - DNA, 2015 bp, Arabidopsis thaliana landsberg
ctttaaggaactaagaaatataacaaatccaacacaaaaccatgtgtgaggctatgaagtaaagttgaagtagatgttgtcgccgttcgccgctcatagccgatatggtacgaagcgtaagggaactccaaaactactgaaaaccgtcaaagcttcaagaaataagtccaccggtttttaactagagaatcctaccaactacatcatcaaatctgtaaagaaaagatcttcacaagggcaatgactcccgaactccaaagaacatcgacgtaggtattaagacgatggagcttttcagcaacacctaaaaacgaaaaggaaaacactcgtgtccatagatcaattagacaaatagcctcaattgtagatcattcgccatctgagatcgattccagtgagaaaaatcatcattgattataaaagcaagcttgattcttctaggtttcactgttcataaaccaatcgaacatcaaaatagagatttacagctaaaagcaatattaatgtgcaatgaaattgttttcttttctgcaacttaagatgcaactctttggattgattcctgcaaatcgcaaactcaaaagatcaaattggataataaacacctttaagcaaaaaaaacacctaaatttccaatagaggatctatgagattattgaaagaaaaaaaaaaacatcagatacactgataagaaaagtagatccggccaacgatggtcatggaattcgaacgatgtcgggcaagagccagccatcactgctaaaaacgacagagatgttagatataaaacccaactatattgaaacacataaacgtcggaatgccatcaggccggcgaaacaaaagagaaaactttcccttttctctaagattttttatagagagaagagagagaaatctcggaaacaatctatttctttctcattttgttcttttttgtttgtttaaatgtgtaacttaagaaaaaagaataaaacaaaaaaaggcatcaacaatttaaaacgtgcgtgaaaataatacgtcgtcgctttgagactttccttttgagaaacatagagctgttgttagtacttgagatactcggtaacatcagtaggtaacatgcatttgcccacccattttttttatttttttaggtttaaatttccattaaagataaaagcaagttacaaaacaaagagtccaaacaaaggcacgcaagcccgaaaaatatacacggcaagaagcccaaatccaagtcacgcaggcccgaaactaaacttgaacggcccaacaagacccaaacagcccaaaaagaagaacagagaacgaaggaactgcccttagctgaagaaacgaaaccaagtagagagcagagaggatcttggagaatcaaattcactacgccgagaaatgggatcaagctttgaccatagaataaccttaagttcctcgatgatcaaagcagaggtacggggagcatgagaatggatccgacgattgcgttctttccataagagataaatagaggcttggaacactagcttgatgatgagacagagattagcatcacacgaagccgaattaatccataagaggcaggccatgaaggggaccggaggagataatcttgttctattcctgaagtgactccagaccgccagactaaagtcacactcaaagaagaggtgatctctagactccgaacttccagagcaaaggaaacaatccgtgggaatagaaattctccaactccgcattcggtccctagtgtgaagccctgttccaagccacaacccaattaatgaacgcatgctttggaatatggtccttaaaccatatagatttatgccacagaaccgaacaggtagatgggtgcaaagcgagccaagttagagtagaggagaacaatggtgtgggtggatgatgctcgagcttccaaagatagacctcatccacttcacaatcaatgatataaatccaatatggcagggcgtttttgatcgtcgaaatgatgggagtcgtgcttcgagaag

SEQ ID NO: 166415 - DNA, 874 bp, Arabidopsis thaliana landsberg
tcaggtgacgtatctccgttgtgggggtatgatcctctgcaccgcgatcaatcattgcctctgcgacggcattggcacatcgcagttcctacatgcatgggcccatgcgaccactagccaagctcatcttccgacccgaccattccactcccgtcacgtattagatccgcgaaaccctccacgtgtcacacactcacatcccggtttcacccgaaccaccaccgtagacaaaagctccaccttcgacatttccaagtatttacagtcccaaccattggctcctggcaccttaaccttcaaccaatctcatctcctacgcttaaagaaaacctgcgctccttcgctaaaatgcaccacgttcgaggcactagcggctaacacttggcgctcgtgggctcaatctctagatttaccaatgaccatgctggtcaaactcttattctcagtcaatatgagaaaacgactaactccagaacttccccaagggtattacggtaatggattcgtactagcttgcgccgagagcaaggtacaagacctagtcaatggtaatatttaccacgctgtaaaatcgatacaagaggcaaaatcaagaattaccgacgaatatgtaagatcagcgatagatttactggaggataaaacggtgaaaacggacgtctcgtgcagtttggtcatttcacaatgggcgaaattgggattagaggagttggacttgggaggaggaaagccaatgtatatgggtcctttgacgagtgatatctactgtttatttttacccgtggcgagcgataatgatgccatcagagttcaaatgtccctgccggaggaagttgtgaagagactagagtattgcatggttaagtttttagac

SEQ ID NO: 166416 - DNA, 871 bp, Arabidopsis thaliana landsberg
tggatccgcttgggggcaagaaggtttatccaagtcagattttcacacatcccttgcggatgggaccagttcagttacgctctcgggtactacaagaataataatatgatgaaatcatttaaactcttgaggttttttgattatttctatacctacaatgattttgttttctatgaaatctatgatttcgactctggtttatggaaaactcttgatgtcactccatactggcgtataaggttttttgatgatattggcgtttctctcaagggaaacacttactggtgcgctaaagaaaggaagccagagtggaacgcagacccttttatcattgttgatcacatcatctgttttgattttacaagtgagaggtttggtccgcttctgcctttgccgtttagagctatgaaggagagtcttgtgactctatcttgtgttagggaagagaagcttgctgctttattttgtcgcgatgttgttgttgaggtatggattacgactacgattgaatccgataaggtgtcgtggagcaagtttttgacctttggtgtgggtgactgcccgatgatttattcttgtacagggagtttcttcattgacgaggtgaacaaagtcgccgtgattttcgggcaaccgttgaaacgcgacaaagttttcatcattggagaggctggacaagtccgagatgttgatctcggagaacctgcccaccaagatagttggctatatgtgtgtccttatgttccaagtttagtgcaaatcaagcaacctccaggatgcaaaaggagaagacaaagcagttcagaaaaccgtcgatataagctgaaacatgttgagacttgtcgaacttgaaaagtgtcatattgccatg

SEQ ID NO: 166417 - DNA, 411 bp, Arabidopsis thaliana landsberg
atgagaagaatcgtcggttcaatttcgagtcttgctaaagataagctctcttcatcttcttattcttcgtctagacaaattttcactgcgcgttcatcttcttggcaacgagatgcatcaagtaagctctcagaagcttctttacctggaaaccacataaaatgggcttcgcttggttcagtcagaaattcgagattcgcatctggttttacaccattgcagcaaaaacctttggattcaatcatggatttggccagagccaagactaaatcccctgaagaactcacttcgatctgggacgatgtaatctcaaaatttctctttttatgtgaaattttctgtctttcaattgcatttggttggatgttactacattttcaatttgacagtatcatttgggacgaggtcata

SEQ ID NO: 166418 - DNA, 2098 bp, Arabidopsis thaliana landsberg
caaaggatacaacaacttcaaaaccaacaatcccaacctctcgtaccgcagcaccaacgttgctaatccacaagaccaagtgtatcctccacaccaacaacaaggtcagaacaaaccttttgttccctacaatcaaggttttgtttccaagcagcaatttcaggggaactactagccgcaaccaccacctgaatttgcacctcagcaaaaccaaggtcctgctgccctgatgctgaaatgaaacagatgctacagcagctgctacagggacaggcatcgagctccatgaaaattgctaagaagttatctgaattacaccataagttggactgcagctacaatgacctgaatgccaaagtggagacattgaataccaaagtccgatacttggaaggacaattagcatctacctcagcgcccaaagttacaggacttcctgggaagtcaatacagaatccaaaggagtatgctaatgttcacgccatcaccataagaagtggaagagagttatctactggagagagacccaagtcagtcactgaggacagtgcatactaaaatggggaggatttcagtctcaataaagatcaagctggcaaacaactcgagcaggcattcgaccagtcactcgagcagccactcgaccagtcactcgaccagtcactcgagcagccactcgaccactttactcgactgaccttccgagcaacatcaccaactgctccaaaactagttgctgtcaaaaacaaagaaaaggtcttcattcctcctccttacaagcccccacttccattttctggtcgacacaagaaagagttagaagataagtacagagttatgtttgtcaagaacatcaaagaagtcgaattaaggatacctcttgctgatgctctcacgcgtatcccagattcccaaaagttcctcaaagacttgatcatgggagagaattcaagaggtttagaaaacaacagttctgagccatgagtgcagtgccatcatacatgagaacgatgtctcagaaaagctaggagaccctggttcattgactcttccatgctccctaggttcattgactttcaataaatgcctttgtgacctaggagcataagtaaatctcatgccactctcagtagctgagagattgggttttaacatgtataaatactgcaatatctccttaatcttggttgataggtctgttaaactacctcatgtgttattagaagatttgcctatcaagattggaaatgtggaggtgcctacagacttcgtagtgctaaacacggatgaagaaccaaaagatcccttgatattaggaaggccctttttggctacagctggagcaatcatagatgttaagcaaggaaaaattaatcttaatttgggagaggatgtcaaaatgaagtttgacatcagggacgctatgaagaagccaacaatagaaggacaaaccttcttagttgaggaaatggatcagctaggtaatgaactgctagaggagcttgtttacagagatcaccttcaaactactttaaccaaaagtagtgaagctggatttctctccagtgagaccttgagctatgagatgtcattagactcacacaacgaagtaccaggataagagatctttaaaggtgtcattgcgtcagaaatagaggatgttacattgaacgaggaaggctcaattgatactcgactagagtgctcaaccaaacagctaaactcaagcatgagggaatcaaatgattggttagaactcaaggagaggtctaaatggcacgatagagttataagagagctaacacacactgtgaaagagctaaaggatcaagtcaaggagctccatgggaaagccaaccaagcaccactcgacatcaaggcgtcccaaatgatgaagttagtcctatggtagaaaagaagatgtgaattcacatcaaaacagtctagaaaagacgactatccagatgatgaaaaaggagcttaccaagaaagggtcattgagtactcaattacagacttgtcatgagagcatgctgaatttgatgttgtatctactaaggaaggagaggatacgtcaattctactctatcaccctcct

SEQ ID NO: 166419 - DNA, 235 bp, Arabidopsis thaliana landsberg
taatgtgagttactatctaaacttcaaaaatcatttatatttttatagcgtatacagaccacatagggaagagtgcttatgtgtatagaacaactaatcacatagtgaatggattagcaaactatgcattttagttaccgcttagtttgcatttatttgatgtttgtctgatacttgtagtcttacattgttagaggatacacataagatgttgcttatacaaagtgttcgactg

SEQ ID NO: 166420 - DNA, 597 bp, Arabidopsis thaliana landsberg
gtgtgaaaggtgaaaattatacggatgcatctgacgcagcagatttttacggcaacttaactgatatcatagaacttgagtatgagggggtggtcagtttgaaaatcacaatttttaaatgttcgtggtatgaccctaagctcggaagaggtactcggaaatataacaaatacaaaccttttattttaggtacttatggtatatatatattgtcatttagtttttctagttcatatacaaatatctaattctccaaatatggtgcatttacaaacagcatctcaggcggaacaagtgtgctttattccttatccatacacgaaaaaaataaagttggagtggctcaatgttttaaaagtaaatccaaggggaaacatattaggagaatatgaaaataaagactcgagtttattgcaaacagaaaatgatgatgctgttttaataacaacaatagaagatcttgtactcgacaatttaacaatcaatcgcaaccccataaacctcgatttagatgccggagatgccgatccagaagatgaattcctatgtaatttatcgtcttctgatgatgaagaacatgaagacgaagaacaatat

SEQ ID NO: 166421 - DNA, 242 bp, Arabidopsis thaliana landsberg
  unsure (1)..(242): unsure at all n locations
gttattgccagcggnacatcaaaccgtcagacccgggcgctggccaaatacgttatcgacaatgtgcggtatcataaagtcgttgtcgtcgcctgcgaaggcgaggacttgggcgaatgggtattggtcgatctcggcgacatcgtcgtgcactgtatgcaacctaccattcggtaatactactaccttgaagaattgtggggagacaagccggtgcgcgtgcgccttgcgcaatgaaactg

SEQ ID NO: 166422 - DNA, 307 bp, Arabidopsis thaliana landsberg
atggctcttctatggggaagaaaaggtggaatcttcaagagatggcacatgttcgagctccgtaacttgttctccaagcatctcaaagccctaaatcatcataacaacgttggcaacgtccgttatctcacacgttacggcgagaaacagctctctttcgatgagactcccatatttaacgttaagatgcatcgccctacatccatgaggttcctcttgccttgcattgctcgtcacgctgactttgactacgatttcgaattggatagtactcaagatgatactgacgatgttagatcttacggct

SEQ ID NO: 166423 - DNA, 1990 bp, Arabidopsis thaliana landsberg
atgtgcatcgattacagaaagctgaatgctgctaccaggaaagaccatttccccttaccatttatcgatcagatgttgcagaggttagcaaatcataagtattattgcttccttgatggatactcatgattctttcaaatccctattcatccagatgaccaggagaaaacgactttcacctgcccctatggtacatttacttattggagaatgccctttggtctttgtaatgctcttgcaacattttagagaggtatgatgtctatcttcatagacatgattgaggacatcatggaagttttcatggatgatttttcaggttatggatcatcgtttgaggattgcttagagaatttctacaaagtgttggcaagatgtgaggagaaacatctagttttgaattgggagacatgtcactttatggtgtaggatgggatagttctcggacacaagatttctgagcatggaatagaaagtgatagtgctaagattgaggttatgacaagtcttcaagcgcttgataatgtcaaaacggtgaggagtttccttggacatgctggtttcaacaaaagattcatcaaggatttcagtaaaatcgcaagaccactaaccgctctactctgcaaagaagtcaaattcgagtttacacaagagtgtcatgatgcctttgagcagataaaacaatctttgatcagcgcaccgattgttcaaccaccagactgggatctaccttttgaggtaatgtgtgatgcaagtgattttgcagttggggctgttttaggactgaggaaagataagaaacttcatgccatctactatgcaagtaggacacttgatgatgctcaaaggaattatgcaactacagaaaaggagttgttagttgtggtgtttgctttctagaaattgagatcttatcttgttggatccaaggtttcacagatcatgctgccttgaagtatttgatgcaaaagaaggatgctaagccaagacatttgagatggattttgcttcttcaaaaatttgacatagaggttagagatcaaaaaggagttgagaatggtgtagctgatcatttttcacgcattaggatcgatgatgatgtctctataaacgatttcttgcctgaagagaacatatacatgactgatacagctaagaagatgactacaaacttgatagtttgcagaatcgagcttcagtgtcgatcgacactcccattatgtcgatcgacactcacatttcagaggaagtagatagtcgaagttgtgtgatggtgtcgatcgacaccactgcacctgtcgatcgacactcttctgaatcaatgagaaatgggtcaccaactgagaattgcgccgtcacagcggtcgagaaagattacccatggtatgctgatattgttaattacctagctgcagatgtggaacctgataagttcacagattacaacaaaaagagattccttagagagtataggcgatattattgggatgaccttatcataggtaattagcgacaacataaaaggtagcttagtagtcgctgaatcaaataacatgactatttggcgactaaaacacgtagtcggtaatccatgcgtcgctaaattaattagtcgccaaatcgtagccgagtagcgactgagctacgactaaactatacgtcgctaattgagtcgctcaacagcgccatttggcgactgttaggcgacattgttgccactatatagtgacacttaggcgactatttggtggctaatgtagcgactgttttgctactacttggcgacttttttgtttaagtattggtgactgaattgcgaccatttgacgactgattacaggtcgaattattgattatacattctgtttttttagttaaaactgtaattaacaaacttgagaaagcaaataaaaaactgtatttcacaaacaaaactgtaattaactaacaagctgtattttataaatcagaaccttgattcaaatacaca

SEQ ID NO: 166424 - DNA, 680 bp, Arabidopsis thaliana landsberg
ccctcaaacgagcctaaaaaatttttatgtgtccttctaatctatggcgctggaaacgggtccaaagggcttcatgtatacacatctttgtgtatcttcttctaatatcctatttaagatcacactttatgcatatatataagcaagtgtattcatggttggattatggtgatcttttggacagcaacttactgatcagacaagagctgaagcagcggaatctttgtgctttgaagcaaaatgcagagtacatgaccctgtttatgggtgcgccgccattattcatttacttaaaactcagattcagaaaactcagaatgaattagccaaaactcaagctgagattgctgtttctcaaaccaaacttagccaaacccaaaattctgattttatgtaatatctctcagttccatcaataaaatctcctctgcatttttgtttccctgtaacttataagattcaactaactttgatatatcaaactcataatcataatcaagaggccattagctatactgaaaagtgtatcacaaaacacaaaatgtaaacaagtttgaatagtttatgattatttattacaaatccataactcaggactacaattatacagtcttcaccgatattttgagaaccataatgtaaaaaagagaaagagaaaaaaatggaaaaacatgaaacaa

SEQ ID NO: 166425 - DNA, 523 bp, Arabidopsis thaliana landsberg
aagaaaccgagagagagagtgagcggaatcatgacttctccgggaaaatctccgagatccgaccggaaatcaccgacggttgtcaccgtccagccgtcttcttccagattcccgatcagcacacctactgctggagctcaacgtaagatcgggatcgctgtcgatctaagcgacgagagtgcgtacgcagttcaatgggctgttcagaactatctccgatcaggtgacgccgttgttctccttcatgttcaaccgacgagtgtactttacggcgccgattggggcgctatggatttgtcgccgcagtgggatccaaataaccaatagtctcagaggaagcttgaggacgatttcgacattgtcactaataagaaagcgagcgacgttgctcagcctttggttgaggcggatattccgtttaagatccatatcgtcaaggatcacgatatgaaggagaggctttgtttggaggtggagaggtagggctaagtactttgattatgggtagtagaggatttggtgc

SEQ ID NO: 166426 - DNA, 403 bp, Arabidopsis thaliana landsberg
ttctctatcttcgccggagtatatcagtgtggatatatccggcgttggatcggtgggccgagtcgcgagtttgattgaatgtgaaccggcgtttcggagatcgaaatctatggcgatcccgattaaaccggattcggttattgattccggtttggatcatggtaggagtaagaaaacgtcgtcgttttggagaatttttatgggaaacagaggagatactaaaccggctattatgaagaaatcaagatccgttgcggtcgccggagaatttggattttctccggttccggttccggcgaccgggaagggtaaaggctggaattttccgagtccgatcaaggttttccggcaatctcgagtctcgaagatgatatttcaacaacggtctccattgtatagaggt

SEQ ID NO: 166427 - DNA, 307 bp, Arabidopsis thaliana landsberg
  unsure (1)..(307): unsure at all n locations
agcgatgtcctccttgtcaaacccgtcgataatctcggcggcgaaggcgaccaagttaaagtccgcgccggctacgcgcgtaattatctccttccgcgcgggattgcggtgccgctcaacggggccaatcgcaagcgggtcgaggcgctccgcaaacgccgcgccgagcgcgaggcgcangagctttccggcgcgcaggagctgggcaagaaattggaaaaggccagcctcgtgttcgtcgtgaagacgggcgagggcggcaagatgttcggcgccatcacgggcaacgatatccacgatcaactgg

SEQ ID NO: 166428 - DNA, 1446 bp, Arabidopsis thaliana landsberg
attactggagctgcgcaaatggatggtggaattcttgtggtttcaggaccagatggacccatgccgcagacaaaggaacatatactacttgctcgccaggttcgtattattaaaccatgaacacttgaagatactcagttgagttatgttgtttgcctcaatttgaattatgcaatgttccacaggttggtgttccctcacttgtgtgctttttgaataaagttgatgtggtggatgaccctgagctgttggagcttgttgagatggaactacgtggtttgtacatttttaatttcacaaaacttcttctttcagcatatgaagtatgtacttgcttgctcacatcaagtcttgtctctatacagaactcctcagcttctacaagtttcctggggacgatattcccatcatccgaggatctgctctgtccgcattacagggcaccaatgatgaaattggaaggcaagctatattaaagctaatggatgctgttgatgaatacatacctgaccctgttcgcgtccttgacaagcctttcttgatgccaattgaagatgttttctcaattcaagtacacttagtctacatccttgttgttttctgattcactctttaaaaaaaaaaaatcagttctgatacatttctttttcttaaagggacgtggaactgttgcaaccggtcgtatcgaacagggagtcattaaagtgggtgaagaagttgagatattgggtttacgtgaggtgagagtgcataaatattgtgtttgtacagccaaactggtgttttctggggggctattacaattaagcattttcttaagcataactgcgagatttgattttcaggggggtgttccactgaaatcgactgtaactggggttgagatgttcaagaagattttggataatggacaggtaaagccaatatcaaaagattacaaagacaagttctgggcatgtaagatactgatcaaaccttggcttctattatgctaggctggtgataatgtaggacttcttctgcgtgggctaaagagagaagacattcagcgtggaatggtaagcttaggcatccttacgacgaaaaccaactttactgaaaaccaactgaactaaagtttaatcctctgcttttacgtattaggtgattgctaagcctggttcatgcaagacatacaagaagtttgaagcagagatttacgtgctcacaaaggatgaaggtggacgtcacactgcatttttctctaactacaggcctcagttttacttgaggactgcagatatcactggcaaagtagaattacccgaaaacgtgaagatggttatgcctggtgacaatgtcacagctgttttcgagttaatcatgcctgtcccactcgaaacaggtaaaacaattttacagaaactttcttttggtacttaaacaacttggatttctgacgttaga

SEQ ID NO: 166429 - DNA, 955 bp, Arabidopsis thaliana landsberg
gagctactcctaaaggggtactgaagattatgaaagttgaaggcttgactatatatcatgttaaaagccatttacaggttcttactattctttagttccctgctaatgcatataattgtcttctaatattagattgtgtttttcagaaatataggacagctagatatcggccagaaccatcagaaactggtaaataccgaactcattcccatcttccttgatgattttacctgaagaattcaatgtaaaaactaaagtttctttgatcactacaggttcgccagaaaggaagttgacaccgcttgaacatataacatctcttgatttgaaagggtaaggttttcttgtcggttaacatcacaatgctacacgctacaccatttttaactgattcttacctcatacatatttatactgcagtgggataggtattacagaggctctacgacttcagatggaagtacagaagcaactccatgagcagctcgaggtatgttcataaaggcattgccattagctttggttttttatacttatgtgtttggattgtagctgctaaagagaaaatgtgaaacctgtttataaagtattctgaatttgggtatgacatgtgttcttttcctttgcctgcagattcaaagaaacctgcaactccgaatagaagaacaaggcaagtacctgcaaatgatgttcgagaagcaaaactctggtcttaccaaagggacagcctcaacatcagattccgcagccaaatctgaacaagaagacaagaagactgctgattcgaaggaggttccagaagaagaaaccaggaaatgtgaggaactagaatctccacagccaaagcgtcccaaaatcgataattgaaagtattggtcttttgctggataatctcggagtttcagagttaacagtgatagagagaacgagctcttatcttgaggttcttcaggac

SEQ ID NO: 166430 - DNA, 1641 bp, Arabidopsis thaliana landsberg
actatctccgtaagaaagttaactctcaaaagatcgatcttgatgtcattcgtgaagttgatctaaacaagcttgagccttgggatattcaaggttaaaccctaaatatgaaaaaaaactctttcatttctacgaactctctatttctttgttctttatttttgaaccattttggtatgcaaatgcagaggaatgtagaatcggttcaacgccacaaaacgactggtacttcttcagccacaaggacaagaagtatccaaccgggaccaggacgaaccgggcaacagtcgctggattctggaaagctaccggacgtgacaaaatcatctgcagttgtgtccggagaattggactgaggaagacactcgtgttctacaaaggaagagctcctcacggtcagaaatccgactggatcatgcatgagtatcgcctcgacgatactccaatgtctaatgtaagtatatatagcaatcatcaatttgcagtttaggttagaataaacaaattacaaacttatagtcaaagaattagctagattcgtttcatgctataaaaggttttggttcatttagtacgcactagagccttcttttagcatctgcaattaaagtaatcgaacatgattctctgagttacaataagataatttcttatgaaattaacacatcatatatacatttatataaaaagattttttcacaaggcttaaaatagtttaacacggctctacaaacaatacgtagttaactagttatggttgcatatccaaaagaaaaaccaacataaaagatttttttttttgtttcaaaataaaagttgcatttttacatcatcaagatttaatcatctcttattgcatttcataagatcgatttgtgttccattatcagggctatgctgatgttgttacagaagatccaatgagctataacgaagaaggttgggtggtatgtcgagtgttcaggaagaagaactatcaaaagattgacgattgtcctaaaatcactctatcttctttacctgatgacacggaggaagagaagaggcccacctttcacaacactcaaaacgttaccggtttagaccatgttcttctctacatggaccgtaccggttctaacatttgcatgcccgagagccaaacaacgactcaacatcaagatgatgtcttattcatgcaactcccaagtcttgagacacctaaatccgagagcccggtcgaccaaagtttcctgactccaagcaaactcgatttctctcccgttcaagagaagataaccgaaagaccggtttgcagcaactgggctagtcttgaccggctcgtagcttggcaattgaacaatggtcatcataatccgtgtcatcgtaagagttttgatgaagaagaagaaaatggtgatactatgatgcatcgatgggatcttcattggaataatgatgataatgttgatctttggagtagtttcactcagtcttcttcgtctttagacccacttcttcatttatctgtatgattatctatacatacacatacacaaaatataaaataaagtttgttaaaaaatgtctcatgatctattcatagtacgtcttgattttggggtttaacaaatgttaatggtggagggttattcttttata

SEQ ID NO: 166431 - DNA, 482 bp, Arabidopsis thaliana landsberg; identical to SEQ ID NO: 68532
  unsure (1)..(482): unsure at all n locations

SEQ ID NO: 166432 - DNA, 320 bp, Arabidopsis thaliana landsberg
atggttgattttgtgctgaatggcaaaccagtgagtgcacaggtggacggcgacacgccactgctgtgggtgttgcgcgatgaacttgaaatgactggcaccaagtacggctgcggcatgggcctttgcggcgcctgtacagaccatgtggaaggacaagccattcgatcgtgccaaacccccatttcaacggtggcaggcaaacacgtgaccaccattgaacaaatgcacgacgacaaggtgggtgctgccgtgcaggccgcctggcaaaagcttgatgttgtgcagtgtggatactgtcagtctggccagatcatgca

SEQ ID NO: 166433 - DNA, 461 bp, Arabidopsis thaliana landsberg
  unsure (1)..(461): unsure at all n locations
nnnnnnnnnnnnnnnnnnnnnnnnnnnnnccaacctttcttcatgctcaatacgctctggctggctttctttattatcgcggcgctgtgcgggctgcaccaatggctattcctgcacgataccgaggtcttcgcccgcatcgtgcacagcctgttcgacatggccgagctctcggtcaagctcatggtgctgctcttcggcctgctgacgctgtggctgggcttcctgcgcatcgccgaagcggccggcctgatcaacgttcttgccaggctgctgagcccggtgttccgccgtctcatgcccgaggtgcccgcaggccacccggcgctcggactcatcaccctgaacttcgccgccaatgcgctgggcctggacaatgcggcgacccccatcggcctgcgcgccatgcacgcgctgcanagcctgaatcccgaccccaaaccgccaccaacgcacaaatc

SEQ ID NO: 166434 - DNA, 1101 bp, Arabidopsis thaliana landsberg
agcatgggagacaaaatcgacaaacctgtcaagatgcgagccgttgtaatcttcgctctcggtatctggatccttgacgtggctaacaacactctccaaggaccttgtcgcgctttcctcggtgatttagccgctggagacgctaagaaaacgcgaacagcaaacgcgtttttctctttcttcatggctgttgggaacgttctgggatacgcggcaggatcatacactaacctctacaagatcttccctttcccaatgactaaagcatgtgacatatattgcgcaaatctcaagagttgtttcttcctttccatcactctcctcctagtcgtcaccatcatagctctttggtacgtggaagacaagcaatggtcgcctaaagcagactcggacaacgagaaaactccgttctttggtgagatctttggagctttcaaggtgatgaaacgtccaatgtggatgctattaatcgtcacggccttgaactggatcgcatggttcccttttcttttatacgataccgattggatgggtcgtgaagtgtacggtggagactcaaaaggagatgacaaaatgaagaaactatacaaccaagggattcacgttggtgcgttgggattgatgcttaactctatcgttcttggaatcgtctcgcttggtattgaaggtattagcaagaaaataggtggagctaaaaggctttggggagctgtgaatatcatccttgctgtgtgtttggcaatgacggttttggttactaaaaaggcggaggagcaccggagaatcgctggtccgatggcccttcctaccgatggcatcagagctggagcattgactctctttgctcttcttggaattcctcttgctgtaagttcaacatgtcttttatcaaatttttgttactattgtcattaatggtttataattcgttaacattaataatctatttttttttttgtatttttatagattacattcagtattccgtttgcactagcttccataatctcaaatagttccggcgccggtcaaggtattttaattaacctatctttttaaaaagtattatgtatctgttgaaaaaatagtaatcgttttgtg

SEQ ID NO: 166435 - DNA, 1546 bp, Arabidopsis thaliana landsberg
agtcattaggagaaaaggtaaatgatgagtttgatgactctgaggctaagtcatgtcttactattccagatgtggctgataaaatcgatgagcttgtgaatgatgtgatcaatttggagagtttgttctcatctcaagcagctttaatacacagactaagagaagaaatcgatgatctcaaagcacagattagagctctacaaaaagaaaacaattcatctcaaactgatgacaatatggacatgggaaagaagttgaaagagatggaggaaaaggtgaatggtgttaaagatatagaccaagaagttgaagaaaagagtgacaacattgataaacatcttacgagagcacatatgaaactaagtttcttatccaagagattaaaaagcttgacgcaagaaggggaagatgaagaattaaaggctactaatgtgccaattcaagatataggatctttgactgatacaaagtttccagaggaaaacattgatgataccgttgtgtctgaaaatgctttagacattaaatcagcatctgaggtggtttttgctgaaaaggatctttccgatgaagttaaccaagaagagactattgaaactaaaacaaaggaagcttcgttatctgatttagagaaacacatctcatcaccaaaatcagacatcataacaacacaagagtcatcagatgagttattcttgcagaagttgctcgcacatgggatcgaaggcagagaaaaacatttgttaactgaatacaccaaagtacttcggaactataaagaagtgaagaagttgctacatgaaactgaaactaaactgaaaaatgtaaacaccttgaaagatgaaggcaaggatcaacaacggggccaattgttcatgctaatttgcagagaagataacgccacaaatgcaataactggtcaaaaacagaggatgtcaccaaatgaagagcaattgggagcacgagttgatgcattactaagcgagaacttgaacttattggtgaggtttagcaactcttttggcaaaatacaacagtttgacacagggatcaaagacttacatgttgagatgttgaagatcataaaacaaaagaatcaagatggaggaaaaaacactctgagatcaaatgttcgtcccatatacaaacacctcagcgagattcgcaccgaaatgactgtttggttagagaagagtttgcttttaaaagaagaaatcaacatcagagcttcaactttgagtgacatacacaatgagataacagaagctctcaaaacagattctgaagactctgaaataaaacttacaatctaccaaggagccaaattcgaaggcgaggtttccaacatgaagaaggaaaacaataggattgcagaagagttgcacacaggtttagatcaagttacaaaactgatgaaggatgctgatacaacactcgagaaactaagtgaggagttttcactttatgaatcaaatacacagtcttcgcaagatcgttctcgtattcctttaaggtcatttatcttcgatagaaaaccgaagaaagc

SEQ ID NO: 166436 - DNA, 1519 bp, Arabidopsis thaliana landsberg
atacatgtgaccgaatagtagaaagcctttgcaaatgcaagagccaacaactttggcgtctgccatctgcacaagcatgcgatttaattgaaaatgataaccatggagttgatttggatatgaggatagccagtgttcttcaaagcacaggacaccattatgatggtgggttttggactgattttgtgaagcctgagacaccggaaaacaaaaggcatgtggcaattgttacaacagctagtcttccttggatgaccggaacagctgtaaatccgctattcagagcggcgtatttggcaaaagctgcaaaacagagtgttactctcgtggttccttggctctgcgaatctgatcaagaactagtgtatccaaacaatctcaccttcagctcacctgaagaacaagagagttatatacgtaaatggttggaggaaaggattggtttcaaggctgattttaaaatctccttttacccaggaaaggtatgttgatcattttggattctatttttttatttctatggctgccaatatgtttttcaattatttctatagagtaactgagctttctggtttcttatagttttcaaaagaaaggcgcagcatatttcctgctggtgacacttctcaatttatatcgtcaaaagatgctgacattgctatacttgaagaacctgaacatctcaactggtattatcacggcaagcgttggactgataaattcaaccatgttgttggaattgtccacacaaactacttagagtacatcaagagggagaagaatggagctcttcaagcattttttgtgaaccatgtaaacaattgggtcacacgagcgtattgtgacaaggtgaatcatctactctatttcttcaagccttgttctgttgcttgaatcctctttactaataaatagtacacgagctaatacatattttctactcatgaaaggttcttcgcctctctgcggcaacacaagatttaccaaagtctgttgtatgcaatgtccatggtgtcaatcccaagttccttatgattggggagaaaattgctgaagagagatcccgtggtgaacaagctttctcaaaaggtgcatacttcttaggaaaaatggtgtgggctaaaggatacagagaactaatagatctgatggctaaacacaaaagcgaacttgggagcttcaatctagatgtatatgggaacggtgaagatgcagtcgaggtccaacgtgcagcaaagaaacatgacttgaatctcaatttcctcaaaggaagggaccacgctgacgatgctcttcacaagtaagttctgaaaaatgtggctttgcttttaaaaacttgttaaggtttcgctctttgattgtctttcccacatcttgatgaaggtacaaagtgttcataaaccccagcatcagcgatgttctatgcacagcaaccgcagaagcactagccatggaaaagtttgtggtgtgtgcagatcacccttcaaacgaattctttagatcattcccgccctgctta

SEQ ID NO: 166437 - DNA, 1212 bp, Arabidopsis thaliana landsberg; identical to SEQ ID NO: 27310
  unsure (1)..(1212): unsure at all n locations

SEQ ID NO: 166438 - DNA, 1082 bp, Arabidopsis thaliana landsberg
gttgtctgactatgttgatgtctttgtgttgtagaaaacccacaaatgggatcccttgataaaagggacagttcaatggtggttcgaagatatctgtcaacgccggatgaaagacattttagcaacgcgaggacaagtcgagagcagcctatatggatctatgatgataacttaaaaataatgggtgcgaattgggaaactgaagaagcaaaaaagaggagtaagacatactccaaagctcgtatgtctgaccgtaacggtcttggtcctcatattcacttatcagggtctaagtcatatcaacaactccataatgaaatggttagtatatctatctttcccttacacctttgcaaatctgacatttgttctaatcattttacatgttacgaaacattgtaggaagaacaattgagaagaacagtgtgtcttggtgaggtcttcattaagactcatacaaaggcagatggttcatttgtagactggaaggcagagagaatagctaagaattatgagaagaatgtggcagagaggttctcagagcttgagttagagacttcagctatttcagacagcacttcacgatcgcgggaactcacagcagatgaatatacagccatatttcttcaggttaagtacaatttatcacaatccacatttattgatacttttagagtgttctaagctacatacttttctctatcatttcacagtccactgagaaggactcaagagaaactctttatggtgttggaagcctcaaggatagtcttctcaatggcaagcgtaagcaaccaggagacacttcaacctttgtggcaatgcaagagcaactgaagaaggctcaacaaaaaattgaagagcaggctgctcaaaatgcaaagcgggttgctgcggttcctgcccgtgaagaagagcattctcgagctgtggctggccaaaagaacaaactcgagcacttgtctttggtggagaagtacctgcgagccactgatcctgcttttctgaacttcatggctgaacattctacttcaacaaccacagagcctctctcaaccgatcttcctacaacaactccatga

SEQ ID NO: 166439 - DNA, 520 bp, Arabidopsis thaliana landsberg
tgatgatataagttatttatttgtgggttttgtttgtgaaaaatgctgttatatagggtgtagagtgtttaggtgctcgagcaagtacgagtacatagacgccatggtgatcggtgatagcgaccgtgatggcgtaagcaagctgaaacgtgtgataattgatcttgacttcaaaactcagtttgagctagcgagacagacagaagcttacaaagatatgactgagatgcttccattagtgtttgtggcgacagaagggagactgagaagagttgtttcgttggtttgtggtgagatgaaaaagtccatgaagaaagaaggaatgtctaggcctccatggaggactacgagatacatgcagtccaagtggctaccagagaatcgtcgaagagtctccggttgtaagaaaggttcttggtcttggtctgtgtttgatgatggtagtgaaggaagaggtgaagctaggacttggacagtaagtggtagtggtccgaaaactaagtgttgttttcctattttc

SEQ ID NO: 166440 - DNA, 1430 bp, Arabidopsis thaliana landsberg
gaaagcaccgaaaccagcctctgatttagctggagaaatcacagctgcgttgcagccgcctcaatcgcattcaaccgatttgatcctagatattctaaactattgctcgataatgctttaagaacttttgagtacgcagattcacatcgaggttcttacaccaataatcctgagactaaactagctgtctgcccattttattgtagtgtaaacggatatgaggtaatctctctatgatttcttgaataccttatgtaaaattagatatcggtctagattaatgtttttagttccatataaataatcatgttgtttcatataggatgaattattatggggagctgcatggctgagaagagcgaccggtaaagattcttacattaaatactttagtggagaatcgtcaatcttttgggtcaaattccaattacttcgagtttggatgggataacaaagttgggggcgtcaatgtcctcgttgcaaaggttggatccaattctctatgatttttaaaatgacgacatcatattcataatacaataaaactcatgatcgtaactcatttatactgaacatacaagtaggagaacttgggcatgcatatattattcttcttaaatagaaaaatgtatatattctggtataccggtcgagaataaaaccgcttaattctaaaccgttagagctgcttgttgtttatataggaagtatttgagaagaatgttgctgcgattgcaccgtataaggacacagcggaaaaattgatttgttcgttttttctggaaactccgggtgcacatatgagttactctcccggtggtcttctttacaaacccggaagcagccagctccaaaacaccgtcgcattgtcttttctccttctcacttacgccaattacctctccaaatcctctcaacaactccactgcggtagtctcaagatccagccgaattctctccgtcgcttggccaaacgacaggtatttaacacaacgcataggcgcatagcaaatatagttggttttgagaaagttcatgagttatcattttacaaattagtggtctatttaactaacttgatcggtttttatggtaacatataggtggattacattttgggagataatccgatgaaaatgtcatacatgatcggatacggtaaccgatattcacgacaaatccaccaccgcggtgcatcctcaccgtctatcactactcatcctaccccgatcaaatgctcagaaggatggaacattttctcgtcaccaaatccagaccccaacgttttagtaggtgcagtgatcgggggaccaaacatagatgacaaattcgttggaggtcggacaaatgcaagtgagactgagccgacgacctacatcaatgcaccttttgttggtctcttggcttattttaaggccaatccggtttga

SEQ ID NO: 166441 - DNA, 747 bp, Arabidopsis thaliana landsberg
  unsure (1)..(747): unsure at all n locations
gtacaggtgagtcggtcaaaacgttgcagttcgatcgtgaagacaaagcgagttactatcattgcgatgtcacgaacgagacggaagtgaaaacgccgttaagttcaccgtcgaaaaatatgggaagcttgacgttctgtttagtaacgccggcgtaatagagccgtttgtgagcatcctcgacttaaacctcaacgagttagaccgaacgatcgccattaaccgntccggacagccgcattcatcaagcatgctgcacgtgccatggtggagaaaggcacccgcggctccatcgtttgcaccactagcgtcgcggctgagatcgctggcacggcaccacacgggtaaaaactaatattcacaacaaagactttttaattctttagacaaaccaaaagtgcactaactaatttcgttttcaaaaccatgtaataataaatagtggatcgctgcaacggagtattataattaaaagaataacaaagtgatcatgttgtcacgatttattgacaataattttttatcgttaaaattcaaaatagaatgaattgcttactaataatataggtacacgacgtcgaagcatgggctgttgggtttgatcaaatcggcttctggtggattaggaaaatatggtataagagtaaacggcgttgctccatttggtgtcgcaacaccgttagtttgtaatggtttcaagatggaaccaaacgtggtggagcagaacacgtcagcttcagcgaatct

SEQ ID NO: 166442 - DNA, 2955 bp, Arabidopsis thaliana landsberg
  unsure (1)..(2955): unsure at all n locations
aataatgtgaagaaggtancaacactgctgagttaggagttgggttaccggaaggattcggccaatcgaatccaccggaaagtttgacgcatcctattcctgcgaatccgtgtaatgtcttcaggcctgtaccgccgccgccgccgccaccgtatgccggcacgtctgggaagattggcggttgtaagcagttttggaaagctggagattatgaaggagcagctggcgataactgggatctttcttcaggtaaaccaaattttaattttattcattagacagtaatgtggaatgttggtcggaacaaaacttttgagtgttacaatttgtgtctcaggtggttttgatcatgtaagagtccatccaaagtttttgcattctaatgcaactagtcacaaatgggctcttggaggtattattcttattggtcaacctttatatgagcgagtttgcctctatttttttgagcttatctgagttctcttatgcagcttttgcagagcttttggacaatgccttggatgaggtaggtttttgtttctttacttgtcttagacagattgtatgatgtgtagtaatggtttctctcgttgatatcaggttgccagtggagctacttatgttaaagtagacatgctagaaaacaacaaagggggaaacaggatgttattaattgaaggtatacactttacctagcaattcttaaagaacctcttccctaatttattcatgtggttattggttgcctaaaatgcaacacttttgtccactcatgtactacgagaatccttatgttttgaactgcagataacgggggtgggatggaccctgaaaaaatgcgacaatgcatgtctctaggatactctgcaaaaagcaaacttgcaaacaccattggacaatgtaattattctttgtttatccgacttatatcgaaagtttgcaggaagatgcttaatttatttactgcttatagatggcaatgggtttaagactagtacaatgagacttggagctgatgttattgttttctcgcgttgccctgggaaagatggaaagaggttagttgtttattatcaatgtgttacacctttcggctatcatgtcttttatcatttttgttggattgtatttcattcccgaagaatatgaacaatagttgaagttataatttttggttaatagataatttacttgatgttggttttagctctacgcagagcatcggactcctatcatatacatttctaaggagcacaggaaaggaggacattgttgttcccatggtaatcgttctttgtttcatttatggcattgttagagaacaacttcatgctctattatgagttgtattctgatatgaaattccattcaattgcttggttcaacaacatgattcttctaatctttggttaacatgggattcagtggcacgtatcagctggttacgtgtacactatttattgcaatctttgttcagtgttagaggatgtgtgaagcactaatatgtcttatgtccacaacgtatactttctaatttaaaagaattttgtattcattatatccttatattctcttgttatgtgatttaaaatgacagcttgactatgaaagaagggaccctgaatggagtaaaataatccggtcttccacgagagattgggataaaaatgtggaaacaataattcaatggtcgccattctctagtgaagaagatcttcttcatcaggtatattttccctttgttcaaagcagttgcttaatcacttattcatactaagaaattttgcatgagagcgtctaagctatttgatcttcttttattctgtcactcctttgatatgggtttccatctattaccacccctttactgtctctgtgaacaaacgttatcactaaatttttgcttcatttgtcgtagtttaatctaatgaagaaacatggcacaaggataatcatatataacctctgggaagatgacgaaggaatgctagaacttgattttgacactgatccacatgtatatgtttttatttctggatatacatagattatgttcttcaatgatgcagaagcttctgtctccatgtaattgacatattgtttgttgcaggatatccagcttcgaggggttaatcgggatgataaaaatattgttatggcttctcaattccctaactctagacattacctgacgtacaagcactcactcagggtataaacgttctttccatctttccttagttgtggttattttcgacgttagtttggttcagtctcctgctaaaatcacagcgatagttcttaaatatgaatcccattattttttggctgcattttcatttcttctaaaggttttatttgttaccttttgttatgttcacagagttacgcctctattctctacctaaagatttcacatgagttccgtatcattctccgaggaaaagatgttgagcatcacaacatagtaaatgacatgatgcagaccgaaaaaattacttaccggccaaaagaagcggctgatggatgcgctaagtactcaaatgtatgcttttcataatttaacatagttagatttcttcctgtaattttgtcaaagatattaagcagctttataacttaaaaatttggctgcttgtgctacatgtttcacagttgtctgctgttgtgaccattggatttgtgaaggatgcaaaacatcatgtggatgtgcaaggcttcaatgtttaccacaaaaatcgccttattaaggtttctgtttctttttgcttactttttcccacactattcctttaaatgtggagaaaataagatcaactttacacttttgtttaagatcttctcactttttttcagccattttgcaccatatggcatgcggcaggaagtgatggtcgtggggtcataggtaattgttttaacttgaagttctaatatttgattagcgttattaac

SEQ ID NO: 166443 - DNA, 2865 bp, Arabidopsis thaliana landsberg
atattttaagatcccattcatattttttcgtatacattggtatttttaacttatttgttttgatcaattggattggctgttgacctttcaagatttcattgttgcgtgcttgtttttctcatggattgaaacattgctgcataaaatgagtaaatagaataattggacaaccacttggttcaatgtttttacattttataggctacaaaaactctttataaactagtatttaatttctgattttggaatttcaacctaccgtaaaacaaaacagcgagactatctaattacaagactataattgaattttaaatcttaatttaatattatatgtgcactatatgtttcattctatttaagatagatatttggtaattttgtaaaatatagaaatatgtcatgttctctgaacattattaatataggagacttgcatgtttttgtgaattgtttaattggcatagtcaaaggatgtataggttgcatatatagaaatcaacagttcccaagagaaaacatgagagctaataaaaaatttatcaaagaagactaatatggagaaggacgatttcttgaggagtggtcatggaagagaagaaagccatgatgagatgagaaaacttgattcatctcacgatgattctcatcaagaacacgaccatattataagatccaaggtatcataaatttccttttgtatagttttcaaatatttagacgtcatttataaatcgcataaatcaatccttggaattacatacatgtatctttcataatcttatcacatagatggtttgttttatccaaaatccatttttattaattgattgattagtcttaatcaatgaatcttaatttgaattctaaaatcatactaaattagatcttcaaatctcttgtcagtttcataattttctgtctttgcggaggtttttacgaagaatttgctcatctatatatcacaagtacaataattatgagaaagaaagaaaaaaatatgtattggatttttgaggcatgcatatataatttgaggaaagatcaaccaaacgatagatatttgtatatttgttaagcatatcgtgattaaccatatcttataaacgtatgatgagatcagctggactcaactaaagtcgaaatggatgaggctaaagaggaaaatcgaagactaaagtcatcattgagtaaaatcaagaaagattttgacatccttcaaacacaatacaaccaattaatggccaaacataacgaaccaaacaagttccaatcaaaagggcatcatcaagacaaaggcgaagatgaagacagagaaaaagttaacgaacgtgaagaacttgtctcgttgagcctaggcagacggttaaattcagaggttccaagtggttcgaataaagaagaaaaaaataaagatgtcgaagaagcggaaggtgacagaaattatgatgataatgaaaaaagcagtattcaagggttgagtatggggattgaatacaaggctttgagtaatcctaatgagaagttagagattgatcataatcaagaaaccatgtcgttggagattagtaacaataataagatcagatcacaaaatagttttgggtttaagaatgatggagatgatcatgaagatgaagatgagattttgcctcaaaaccttgttaagaaaactagggtttcggtgagatcaagatgtgagacaccaacggttagtacattttattcatatctttaatttaattagtatatacatctatgaatgctaacagtataatccttccttttttctcacttctatttttataagagaaaaaaaacttctcaaagagtatattccacaagaacagaatcaaagtttgtgttttaatttcttgggctatatattgtctctgtagatgaacgacggatgtcaatggaggaaatatggccagaaaatagctaaaggcaatccatgtcctcgagcttactatcgttgcaccattgcagcttcttgtccagtaagaaaacaggtaaaattactaaactaataattctaaatagttatatgttattaaataaccatacatatatcatatcaactcttttctttaggtgcaaagatgttcagaagatatgtctatacttatctcaacgtacgaaggaacacataaccatccacttcccatgtcagcaactgccatggcctctgccacttccgctgccgcctccatgcttctctccggcgcctcctcctcctcatccgccgcagctgatcttcatggccttaacttctctctttccggcaacaacatcactccaaaacctaaaactcatttcctccaatccccttcttcttctggccatccgaccgtcactctcgacctcacaacctcctcctcgtcgcagcaaccgttcttatcaatgctcaatagattcagctctcctccaagtaatgtctcacgatctaatagttatccttcaaccaatctcaacttttcaaacaacaccaacacattgatgaattggggtggtggtggtaatcccagtgatcaataccgtgcagcttacggcaacattaacacccatcagcaatcaccttaccacaaaatcattcaaacccgaaccgtcgggtcatctttcgatccgtttggaagatcatcttcatcacattctccacaaacaaatcttgatcatatcggaatcaagaacatcatcagtcaccaagtgccatctttaccggctgaaacaatcaaggcaatcacgacagatccaagtttccaatcggctttggcgacagctctatcttccatcatgggcggcgatttaaagattgatcacaatgtgactagaaatgaagctgagaagagcccttaaagagaagttaca

SEQ ID NO: 166444 - DNA, 1121 bp, Arabidopsis thaliana landsberg
aggtacaaaaacaatcgaatgtgggaagatatttcttcttgagggcatttaatctcataggaaacctcatgttctcgagagatttgcttgatcctgattcaaaaagaggatccgaattcttttaccacaccgggaaagtgatggagttcgccggaaaaccaaacgttgccgatttcttcccgttgctaaggtttcttgaccctcaaggaatcaggagaaaaacgcaattccacgtggaaaaagcgtttgagatcgccggagagttcatcagagaacgaacggaggttagggagagagaaaagagcgacgagaagacgaaagattacttagatgttcttttggagtttcgtggtggcgatggagtcgacgaaaaaccttctagcttctcatcaagagatatcaacgttattgttttcgtaagttatgcataccttaattaattattaccaacattcttacaatcatatgtacaaattaataaagtttattgataggaaatgtttacggctggaacggatacgacaacgagcacgttggagtgggcactagcggagcttctacacaacccaagaacactgaccaaactccaaaccgaactccggacctacttcaagtcctcgaaccaaaagctccaagaagaagacctaccaaaccttccctatctctcagctgttatcatggaaaccttaaggctacacccacctctgcctttcctcgtcccacacaaagccatgtcaacttgtcacatcttcgatcaatacactatccccaaggaaacacaagtcttggtcaatgtatgggccatcggacgcgatcctaaaacatggatcgacccgataatgttcaaacccgagagatttatatccgaccctgacgcccgagacttcaagggacaagattacgagttcttgccgttcgggtcgggtcgaaggatgtgtccagctttgcctttggcatcacgggttttgccgttggccattgggtcaatggtgagatcgtttgattgggctttagaaaatgggcttaatgcagaagaaatggatatgggagaaaggattggtataacattgaaaaaagctgttcctttggaagccattccaattccttatcgagggacttaa

SEQ ID NO: 166445 - DNA, 814 bp, Arabidopsis thaliana landsberg
gctttatcctgccgaattgctagacctctaggtaattacaagactttggtgcttgcttatacaccaagcaagccatcttactaaatcatcagtctcacgtaaagcattgctgatttttttattattcttgtataggggaagccaccatagatgtaatcaagagatgcagcagcagcttgtacaaaaacttctcccccataaataccatgcctgactggcccccagagaacccttttgaacattcaaagctggtaagattaagacctgtgagttttgcttttgtgagtgatgttttccataagctttttctttctttttgcagttgaattattatgagctgcaagaagacaatgactggtttcgtttgtatttggaacttgcagttgccacgactaataggcaccgtatcaaatatggtgtggccaattaagattttgagagtggctatggaaactacacaagaccttggcgcctgtgatgcaactttctacgttaggtacacagactcataccaggctcggactggtgaggatgccgatcgcgttgctatagtcagaagaatctgggatgagcagtttgatgtcttcaaaatcgtgggtcgtactgagagctatagatcattagggaatggtgaatccaccacgtcccgggagacagttgtgcatggctcgaaggacatagattcgatggaacaatctgacatgatggtttcgacggatatgttgggttgtactcagagctgacaaaccttggaagctggctcgttgtcatccatttgaatatgttgattagaatagtaaaccccatcgcttgt

SEQ ID NO: 166446 - DNA, 948 bp, Arabidopsis thaliana landsberg
gaaactggttctgtacccaaatggaaacaagagcaagaatacgaaagaccatgtttctgtttacttggctcttgcagactctagttcattaagtccagggtgggaggtttatgcagctttccgtctgtatttactggatcaaaaccaagataactatttgattctacaaggtatctttaacttcttcaaacagtatgtttctctcatccttgtcccactcttattatgcattttgtgttgcaggaaacgagagacggtttcattcggtgaagcgcgaatggggatttgataaattcatcccaaccggtaccttctctgatgcgtcaaacggttaccttatggaagacacatgtatgtttggagctgatgtgtttgtttctaaggagagaagaagtgggagaggagaatgtttatcaatgattaaagatgctactagctctaaacacgtctggaaaattgagaatttctccaagttagacaaagagagctatgactctaatgctttcttcgctggagatagaaaatggtaacacaaatttgccaacaatcccaaagcaaccgtagctttaagctaataaatggtactactaatgcaggaagatagagttttatcctacgggaacaaagcaaggaacaggaacccatctttctatctatctgacccttgttgatcctgaaaccatttcagatggtacaaagatatttgtagagtttacaattcgaatatttgatcagttacaaggcagacacattgccgggaagggtaaacaccgcaaactcaatcacatacttgttatatgaatgtgaatgtgttcacctcttgatctgtaaggtctctggtttacagttactaaatggtttaagcgatcaagctcggagcatggatgggtgaaatatgtatccatggtttatttcacgccgccaaacagtggtctggtgcttaaaaat

SEQ ID NO: 166447 - DNA, 633 bp, Arabidopsis thaliana landsberg
gtgtatttccacggcatttgcgactagtctcctttcataactggatggaagatttgtgtaatggttcttagaacgtaaacaaggttttacagaactacgggtcgtctttgtcgatgaatgggtaatggaatcttcactcttcttacaagtcatacttaaccttattcttatcttactccctatattactcaccctccgatgttgttttcatatggaatccaaattaaagctataatcagaatacgtttttctcaacgttacgtcgatattctcaaagagaatcaatggaaatcaatctcaacttttcttgtcattccaacccactactacatgattgagttcatggaagcaacatcggtcataaggtacgacccaagggaaactgttttatttaacagattcacaccttttgactacattattgaagacaccgttcataccgatactttggtcggtaagtaatacgtatctaatgcagatttcatactttcacctttgacatgcctgttttttaacttttatttcatactcccagatttggttggtgcactcctccatataggatgtatgagaaattcctcacacaatggtgtcaagattgacagattgagactttccttcgagattatggac

SEQ ID NO: 166448 - DNA, 2029 bp, Arabidopsis thaliana landsberg
  unsure (1)..(2029): unsure at all n locations
ctggtatctgaaaacgactacacttggtatctatccactcaacaagtacctgttcctcctactcgtggttccatatctcaagggaatgcatctagaaaccgtgatccaccctcacctgcgagtcaaaaccaacaagccggtttgtctcctccacaatccaattcaaactcgcctaatcattcagctactcaaccaccaactgcccgtctcaacgatatgacattggatgagctcctcgacagtccggggcgtcagtctttgcagaagctagatccaaatcgtcctccgggaactctctggtaaggatgattttggttatactttaaatttagtttcagttttagattttcggtatgtagattctcattgtattttaggtatgtagactaagtactaatttggttatacattgtattttaggtatgttgattctcattgtaatgatttttttttgtaggtttgacattgatggttcagttgcagcttctgtccgaaaggtttttgaaagagattttaaggcacctcatgccaattggacacaaactcctaaagcagtgatcactcgttggttcgagacttttgcggtaagtgaaattgcttagtttagctttgttttactctacaaatgtatgtgatgctatttctgactttgtttttttattttgaagcaaatgtacaactgggacaagtccataaatgatagagttagagatgagtttgagaacaagttgaaggataggatgtctgatcaaatttgccggtggaagggaaagtggaaggagaaaggtgatgagcaaagcctaaatggattgatcctcaagtgtgggctggacttgttcgtttttggcgtgatccggcatcagaaattaggagtatcaacagtagaaatgcccgatatcatgatcccgatggccttggtatatctaagcaccgttctggccagacctctttcaaatcccgtgccagaaagcatgtaagttaactttgttttctttctcagacatatacttatgtattgaactgacacttaacttttttcttttgttttagtctgaggagaccggtgatttaactccagattttctggtggttcttgagatgactcatcgcaaacctgatgggactttcattgatagaaagtcagaggagatctacaaggaagtgtcatcaaggattgaagaggcagagtctctgctgtgttcaggggacactacggagagctctgcttcaggtgggttatttgttcaggccaagaacaagatttatgctcaggtatcttatctctttcaactcnnnnnnnnnnnnnnnnnnnnagtttatgattactatggattttggccattgtgtcttagtcattgtgtttcaaactgatttgattatgttgtggcttgcattttttcataacattgtgtttcagatgcgctttgattattttgcttcttggcctttgtgttatgacattgtgtttcaaacttctatgattatgttgtggcttgcattttgtcctaatgtcattaagtttcagcctgctttgattatgttgtgttatgactttgtgtttcaaactgatatgattatgttgtggcttgcattttgtcataatgtcattgagtttcagcctgctttgactatgttgtgttatgactttgtgtttcaaacttgtgtttcaaactgatgtgattatgttgtggcttgcattttgttataatgtcattgagtttcagccttctttgacaatgttgtgttatgactttgtgtttcaaactgttatgatgtatgtgtttttggttgtgttgttatatcattgagtttcagcctgctttgactatgttgtgttttttttggttttgagtttctcacaggttgctccaaagaagaaaggcaggatttatggtgctggttcattgcagcttgaaacatcttcagctcatgctggtccagttcttcctcgagaagatccggttgcgctctcgcaaaagctggctgccgctgaagcactcattgcaaaccaagctgagaagatcacaag

SEQ ID NO: 166449 - DNA, 2911 bp, Arabidopsis thaliana landsberg
atgtattccagaagagagctggaagatttggagtacagatactacagtgaaatgaaagatggtacaaggaaagtcaaaatctcagagtctctgttcaggtgtcccttttgttacatagatcgaaagcgtgattaccagtttgatgacttgcttcgacatgcttctggtattggcggtagttcccgcactaaggatgggagagataaagctagacatcttgctctggagagatatatgaggaagtatctccgccctcgagaaagaccacgtccttctccaacttcagatgtctcttctcttcctaaagaggagtttactggaaagtggaaatctactttgtcaactactgaagaaggagaattcataactactgaaaattctagttcacctcatattgtcaaagctgaaccaaagtttgtctccggagatgattctggacgtagtggtgaggaaagactaaagttttctgataaacccgaccccttttttagcaacgaagacaaatcataccctgccaaaagaccttgcctagtttctggtgcgaaagagggagatgaacctgttcaacggattggtctcagccatggtgctagctttgctccaacatatccccagaagctagtttctttgggtgctggtaatggggatcagatgtatgtgcatccctggaaaggtatcctggcgaatatgaaaagaacgtttaatgaaaaaacaaggaagtatgctggtgagagtggaagcaagataagagaagatttgatcaagaaagggtttaatccccataaagtcacgccactgtggaacggaagacttgggtttactggttttgctattgttgactttggtaaagagtgggaaggattcagaaacgcgaccatgtttgataaacactttgaagtgagtcagtgtgggaaaagagaccatgatctcacacgtgatccaggtgataagctttatggttgggtagcaaaacaagatgactactattcaagaactgctattggtgaccacctcagaaagcaaggggacttgaagagtgtttctggtaaagaggcagaagatcaaagaaagacattcacgcttgtctccaacttggaaaacacactggtaaccaaatctgataatcttcaacaaatggagagcatctacaaacaaaccagttcagtgcttgagaaaagaatgaaagagaaggatgaaatgatcaacacacataatgaaagtatgttctcttactacgaaactaatttttgcttgattgaggtgcttggtctagtatttggaaactgataagtttgcttttccatgtttagaaatgagtattatgcagcaaactgcacgtgattatttggccagtatttatgaagaacatgaaaaggcctctcagcatctggaagctcaaaggaaagaatatgaagaccgggagaattatctagataagtgtcaagctaagaataagactgagcggagaaagcttcaatggcaaaagcataaggtaacattcacatgcttcgtacaaccttacccttaaactatcttgttcttagcaatgattcgtggaatcttataatatctgccagaacttaatggcaacgcaagagcaaaacaaagctgatgaagacatgatgagattggcagaacagcaacaggtaagctttattgttaaaaaaaaacaaaacactttgaaagttaatgttcaagttgctgtttgatttttggtcgtacttagaaaactggctattgttttacagagggaaaaagatgaattacgtaagcaagttcgtgagctcgaggagaagatcgatgctgagcaggcattagagctagagatagagcgtatgagaggtgacttgcaggtcatgggacacatgcaagaaggtgaaggtgaagattcaaaaatcaaggagatgatagaaaagacaaaggaagaactgaaggagaaagaagaggattgggaatatcaagagtcgctctatcaaactcttgttgtaaaacatggctacactaacgatgagctacaggatgcgcgcaaggctttgattcgtgtaagcaattctcagcctctctccatctcgtcccttcttcctttgatgggttgttatttggattttctgattgatgaacatttatggtgttgacctagtgagactccatgttcttacctggtaactcatggtagaaatctcagatggtagtggaagtgatttgccatttgtgttctgatatttgcaactaaccatgcttaagctatgtgcagtcaatgcgagagttgaccacacgagcttacattggtgtgaagagaatgggagcattggatgagacaccattcaaaaaagtagctaaagagaaatatccagcagtagaagctgataaaaaagccgaagagctctgttccttgtgggaagagcacctgggagactcggcttggcatccgattaaggtcgtcgaaaaagatggaatcgcaaaggtaaacacgcttttctctcaaacaatgtttctagatgatatcttagctcctgtaatataagaacatgagagtgactataacgattttgcaggaagaactgaatgaagaagatgagaagctacaagagctgaggaaagagttgggtgaggaagtgtatgcagctgtgacacaagcgcttaaagaaaggaacgagtataatggcagtggaaggtacatagtgcctgagctttggaatttcaaacaaaacagaaaagcgagcatcaaggaaggagttgtttatctggtcaactcgtggaaacagaagaaaccaaagccgaagcgtagataaaaattaattctagaaacctctattgttgataattattaagactagatgagatttcatgattatccccactaagaatagttataaacttgagaaaaaaataaaaatagttatgaacttat

SEQ ID NO: 166450 - DNA, 2294 bp, Arabidopsis thaliana landsberg; identical to SEQ ID NO: 32630

SEQ ID NO: 166451 - DNA, 4116 bp, Arabidopsis thaliana landsberg; identical to SEQ ID NO: 17767

SEQ ID NO: 166452 - DNA, 2178 bp, Arabidopsis thaliana landsberg
  unsure (1)..(2178): unsure at all n locations
atgtgtaaccccttccggcttgttgtcggattctcaaaaaatgctcctgtgttgctggaacgatcagtgtgtgtacttttctgcaagtgaaagattatgaaaagatctggggtaaatcagtaaatgtaaaagcccttacctaaagcgatggcgttttaagggtacggtgaaaaatcaataaaaattgaacatgtgcgttgcaacatcgtcaagattgacaattgaagtcccaaatgaagcccatgaatgaaaccttcgccgccttcgccaggcaaagcctagaactataagagcagcagtcgctaatttttggaaggagaaggagaaagatgagtcgccgggtggaatacacgttagctcctccgcagaggaatgaatctgacgtaattctctcatctttttatattgtttagcttgtgtactagtgttcctttcttacgatgttaagggtagtgattgattgattgattattttctctgatgggtcttagggttttgattatcccgacggtatcccaatatcatacaatcttcataggcttcgtcactttgagtgtgaaggcagttatcccaagtatccttatggttctttggtcaagttttatgcaatggtgggacttcatcgttacaatgtgttggaggtaaacaatatagtgcttttctagtcgatatgctactggaactattaattattattatgatataccaattacattctcaatctctttttccatctgtcaggggaaaaatttgcagctcgataccctaaagagtttcaacatgagaatcaattgtggtgcttcttcttactacattactttggctgcacgcgttccagatagcggtttgaagcagatctttcaggttctagttcatgaagagcgtcttggcagtttagacatgacatgtactatcgctagacctcgaggtaaacatgtaactttacttgatcagtcattttgacttgtggcagtttacctgtacatctaacacttgctggttaatattgcacagtgactaccaatgtgccttttctacgtccgcacagcgaatcagagtatgattatatggacaatgatgaattgcctgactggccttcagagattgctttcgatgatacaaaacggtttcatctggtaagattattatttataaagtacatcctttgttgtttgtttaatgaattatcataaggatttataaatcatttaaaatgcataaatcaatagagacacttgtggttttgcttttgcctactagtgaattttattgagaaaccttgcaggtgaaggaatcagagttgcgagacaatgattggattcgactctatttggaacttacacttgttgctcacgataggtttcttacagttgtaagtgtttttttctctctttcatttgtttgcatatcaaagtgatttagtggcattcaatattgttaatacttcacactacatggttttgtttatgcagcactatctctcccagttggagattgtgaaagttgcgattgaagaagtggagcaaccgaatgcgagtctcaacaccaaaactacatttgtctacataacttataaggacttggcaaaggctcccaatggtgagccggttgatcgcaaagctattgttagaagaatcatcaatgagactacgggactcttgagactccggggtgattattggagtggagaaagaagtgtgatcactccggaggaagaatatatgcttctccatggcggagaaaaagttcgaaacaatgagcagcgttctaaaaaacttaagcgtcgtgtaggtgttcataggctatggcgatggtggtaccaggcttacaaaaaccgtggcctccgctcgtcgtcttattaagtaatgaatgtggataagctgcataactattattaatggtctctgactaagttattttgtgcgtttggactgtttatgtggatttgtttttttgcggtttgtgtaagttataagtttgtctgttctcaacatctgaacactaatgtttagtttaatcgtgcttggttttgtcttcttggaccaaatcctagttgtgaaatttgcctttactgcttctctctgctttagttntctcttcatctctattcttttccatggttttggcagatgatggtattaaaaattagaatagagggaaattcttttaacccaaaat

SEQ ID NO: 166453 - DNA, 538 bp, Arabidopsis thaliana landsberg
ctctttggcgcgcgttagaacaaggtcgtcctgatcagcggcggcgcctcgggcatcggcgcggccaccgctcggctcgtagtgcgcgagggcggcaagtccgtgctgtccgaccgggacgccgccaagggccaggcactggcggccgagctcggcaaggccgcgctgttcgtgtcgctcgacgtcaccaaggacccgtcgtggcaggcggcggtcgcggccacggtcgagagcttcggcggcctgcacggcctgctcaacgcggccggcgtcggcgtgcgcaactcgatctaggcctgcacgctcgaggagtaccgccgcgtcaacgacatcaactcgatgggcaccttcctcggctgcaagcacgccatcccggcgatggccagggccgtcaaggagcacggcggcggcggctcgatcgtcaatatctcgtcggtgctcgggctgcgcggcagctcgtacgcaatggaatactgcgccagcaagggcgcggtgcgctcgctgaccaagaacgtggcgctgcactgcgcccagataa

SEQ ID NO: 166454 - DNA, 4210 bp, Arabidopsis thaliana landsberg
aaatctctctacgcactggttccgactaatgagagtgacaagaaaagagataatggattgttcaaagtgattagcgattggaaaactgggcgatgaaggggatattttcaaattggcgaaaatgataattcagcggcaatatgatcccgtgattttgttcagtttcagcaaaaaggaatgcgaggcacttgctatgcaggttagtttcctcttcttctgtttgtctaatgcaagtaaataaatcatttaccgacaaattttttatttgacttctttcaaaatccctggatctttaccctgtcatatgagaatgtcatctcattttggggatgttatttttttgtaactattagccaaacatgaatctgaatttgtttctgctgaaataagaaaattggtccagaaagttaggtgtttttttagtttgtcttcttcttatgcttgggatcagtcttatccttttaaaattgatattgggttggagtgactgtgataagctcctggagtcttatgtgaagatgcggtacctatattatactgtatgagttggatcgcaaaagaagtcctcacttgaatcaagacttttctatagtactgttcccaccactgaattaaaaaactttcgtcattcttaatcttgatagtctgttattacattgcagcaacggtctcttcaatctctatattttttgtttgtatagactgttcaaattttgttttttatgatttttctagtgtgtttgcctccaccttgtagtgcgtactctgtggtgtgttttatttatgtgtattttacaacctgaagttcattgtctgcgtactgtgggtcttactgttaaaacgtgagtctaatacctgtctgtttgttccacagatgtctaagatggttttgaacagcgatgatgagaaagacgctgtggagacaatctttgctagtgcagttgatatgctttcagatgatgataaaaagctacctcaggcaagcattcattaaagctctttctaagatgcctgagtgtttgtataatgcaccttaacctatatcttttgtgaatacttttcacaacttcttgaaacatattgtcatgttttaatgttgtgaggtatctgtgcgctaggatgatcatgtgcacatctctgtaggaaatggctagtattattggcttataagtagtagatttcccaccaatctcgcctctattatctcaaattttatattttattttgtttgccttgtagccggctctcctcttgcacaaaaattgatttttccctagatattaatcttttctctaacatgtaacatgtaatagcttatattccttacatctgatgttccataaagggtcatcttggtgcttgtttagttgatctagtttcagatgcgatttggcaaatatatttgtcctgcagcgaaattgacatgattcatggcttcatgtactgcaggtgtcaaatattttacccatcttgaaacgtggtataggcgttcatcattcaggactgcttccaattttgaaagaagtaattgagatattatttcaggaaggtcttattaaggtaggtgaaggcgtagaactacaattttcatattgtcaattcttgctaccttttgttatgtaattttgtgatgttttcctttagtttgaagtattgccactgaagtttgaagtattttctcttagtgtttgtttgcaacagagacatttagtattggattgaacatgccggcaaagacggttgtatttaccaatgtacgtaagtttgatggagacaagttccggtggctatcaagtggagagtacatacagatgagtggtcgtgccggacgtcgaggtattgacaaacgaggtatctgcatcctcatggttgacgagaagatggaaccagctgttgctaaatcaatgctcaaaggaagtgctgattctttgaacaggtacgttgttaagtatttctgatatttattttattatcaacctgattgatagtctgctttaagagggttagagttcttgacatattcactcaccaagactgttttgtttcctttattcaccagtgccttccatttgagctataacatgcttctaaatcaattgcggtgtgaagaaggtgatcctgagaatcttctgcgaaattcgttctttcagtttcaagctgatcgtgctatacctgatctcgaggtgaagttgcaaaatgctaaatgttagatttcctgatgatatagtgttcactttatgtatatgatttgattgtggtctgatcttcgcagaagcaaataaaatctctggaagaagagagagactctttggtgattgaagaagaagaaagcttaaaaaattactataacctgattttgcaatataagagtctgaagaaggatatacgtgaaattgtgttcactccaaagtactgcttaccctttttgctgccaaacagagctgtttgtctcgattgcacaaatgatgatgaagagccacaatcattcagcattgaagaccaggatacatggggagtgatcatgaaatttaacaaagtcaaaagtttatctgaaggttggaactctgagaattattttttcgtatagcgctattaatccgttcacacaatgtaatccgtttattgtcttggcatgagtaattcattcagatgatgatagtagaagaccagaggatgcaaactacaccgtagatgtgttgactagatgtatggttagcaaagatggcgttggcaaaaagaaagttaaggctgtgccaattaaggaacgtggtgagcctgttgtggtcactgttcctttatcgcaggtatcatgactgctccgttttcttttccttttctcctcttcatagtcctatataatcttatacacattcatgtatagctatcctccccaaattctgctcttgatgatcttattgtttgtctttattatcattgacagataaagagtttaagcagtgcaatcatgaatataccaaaagatcttgtacctttggaagctcgagagaatgctctgaagaaggtttctgagttactctctagacatcccgatggaataccctagatcctgaagttgatatgcaggtattttgtttttccccagtacctttctgcttctgctctgtcatttgtcacaagagatgaatacaacttttacttcattagattaagagcagctcttacaaaaagacagttcggcggctggaggctctggaaaacctatttgaaaaacacaaaattgcaaaatctccactcataacagaaaagttgaaagttctacagatgaaggaagagctaatagccaagatcaagtcacttaagaaaactgtccgatcgtcaacagcattggcgtttaaagatgaactcaaggccagaaagcgtgttttacgaaggctagggtaaatatttgccaaatttatttcattcactttcaaaatatacttgtgaaaccaactcaatcttatgcgtcagctacatcattctatcatgctctttttaatgttatgggactgtatgttccattgatgattctattagcttaatttttatcattatgctattgaacgcagatacatcactagtgataatgtcgtggagttgaagggtaaggttgcatgtgaaatcagtagtgcagaagaattgacattaacggagttaatgttcagtggtatcttcaagaatgcaaaggtgaagaagttggtttcgctcctctcttgctttgtgtggcgagaaagactccccgacgctgctaaacccagagaagaactcgacttgctcttcatacagttacaagacacagccaggcgtgtagctgaagttcagcttgactgcaaggtattcactaacatattctctctgctcagctaaaagtgaacttgaccatttgaagaggctttggtccataactttctgtcttttatgacattgacaggtcgaaatcgacgtggagagttttgtgcagtctttcagacctgatataatggaggcggtgtatgcttgggcaaaagggtccaaattctatgaggtcatggagattgctcgtgttttcgaagggagcttgatcagagcgataaggagaatggaggaagttctgcaacagctcatagtagctgcaaaatctataggagaaacacagcttgaagctaaactagaagaagctgtttccaagatcaaaagagacattgtattcgcggcgtctctctacttgtga

SEQ ID NO: 166455 - DNA, 2039 bp, Arabidopsis thaliana landsberg
  unsure (1)..(2039): unsure at all n locations
caagtcaacgtcccatcccatgtgtccctagcttggctatatatatattaaagactaaagaggagaagtgacattgtaagaagaagaagagaaagaggaagaaaatggttgacaatgagaagtcatatgtttacaagaaccgggaagcgccagtggaggcgcgtgtaaaggaccttctctctcggatgactctggctgaaaaaatcggccagatgactttgatcgaacgtagcgtcgcttctgaggccgtgataagagatttctccatcggtatacacaaccacagaccatttctaaattttgttttggtcaacgaccaaacctttgttagattttctctaattctttttttgttctcttatgaaaattgaacatactaaaagatacaaagcaagttgtcatattgttacaggtagtgtattgaaccgcgcaggaggttggccatttgaggatgcaaagtcgtcgaattgggcggatatgatcgacggcttccagcgatcagcgttagagtcgcgtttgggaattccgataatttacggcattgacgctgttcatggcaacaatgacgtctacggcgccaccatctttccccacaatattggtctcggcgccactaggtctggttttcttttaagcaaagtacaaatttagtagaagagactagagagagacttgcatataaagggattgatttgatctgatgagacttgccttcactgattcatttgagtcttatttgaagatttagtcatgttacacttataacctttttaatgctagctattagtattaaataattttgcatctattgtggccatgttgtgtttggcttgtgataacatgtggtagttcatgtgttaactttgtagagacgcggatttggtcaaaagaattggagctgcaacagcacttgaagtaagagcgtgcggtgctcactgggcgtttgctccttgcgtcgcagtaagtctcctacacacctagattttcgcaacaagatcgaatatgatttggttttattagtcaactgaatgagatgttgttcttacaggtggtgaaagatccgagatggggaagatgctatgagagttatggtgaagttgctcaaattgtttctgagatgacttcacttgtctcgggtctacaaggggagccatccaaagaccacacaaatggttacccttttcttgcaggaaggtatgcctatatatataaaattatggcttgatttgtgtctttagtatatttagtttcatttctcatggactctggtcacttggtgatagaaaaaacgtggttgcgtgtgccaagcactttgttggagatggtggtaccaataaggcgataaatgaaggaaacaccattttgcggtacgaagacttggagagaaaacacattgctccctataagaaatgtatttctcaaggagtctctaccgttatggcctcttactccagttggaacggagataaacttcactcacactacttcctcttaacggaaattctcaaacaaaaacttggttttaaggttggttcagtttgaaaacaatttaaataaagctagagatgtattcattaggttcatttgatatcatattttgtgtttggttactagggatatatagtttcggactgggaaggtttggaccggcttagcgacccaccaggttcaaactaccgcaactgcgttaaaatagggattaatgctggaattgatatggtagtgaacttttttcattgtctcgataatacaagagaatatataattaaaccaattaatgttattgtaggtgatggtacctttcaagtatgaacagtttagaaatgacttgatagatctagtggagtcaggggaagtattgatggctcgtgttaatgacgctgttgaaagaatacttagagtgaagtttgttgcaggactcttcgaatttcctcttacagatcgatctttgttacctactgttggttgcaaggtgagctctcgttctgaaatgctattaaactgcngtgctaagattattgagaaccatataaaacatg

SEQ ID NO: 166456 - DNA, 1622 bp, Arabidopsis thaliana landsberg
tgcatctcaggcggtatacgctggtaccgaatctcttccacagtttgttgagcgtacgcgtccgtggatgggggaacggggggcagttaatccaccactcaatccgtatggtatctttaatccatatagttgtttcattggtaaaatggcatagacatcttgtttgttaagtattcaagttaacattacttcattttcatacatcatacgtattctttgtctccattataattaccagattggtttttcttaacatggggaaatctagtgtaatgcttttgatctgaaaggaaagaagtattctcttgagtacggagattatttgaacgaatctctggtgaaaggaaagatcttggttttcagatacttaagtgggtcagaagtagctgtttcattcataactacagacaacaaagactatgcatctattagctctcggcccctgtctgtcttatcacaagatgactttgactctctcgtctcttacattaactccacaaggtacctagcagtcttctttctatttcattactcttaatattctccttctttgtcctctgatacccttgtgtttgctttctcaggtccccgcaagggtctgttcttaaaactgaggcaatctttaatcagttatctcctaaagttgcttctttctcttcccgcggtccaaacactattgcggttgatattcttaaggtatcatattatttatgctcttgattctttctttttttttcctggcctgagagacaatggttggtggatggattgcagccagatatatcagcaccaggagtggagattctcgctgcgtattcacctttgagtttaccatctgaggacaggcgcgataaaagacgtgtaaagtactctgtactgtccggaacttctatggcttgtccacacgttacaggcgtggctgcgtacatcaagacatttcatcctgattggtctccttccgtaatccaatctgccatcatgacaaccggtaaacaaaagtccaacttttactttcttgcatcgcaagtaacttgtgttgacaactctgttcttatactgtctcttaatgaatctttgcagcttggcagatgaatgctactggaactggggctgaatcgaccgagtttgcttatggagctggccatgtcgacccaatagccgctataaatcctggacttgtctatgagttgaacaaaacagaccacatctcctttctctgcggcatgaactacacttcgaaaacccttaaactaatttcaggtgatgccgtcatttgcagtggaaaaacattacaaagaaacctcaactatccttcgatgtcagctaaactttcggaatctaatagctccttcaccgtgactttcaaaagaaccgtcaccaaccttggtaccgccaactctacatacaaatcaaagattgtcttaaatcatggatctaagctcaatgtcaaggtttcgcctagtgtcctttctatgaaatcgttgaaggaaaagcaatctttcacagtgactgtttcgggcagcaatatcgacccaaaactgccttcgtctgcaaatctaatatggtctgatggaacacataacgtgagaagccccattgttgtgtatattgatggttactga

SEQ ID NO: 166457 - DNA, 794 bp, Arabidopsis thaliana landsberg
  unsure (1)..(794): unsure at all n locations
atggagatcatccatcagcaagtacaaagaaagaaggagatggcgcgactggttgatcttcaaaggaagatcgacgaagccactgaagaagtgcgtcatcttgttcaagatgaacaagatcgaaggccccaacacagggagcttcgtcaagaagacttattcaacgaggatgcatggtatgatgattttaatcatgatgcctttacttttgatgatgcttctcccttggtagtagaactgcaggctaccccatggcccccatcatacaagccacctcagctccccatgtatgatgggcactcagatctaaagccgtttctgatgagctacgaagcaaccatatcttcgtatgggggcaatactgcagtcatggtgaagtcttcgtcatggcagtccagaatgtacccaaacatggtactcttctcttcggccagggacaatcacgtcatagaagaagcttaaggacatgctggtcacccgttttcaaggatttcagacgaagccagtcactgctcaggcctttttctagtgcactcaagaccatgaggagtaccttcaggcatatgtccgaaggttcttgcgcctgagagcacaagcgcctacgatgcccaatgaaatcgtcattaaagccatgatcaaaggtcttcggctagggcctacggcccaatacttcgctaggaaaccccccagactctggagaagctgcttcagtggatgagtacatccgggccgacaatgacttccgccaaagaagggagggaagctacaaattntatgagatgactaggggcttc

SEQ ID NO: 166458 - DNA, 653 bp, Arabidopsis thaliana landsberg
atggccttactaaatgaattaatgagttttttatccaaaaacaaaaagcaggtgtagacaaagtgtatgacctaacgaagatagaagcagagacaaaacgaccaaaacgtgaagcctacgtaactgttcttcactcttccgagtcttatgtctgtggtgccataactttggctcaaagcctccttcagacaaacaccaaacgcgatcttatccttctccacgatgactccatctccattaccaaacttcgagctctcgccgccgcaggatggaagcttcgtcggatcattcgaatcagaaacccacttgcggagaaggactcgtacaatgaatacaactacagcaagtttcgactctggcaattgacagattacgacaaagtgatcttcattgatgccgacatcatcgtcttacgtaaccttgatcttctcttccattttcctcagatgtcggccaccggaaatgatgtatggatatataattcaggcatcatggtcatcgagccttctaattgtacgtttactacaatcatgagccagcgaagcgagatcgtttcatacaacggtggagatcaagggtgattacttagcacttttagagatgcatatagacaatatacttgacaattatattaacaaaaaatgaaaatatat

SEQ ID NO: 166459 - DNA, 481 bp, Arabidopsis thaliana landsberg
aattattaatttgagttaagataaaaacaaacaaacaaattatacgttgaaaatactcctacgattttttcttgtgattaacaataattaattaaatgttttctctctagggttggaggttgggaattttccgccggaagttagctcgtcggcagtttttcggtgcgtgcgtgtgagttccgtagatgatgaagaagaagagtatgcatataaaacagctgtgagtataggcggtcacgtcttcaaaggtgttctctacgatcaaggcccggccgagagaagctcctcgggcggtggatctcagccgttgaatctcataaccgcaggcccatcggcctcatcatcaagcccaaacgtgagctgcaacaatggagtcgttggctccacttcagatcattatatcgatcctgcctcacttaattatcctactcccattaacactttcatgactggtacgcacttcttctccaactcaagatct

SEQ ID NO: 166460 - DNA, 2425 bp, Arabidopsis thaliana landsberg
caattggctttttatttctcaggtaagtagtctcccccttttaaatccttattgggtgttgtattctcccaacaggcgtgagatgttcgttaaaaacaaaaacaattgctcaagagcatggcgtctggttctgttatgtatgtgtcttgttttaggtaataagagtcaacttcaattttgtggtcactttcttgctaattagttgggataacagctgttgcttagaaacttcaacggccaagacttcaattttgtctcccagcgtagtagacttggaacttctgatatgactttgatcacaaacaagatatatctttaaaaaaccactttagaaagaaatctatttgccaaatcatccatctttctgaaactatgtgttcaaatggcatctttgtctctcttcttactttatctctcttgttaggaaaatcatgcagtgaaacagatacgctacatcagggtcagttcttgaaagatgggcaagagctcgtttctgcttttaaaatcttcaaactcaagtttttcaactttaagaattcagaaaacttgtatcttggaatttggttcaacaatctttatcttaatactgatagccaggacagacctgtctggattgctaaccgtaacaatccaatctcagaccgctctggaagccttacagtggactctcttggcagattgaggattttaagaggagcatcaagcctgcttgagctaagctctacggaaaccacaggaaacacaacccttaagctgttggattctggaaatcttcagctccaagagatggattctgatggatcgatgatgcggattctgtggcaaagttttgattatccaacggatacccttcttcctggtatgaaacttggtttcaatgttaagaatgggaagagatgggaactgacatcatggctaggtgatactttacctgctcctggatctcttgtctttgggatggatgctaatataacaaaccggttgaccatcttgtggcgtggaaacatgtattgggcaagtgggctttggtttaagggtggattttccttggaggaattaaatgattatggtttcctcttttcattcatttcaaccgagagtgaacactattttatgtattcaggtgatcagaaatatgctggaacattttttcccgcgataatgatagaccaacagggaattttgcgtatatacaggcttgacagagagcggttatatgttcattgttctcctttcactttggatgaagacagtaattttaattgttataggcgaaattctagggattgtttgcacgctggttgcatagtcccagaaagacagaatgagagtttctatgggttcaggtttttcagagagacagtatcggctttctcaagcaatggatttgtacttaatgagactggtggaaggtttagttcagctgattgccgtgctatatgtatgcaaaacgcttcttgtcttgcctatgcttctaccaatctggatggtacaggctgcgaaatctggaatattgatcctaccgacaaaaggtcgtctcctcaaagtcctagaactatatatattcgtgtaaaaggtacaagttgtggaaatattttctctgccttttatttaactgtcactataagtgcagcaaatctctgtgtatatactactaagttttctggattacaggatttgtagtaaaccatgagaacgaaaaggcggcaacttggctagttgttgtggcatcactattcctaatgatacctgtgacttggtttattatatatcttgttctcatgaaattcaaagtaaaaggtaaaaattttatcggaatcaatccaatgcttccttctcaattgtgctctcttactaataaattcaccactttttgtgtatttttgatccagtgactgttatatttcgcgggatgttctactttttatggggaaaagccattccacaaagtaaggttcagctgaataatttttgtgcaagtgtctatgaaaaatgtccatgttgaattaggaactgtgtttttgatttttgctagtgattggtttcatacggaggaggcttccaacactgagggttggttccacaatagaccaagaaatgctactacgtgaattaggaattgataggagacgccgaggcaaaagaagtgcaaggaagaataataatgagcttcagatttttagctttgaaagtgtagccttggcaacagattacttctctgatgcaaacaagctcggtgaaggaggtttcggtcctgtatataaggtagtccaaattcttcagattttgatattaacttaagtagtttttgatgtttccgttgctctattgaaggggagtttaatagatggggaagaggtggctatcataagactatcattagcatccgggcaaggattagtcgagttcaagaatgaagcgatgc

SEQ ID NO: 166461 - DNA, 2286 bp, Arabidopsis thaliana landsberg
actgaatccttgaagaaccgcaaacaaagctcggcctctgtgatatcttcttcccctgtaacctctcctcagaaaccatccgatgtagccactaatgggaagccttggtctagcgtagtagcgtctagtgtagatcctccttataaaccttcatctgttatgacctctcctgagaaaacttctgatcctgtaacttctcctggaaagccaagtaaatctcgcgctggtgcattttggtcagatccactaccgtcttatctgactaaagctcctcaaacatcaactatgaagacagagaagtacgtggaaaaaacacctgacgtagctagtagtgaaactaacgaacctggcaaggatgaagagaagccgcctccactggctggagcaaatgtcatgaatgtgatattggtagcagcagagtgtgctccattttcgaaaacaggtaattatttcctttatcatctttgatcgattgtgcgggctatgtttgcataagtagtcttctcttggagtacacaaaactgaataccaataacttttataggtggccttggagatgtagctggtgctttaccaaagtctttggctaggcgtggacacagggttatggtaatatttattagagagtgccttttttcgtgcagataagctctctggttgattgtggacattgtaactcaaacctgttagtcaatcattttctttgattttcttgttaggttgtggttcctcggtatgccgagtatgctgaagccaaagatttaggggtacggaagagatataaggtggccgggcaggtataaaagctgttaatgtatcaacattcaaagtttcttcttttccatttaaaattccttgacaaggtagagaaaacttcatgtggagcacactttgctgcaggatatggaagtaatgtacttccatgcatttatagatggtgtggattttgttttcattgatagccctgaatttcggcatctgagaaataacatttatggtggaaaccgacttgtaagacttatcttattctccctgttcttcaccgaaaaatcaatttctgcctacatgtactaagtttgttataattgaatccaggatatcttgaagcggatggttttattttgcaaggctgctgttgaggtaaacctctgcgtcaagattgtgaacgggtaatcgatatttagctttcttcttatactaatgttggtttctggagatttgtttcaggttccgtggtatgttccttgtggaggtgtgtgttatggtgatggaaatttggcttttatagcaaatgattggcacactgcgttactaccggtgtacctgaaggcctattaccgggatcacggaataatgaaatacacacgatctgttcttgtaattcataacattgctcatcaggttagtaaattcttcactcagtagaaatgacttactttatgcttatctatccaagagaagtatgcataacctagtggtggaaaattaggggcggggaccggtagatgatttctcctacgtggatttaccgagccattacttggatagcttcaagttatatgacccagtaggaggtgagcacttcaatatttttgcagctggtctaaaagctgcggatagagttctcactgttagccatggatactcctgggaggttaagaccttagaaggaggttggggtctgcataacatcataaatgaaaacgactggaaatttagaggaattgtgaacggtatcgatacacaagaatggaacccagaatttgatacttacttgcactctgatgattataccaactattccttggagaatcttcacattggtaaaccccaatgtaaagctgccttacagaaagagctcggtttgcctgttcggcctgatgttccgctgatcggttttattggaagattggatcaccagaaaggtgttgatttgatagctgaggcggttccatggatgatgagtcaggatgttcagctggttatgttaggcacagggcgaccggatcttgaagaggtcctcagacaaatggagcatcaatatcgagataaagcacggggatgggttggattctcggttaaaacagcacacagaataacagctggtgcagacatattgctgatgccttctagatttgagccgtgtggtctaaaccagctttacgcaatgaactatggaaccattccggtggtccatgccgtgggaggattgagggatacagctcaacaatttgatccctatagtgaaacggatcttggttggacatttgatagcgcggaacaggt

SEQ ID NO: 166462 - DNA, 588 bp, Arabidopsis thaliana landsberg
gcgccggtcacatccgcgtgttcggcggcggtggcggcaccatcacgccggaagaaatccgcgagctgcaggcctacggcgtcgagcgcatctaccaccccaacgacggcatgaagctgggcctggtcgagatgatcgaagacgtgatgacgcgcgcccgtggcgccgtcggcaagcgcgccgaagccgagccgtccggcgtgcccgcccgcgttgacatcagcgacgagatcagcatcggccacatgcttaccaccatcgaggaaggccatctcgacgatgccgatctgacccgcctgcgcaaggaatgggcgctggccggcaagcagaccccggtgctcggccttaccggcaccggtggcgccggcaagtcgtcggtggtcgacgagctgctgctgcgcttcctgcatgcgttccccgagatgcgcatcgccgtgctcgcggtcgatcccacccgccgccgttccggtggcgcgctgctcggcgaccgcatccgcatgaactccctgcgcagccatcgcgtctttatgcgctccatggccacccgtcggcagcacgccgtcaccagcgtggtgctgcacaactgca

SEQ ID NO: 166463 - DNA, 4239 bp, Arabidopsis thaliana landsberg
  unsure (1)..(4239): unsure at all n locations
gaaggagtgacggttactcaggtcgagtgacagtccagctcgggcagctggaaggagtgacggttgagctcgaggtagctggacgagtgacggacgagctcgaggtagctggacgagtgacggacgagctcgaggtagctggacgagtgacggactagctgggcggttatgggcgaagagatacaactcttcggaaaggtgcaactcttcggaagggcgcaactcttcggaaaggtgcaactcttcggaaaggtgcaaggaacggatgtgttgattcgggaagcatccattcgccccctatataagggagggcgcccaggaccattccactcaccacaacacaccgaaaacacaagaaactcaccattaaaactctctccctcttgggagaataaatagtcttaggattcggtagccgggctgtggccggcaataaagaaggagggtcggatcgacctaacctcgagaaggaaggtaaaggatcgtagactttgagtctaagggttctaggatgtgagttagtagtcggatccttgaaagatcgactagagggcagggtagtatccgggtcatgtgcatcctacacaagactcggtccgggtagggatcggctgaggcggggacgcggctcggcggaggaccggcgggtcttaactgacctgccgagaatcggccgggctgatgcgcgatcttcccctctttgaattctctccacggattcgagtagtgtatggcatatagagcattgcatggacttgcatatgattaagtaaatgagattacttatggctctatgactttcaggaatgaatggtgatcgtgggaaggacttggcttaggcgcgagagattcaaggtcgggatgatgggtggtgatagttcggatatctagggatagattatatgacttgtaatagcttatatgcaaactcataggttgtatcgaatcctttgcttaatcaataaagtatccgattgtttgtttactctattcgtctcatatattgaatcacggaatcatatggaacggattagactaggaaagaacctcataaacggttaaggccgagtcacttagtggcttgggtcgagagaactcgttcggactttaggcagtccggatcggagcctttcaagttggtatcagagcatgcttggttctaggactaggtgttgggttaaggggtatcaccactcgtcggcttgagaatctcgtagtagttgctctttactcttttgccattttactaggagttatgtggaataactttggaggtttcgcatatgggtaacagcagcaaaacgggaaagaataaaaaggacaaggtcattgtcgaggagactttggttgaggaggaaacgatgatcaacgagaaaaccagagtcgggacgatgttcgatgggacagactcggccggacctgaggccgggaagaagtccataaatgaggaagcaccggagagtagtggtgcaagggacatcacggataaccggaacaatactccaacggcccaagaacagtgggatttgatgaagggaatgatggcgcaactagccacattgaccaaggccgttgtagcagatccggtggtcctaaaaggggataaccaaaaggacgatgactcggaagttgtggaagtgaatccacaaccgaattatgggcggaaaagaggagactatctgagtcttctcgaacatgtctcaaggctgggcacgagacacttcatgggcagtacggacccgattgtggccgatgagtggaggagtagactcaagaggaacttcaagtctacccgctgccctgaggattaccaaagggacattgcggtccatttcctggaaggagacgcccataattggtggttaaccgtcgagaaacgcagaggggacgaggtccggtcctttgcggatttcgaagacgagtttaacaagaagtactttccaccggaggcttgggataggcttgaatgtgcgtacctcgacctagttcaagggaaccgcacggtgcgtgaatatgatgaggaatttaaccgcttaaggcgttatgtgggacgtgaacttgaggaggaacaagccttggtgcgccgatttatccgcggactaaggatagagatccgcaaccattgtttggtccggacattcaactcggtttccgaattggttgaaagggcagcaatgattgaggaagggatcgaggaggagaggtacttgaaccgggagaaagcaccgatccggaacaatcaatccaccaaacccgcggataagaaaaggaaatttgacaaggtggataacactaagtccgatgctaagaccggggaatgcgtgacctgtggtaagagccacagcggaacttgctggaaggccataggtgcatgtggccggtgtggaagcaaggaccatgcgatccaaagttgcccgagaatggaaccagggcagtccaaggttctcggtgaagagacaaggacttgtttctattgcggaaagactggacatctaaagcgagagtgccctaagttgactgcggagaagcaggccggacaaagggacaatcgcgggggaaatggactgccgcctcccccaaagcggcaagccgtggcaccgcgagtttatgagttgtcggaggaagctaacgatgccggaaacttcagggcgatcactggtacgttctcacaactccctattcattatttcaataactgcatttgcattgcatcatgcatatgggaaaggggaggtactcagcattctaagggaatgtgtagggaccttgagagtaggtgacgtagtaacgcacactctatttgattctggggctacacattgttttgttagtccggaattggttgaaacaggtgggttcaggaaagaaccaaacaccgattatggaatggtacgagcggccggcggacaggcaatgtatccgaccggacttgttcggggcatctcggttgtagtgaacggtgtcaatatgcccgcggacctaatcattgttccactaaagaaacatgatgttatcttagggatggactggttggggaagtacaaggctcacatagattgtcaccgaggacggatacaattcgagagggacgagggtatgttaaaattccaaggaataagaacaacctcgggaagcttggtaatctcggcaatccaggctgaaaggatgctcgggaaaggatgtgaggcaaaggatgtgaggcatatttagccacgatcacaaccaaggaagtgggggcgagtgcggagttgaaagacattccgatcgtcaacgagttctcggacgtgtttgcggccgttagtggcgtaccaccggaccggtcagacccgttcacgatagaactcgagcccgggacaacccccatatctaaagctccgtaccggatggcaccggcggaaatggcggagctaaagaaacagttggaggagttgttggataaaggattcatcaggccgagtagctcaccatggggtgcgccggttctgtttgtgaaaaagaaagatggtagctttaggctatgcatcgattatcggggattgaataaagttactgtgaaaaacaaatatcctttaccccggatagatgagttgatggatcaacttggaggtgcacagtggttttcaaaaatcgacttggcctcaggatatcaccaaattcccatagagccaacggacgtgaggaaaacggctttccggacaaggtacggccactttgagtttgtggtcatgccannnnnnnnnnnnnnnnnnnnnnnnnncttcatgaaaatgatgaatggggtattccgggatttcttagacgagtttgttatcatcttcattgacgatatccttgtttactcgaaatattgggaagctcaccaagaacatctaagggcggtgctggaacggctaagggaacatgagctatttgcgaagttaagtaaatgctcattttggcaaaggagcgttggttttcttggtcatgttatctcggaccaaggagtatcggttgatccggagaaaatacggtcgataaaggagtggccacgaccaaggaatgccaccgagattaggagttttctcggactagcggggtattaccgaaggttcgtaaggagttttgcgagcatggcccaacccttgtctcgactgaccggaaaagacaccgcattcaactggtcggatgaatgcgagaaaagcttcctggagttaaaggccatgttgactaatgcaccagtattggtcttaccggaggaag

SEQ ID NO: 166464 - DNA, 665 bp, Arabidopsis thaliana landsberg
tctcgcgcgatgagctcatcgacgcgctgcacagcggtcgcgccaagtactcgagcatcttcaactacccgacgcccacgtgggccgacgtcggcgtgatcggttggctcgtcgacggcgccgcgatcatgaaccagattccgctctgccgctgtacctacggtccttatgcccgcgccatgatccgcatttgcaaggaggagtcgttccatcagcgtcaaggctacgacgccctgctcgccatgatgaaaggtaccgacgcgcagcgcgaactcgtgcagcaggctgtcgatcgctggtggtggccggtgctcatgatgttcggcccgagcgataaggattccgtccacagcaatcaatcggcgaagtggggcatcaagcggatttcgaacgacgatctgcgccagaaattcgtcgatgccacggtcgagcaagcgaaggtgctcggcgtcacgctgcccgatcccgacctcaaatggaacgaggaatgcggacacttcgactacggcgcgatcgactggggcgagttttggcgtgtcgtcggcggcgacggcccgtgcaaccgggagcgcctcgccacacgcgtgaaagcgcacgacgaaggcgcctgggtgcgcgaagcagcgctcgcccatgccgaaaaagttcgccagccttagagaacg

SEQ ID NO: 166465 - DNA, 333 bp, Arabidopsis thaliana landsberg
tcaataaggagaagccggaacagggcatcgtggtggcagtcggcgaaggcagatgggatgaggatggcgagaaacgagctgcctatgtacgtaagagtaggcgaccgggtcatcttctcgaaatacggcttcgatgaggtcaagtttggcggcgaggagttctatatcgtacaggcatcatccatcctcggcatcatctcgtaatcagtcattatccgacgagcgctcagctcactagaagaaaactactatatggcaaaggaattggtatatcgcgaagatctgaagcacaagctcaagaagggtgtagatgcggtggcagataccgtgaag

SEQ ID NO: 166466 - DNA, 1336 bp, Arabidopsis thaliana landsberg; identical to SEQ ID NO: 60678

SEQ ID NO: 166467 - DNA, 1796 bp, Arabidopsis thaliana landsberg
cgtttagatagccaatcatatttagctggcttaatttggtcgatgtgttagtttagtgtccagcagccaaatatcttgtcaacaacttgtctgcataggatttgtgctggctgtaatatggagattggccatggaagatttctgaattgccttaattcactatggcatccagaatgttttcgatgttatggctgcagtcagccgatttctgagtacgaggtgaaaccaagctctcttccatatcctcttcatttgctttctggttctacttaacctttagattttcttttgtaatgtgtttcccttttttcctatagttttcaacatcagggaactacccttttcacaaggcttgttacagggagagatatcatcctaaatgtgatgtctgcagccactttgtacgtaaacctctttccttttctatcattttagcccataaatatattcatgtgttgttgtttttttccggatcttacacttatcgtctgttgctttgtttttctcccgaatgtaaattctttgaacagataccaacaaatcatgctggtcttattgaatatagggcacatcctttttgggttcagaagtattgtccttctcacgaacacgatgctaccccgagatgttgcagttgtgaaagaatggaggtgggttttcttctcctctaatatgtccccaaacatacatcatctactcaaaagtgaaaacattttttagccggtaattgacaacttagctatactttgtagccacggaatacgagatatgttgaacttaacgatggacggaaactttgccttgagtgtttggactcggcggtcatggacaccatgcaatgccaacctctgtacttgcaaatacaaaatttctatgaaggactcaacatgaaggtagagcaggaagttccactcctcttggttgagagacaagcacttaacgaagccagagaaggtgaaaagaatgtgagtaaagaaaagacaattatccagtactaagctaatacttgaaattattatcacattctgtttctaaagtattaaaccttttcattttgcttcttagggtcactatcacatgccagaaacaagaggactctgcctttcagaagaacaaactgttagtactgtaagaaagcgatcaaagcatggcacaggaaaatgggccgggaatattacagaaccttacaagttaacacggcaatgtgaagttaccgccattctcatcttattcgggctccctaggtaaaaaagactctttttgcttccattgaattgatcttatgtcacagttcaagcattgatggttttgctgaattttgttcaggttacttactggttcgattctagctcatgagatgatgcatgcgtggatgaggctcaaaggtgaatttcttactactcctcttaacgtcttatattactgcttctttctgttgatcacattgttgaaaccttgtttcgttttggtcttaaaaaggattccgaacactgagccaagatgttgaagaaggtatatgtcaagtgatggctcataaatggttagatgctgagttagctgctggttcaacaaatagcaatgctgcatcatcatcctcctcttctcaaggactgaaaaagggaccgagatctcagtacgagagaaagcttggtgagtttttcaagcaccaaatcgagtctgatgcttctccggtttatggagacgggttcagagctgggaggttagctgttcacaagtacggtttgcgaaaaacacttgagcatatacagatgaccggtagattcccggtttaagaa

SEQ ID NO: 166468 - DNA, 2343 bp, Arabidopsis thaliana landsberg
catgtcctaaaatattcaagatggtgtgcgttgatgagacttgtccatggcatttgactgctcacgtcgtgaaggattcagaaagtttcaaaatcacttcgtatgctaccacacatacgtgtaacatcgactctcggaagaactacaataaacatgctaattataagctcctcggagaagttgtgaggagcagatacaattctacgcagggtgggccgcgagctgtcgatttatcacaattgctcctaaatgatctgaatgtgcggatttcatattctaccgcttggagagcaaaagaggttgcagtggaaaatgtaaagggggatgagatcgcaaattacaggtttttgccgacctatttgtatcttctccaattagctaatccgggtacaataacccacctacactatacaccagaagatgatggtaagcagcgcttcaagtatgtctttgtctctcttggcgcttctatcgaaggtctgatatatatgaggaaggtagttgtggtagatggaacgcagctagtaggaccttacaaaggatgtctccttattgcatgtgcccaagatgggaacttccaaatattcccaatagcttttggtgttgttgatggtgagactgatgcttcttgggcatgtttttttgaaaagttagctgagattgttccagacagtgacaatttaatgattgtctcggacagatatttatctatatacaaaggcctaagtgtggtttaccgagagcgcatcatggagcatgtgctgttcaccttgagcgaaacatctccacctattatggtaagtttggtgtgtctgctttatttttcagcgctgccaaagcttatagggtcagggatttcgagaaatattttgaactgttaagggaaaagagtgctaaatgcgcaaaatacctagaggacataggatttgagcattggacaagagctcactgtagaggagaacgctccaatatcatgtctagcaacaactctgagtccatgaatcatgtgttaacaaaagcaaaaacttatccgattgtttacatgatcgagttcattcgggatgtcctaatgcgatggttcgcatcgaagaggaagaaagttgctaggtgcaaatcttctgtgacacctgaggttgatgagagatttctacaagagttgcctgcgttaggtaaatacgctgtaaagatgtctggaccgtggagctatcaagtgacaagtaaatccggtgagcattttcatgtcattctggaccagtgtacgtgtacgtgtcttaggtacaccaagctaagaatcccatgtgaacacgctctagcagctgcaatcgagcagttatatcattcacaaaaaaaaaaattagtctttcgattcgcttgttcttgctatccgtgagatggaggggtttcatatggtctcagaattgtgtcctctgatcactgggtggcgaatttatgtctttgtcgtgagagtcttcaagaaggttatatcgcccaacgtcttcgaactcggccttatcttggcagattacgcggtaatttccgtcaaatcattatgtgttctttctcgttcattcgcttaacttgtatataaaaatatggattctatcatgttctgtagggatccaattcccgtattgaggccaccattgattgtcgccttgctccgttttacttagaccgattcgctgaaaatgagtggaagacgatcacctctttcctggtccgtaagggaactgactcagtcagagcaacaaagcatgaatacggaatattgtttatggattagaccgtcgtcgttgaggccccaccgaagacaccaccagttccaaatttcgatttcactcccttcgactacattttggagaaatctgcttacaagaacgttttagtcggtgagcaggatttctcccgatgctttatttattacatttttgaaactttttaattattatctttgtttctccatcatctagatgtcgttggagcgttggatgatgtaggcggattgactacagactattacggtctcaaactgagtttcaagataaaagatagatagtaagtgttcttttcatttgttttatttacaatgtcactctaaacgctaactgtccttatttctaacgtagcagtgaagtcttggagtgcgaagcccgcaatcaacaggcggagtactttgatggttactttcagagtttgggtaagggaaattttgttgtcgcactcagcttttggcgtctaaccgaactgtctaacccgaagcttgagagccatggtgctatttcaaaggtggttgccaatccggacagaccagaagttgcggatatctcgatggtggttttttag

SEQ ID NO: 166469 - DNA, 510 bp, Arabidopsis thaliana landsberg; identical to SEQ ID NO: 73495

SEQ ID NO: 166470 - DNA, 457 bp, Arabidopsis thaliana landsberg
gtgcgcatcaacctgccgacctggctgaccctgtttcgcgtgttgttgctgccggtgatggtgctggtgttctactcgcacgacgcggtcagcgcgatcccgctgcggttcgccaacatcaccgcggtcgccgtgttcgcgctggcctcgatcacggattggctggatggctggatcgcgcggcgctggcacatggaatcggcgttcggcgcgttcctcgacccggtcgccgacaagttgatgatggcggtcgcgctgttcctgctggtgcagagccaccccacctggttgctggcggtgaccagtgccgtgatcgtcggccgcgagatcacggtatcggcgctgcgcgagtggatggcgttcgtgggcgagcgtggtcacgtaaggtgcagtggatcggcaagttcaagactgtgatgcagatcgtcgcgatcctgatcctgctgtgggacgcgac

SEQ ID NO: 166471 - DNA, 432 bp, Arabidopsis thaliana landsberg
gtggatgcctgacgaactgcccgttgtacagcagaaaatcgaaaaatgcaccgaagtgatcgaatccttcgcgagcataggcattgcccgtaccatgaacatggtcaactcattacgcttcgatcagggatttcactgattttgatatgattttttggatatttgattgcggattgcattaaaatcaagactatgaaaatcttctgcgtagggcgtaattatgcggatcatgcgaaagagttgggtaatgcggtgccggaagaaccggtcatctttatgaagcccaaaactgcattgctgcaggccagttcccctttttattatcccgagtttacgaatgagctgcattatcccccacccctcgttctgcggataggcaagaaaaagcggaatatacagccggaatatgcagaaaaatattatgatgcgttt

SEQ ID NO: 166472 - DNA, 555 bp, Arabidopsis thaliana landsberg
acgctgcgcaatcagacgtcatccggtacgaatgccgtgatcgcatcgcgacgatcaccttcaaccgaccgcagaagctcaacgcattcgacgacgcgatgatcatgcgtctcgcgaacgtcttgcacgcgttcgacgtcgatccgaacgccgacgttgcggtgctgcgcggcgagggacgcgccttctgcagcggcgccgatgtgcaccagcggcaactgcgcagcgaagcggagctggagaaacaaggcggtccgcagggctggggagcgcacagcgccgatctgttcacacgcgcgatcaactggaagccggtgatctccgcgccgcacggtttcgccgtcgggctcgggctcgcgatggttctggaaagcgacatcatcgttgccgaggcgggcacaaaattccaggtgacggagaccggccgtgggcttgccgcttcccgtcactgggcgctgctcgcctatcgcggtctgcgctctttcgccaccgagatcacgatcaccggcaaaatcttcacggcggaagaagggcaggcgaccggcgtgatcgatc

SEQ ID NO: 166473 - DNA, 2116 bp, Arabidopsis thaliana landsberg
ttcaaccaacacctcttgcagccctctgtgataatgactctattatctcttctcttgctttaccttcgattaattctttcgattctttaaagtctgcttcataaaataacaagcctagagttcttcgaaagcttgtttctcctattgttcttgcaggaaacgaagagagtgtcgatcgacaccaccatgagtgtccgaacttcgtccgccatgtgctggcattattcacccgggctcgggaagtaaacagagaattcagttgccatgacctgcttcagctctgccaggtcaggaccaatgttaggagtgaccaagggacgtactacattagtgcacgtcccggatctctggtcctcggcggtttgaaatcctgccgagacaccaattggcgatccaagtatttctttttcagagtagatcgtcattcagttggcaattttgatcccgggaggataacaaggacctggtctaccaacctgggtcagatggagacctgagcctcttgatttttctttgttgtttgtgttgaatccttgaatgcttttgctaatcgttagtactgaaactaattgcttgtttttgatgatttgtagcaaggaccaaggaagttactctctcggagaccgaacttgagctgttagcccttctccgacgtggtcagactgactggtccgctttcagcagctatcgcatcgtagctgctcttgccgtagctccagcagttcccgtagctccagcagttcccacaatcgttcctccagaagcacagctagatccaatcgaagaggtttcgcggattgaaccggttcccgaagctaacctgcctataggtacgagttccgctatatatatatattttttttaaaagtatgagttattgagacagttgcgcaacttgaattggttactaacaaatgtcgtgctctatctgctcagttcctcctgactccagctccacttcagaactcccgctcattagaagaatgaggcgtccaagccttcgtgttcaacgagtcaacgcctgggctcacgaccgtgatcacccaatcgttgaggacgaggctgggttagcgaacttgcttcgccacatcaaagggaggaactgccaggttcctggagtgaagaacatggccgaggcggcggcctatgctgacatgatggcgaaggagggcgaggtaattatcgataactgtctccttctaatttatatctttacgctagttatgactttcggttttgctttcggtacgcgatagctgccacaaacaagctggttgctctctatgagcagcgtctgagccaggtcccctcggcgaacgagcatgaagaaggaaaggccctcatcctggagctgacatcgagtgtgaaggctggttaggatcgcgaagtctcgttccaggtacacctcagttttgacttgtttataaataattcgtcgttgatttgatgattctaacctgattgttatttcaggcggagatcgagaggctgaaaatggagctgtccacttcaaaagacctcgagaaaggttttgctgagaagatcgggttcatggagatggagatctgggggttacaagctgacaagcagacgtcgaggagcctaatccattgcttggagcagaagagggaagagctctccaaaaaggtggtggacctgacttcgattgcacaaggggcgaagagggcggttcacgatgctaaggttgagctggctgctgcgtattcgaagctactggctgggatcaaggagaagtgggtcgccaaaaaggagtacacggtactggaggggcaagcggctgaggtggaatcgaacctggctttgatcgaccagatcaccaaggctgctatcgatctgaccgtggagaaacctcggctgcgagcagagctggatgacttagaggcgtagtgcaagtcaaaggaggtatcagactttactctaagcaagttggatctcccgcagttttaaagatttcggtggtacgtccgatggacgtcgacgacaagggacgccaattggcttggatgagtttgggagcaacaaagatgcgtttccgggaggtctcgcggagggttctggtactgtcttcgctacgccagctggagaatcgagggag

SEQ ID NO: 166474 - DNA, 335 bp, Arabidopsis thaliana landsberg
cgaagagattatgtttctgattttttgtttgttatgtttccttgtaggaagtgtatgataaagatacgttcacttcccatgacccgatgggagatgcggaaatagacatcaagccgtttttcgaggttcaaggaacggatattcaagaactcactaatggaaccgagatccgtagagtgaagccgagtggagataactgtttggctgaagagagtaggatcatcttcagtaatggaaagattcttcaagacatgattctccagctgagaaatgtagagagtggtgaggttgagatccaaatcgagtggatcaatgttactggttcaagcgatttt

SEQ ID NO: 166475 - DNA, 1290 bp, Arabidopsis thaliana landsberg
  unsure (1)..(1290): unsure at all n locations
atgtcttcctcttcttcctcttccagtcagaaattctacgtttttctgagcttccaaggcctggacacccgtagaacctttgtcagccatctccgccgttcattggacagaaaaggcattaagacttttgaagatgaaaatgagtctctgagaggtgaattagattcttctgcggtctatcagacaattggagagtcaaaagtggccgttgtcttgatatcggtgaactatgcctcttcacctttgtgcctggatagtctccttaagattttgaagtttcaccagtcaggttcactcgttttgataccaatcttctatgaagttgatcctatggatgtaagaaaacaaattgggaaactgtacgaagcattctcattgcatgagagagaaaaccctgaaaaggttcaaacatggaggcaagcactgtcccaactggtcagcattccgggcggccagtactcagagatttggtaatcctataatcaggttctatctaacaatttttttatgtgttactttaaatggtttcctgattttagtattctctgtgatagggatggtgatgcagagctgatccatcaaattaccgttgacatatggaatatatttgtcgcttccaagtcaagtgatttgtgtggtcttgtggggatggatcgccacatgaaagccatgtatagattgttagatttaggattgaaagatgaagttcgtcatatcaaaatttggggtagccgagacatcggcaagactgagtttgcaaaatatctgtatgaagagattttgcacaactttgatacccatgtcatgttaaaagctccacaaagaatttcgcgttttgaggaggttcgtttggcagaatatgtgtgtcttcgacttgagaaagcaagaactttgtcaaaaacatcgaaggacactgcatcaaggtttctcctcgtactggataatgtgaatgaatcatttgacccaataagaaaacttgcaagggtgattagttctttnnnnnnnnnnnnnnnnnnnnnnnnnnnnnnnnnnnnnnnnnnnnncagttcgacttcccctttaccgtttcaatatgaagttttagggctggagttctctgaagctcttcagctcttctgtctccatgctttcgagcagactcatccttttcttggttttgaagacctttcatgtcgtgcagtgaaactcgcaggtggttttcctttatccttaaaaagattaggctccagattttctggtagaaagaaggatgaatgggaagtgatcttgtttggatacgaaagatcaact

SEQ ID NO: 166476 - DNA, 1275 bp, Arabidopsis thaliana landsberg
gagtgaaagctccatgtccccatctgaatctgctaagaagaatgagaagataagtgaggaagctacagtggagagtaaagccttttctattagtgttgagaagcaaacgcctgacctagatggcctcattgttgaagagttatgcatgggaaaccccaacggcaagaaagctgagcctggcaaaagggtatgagcatttagtcctaaactgttggagtttgtgtgcaaatatttgttggaggtcaatctattgtctctgagtgcaggtaagtgtccattatactggaaagcttcaggggaatgggaagattttcgattccaccgttggaaaatcacgttataagtttcgtctaggttggtattataacttgatgcgaaagtaagagctttattaatgtgtgagtggtacttggatacttatgtgcttgctgttacacatacaggtgctggaaaagtcattaagggattggatgttggccttaatggtaacctagctagtttcttactggtttttcttcactaaatatggtcaaatggtgtgttgttttgatctctttttgtaaatttctaaagggatgcttgttggtgccaaaagaaagcttacaattcctccagcaatggggtaaagcctttgcaaatctttttttatttatctttgataatgtgatgttttattttaagctttttttaatgagagatgataaaattgtctggctcacaggtatggtgcggaaggtgctggtagcattccccctgactcttggctggtctttgatgtcgagctgcttaatgttaaataaagctgccctctaatccctagagaacttcctaagactgaatccaatgatgagttttttttggagatcgtatagtgtttcctctgtaaaggttttaaatattgtgagacacactaaggcccacaaaacttcacaagtgtatattattcattcccgttgttataaaacataaaacatatctaaagaacaacttaagagaagcagactaacaaactatagttgtcttctccattgtcatatcactgtttcgatatatacagttcacctttgtaacaagaaaaaacgtgttctgcagttctctatatcactaaaactcggatagagaatcaacagtcgttgtgggattaaggcaaatatcaaatccaaaaagcttcatattgttttgtttagttctccagatccaagtaactcaagtcgtcgaagaatccattaccatccttcccctcgagctgaaacggaggtattccgtagttgaggc

SEQ ID NO: 166477 - DNA, 1729 bp, Arabidopsis thaliana landsberg; identical to SEQ ID NO: 28715

SEQ ID NO: 166478 - DNA, 1867 bp, Arabidopsis thaliana landsberg
gaattgaaccgagagattgttgttgttttcagtcccctcagacgaagactatgcgttcaagcacttctttagggcttctaagacaacttttagctacatttgctcgctcgtcagggaggatcttatctctagacctccctctggtctcatcaacatcgagggaaggcttcttagtgttgagaaacaagtcgccattgctcttcgaaggttagcttccggtgattctcaggtctccgttggtgctgcctttggtgttggccagtccactgtttctcaggtaccaatcaacctctactcagctccctatttccctgatttcaatatatatatgctgtatcctgacaccatccatttgtttccccaggttacatggagattcatcgaggcactcgaagaacgtgccaagcatcatcttagatggccagattctgaccgaattgaagagatcaagtcaaagttcgaggagatgtacggtctccccaattgctgcggagccattgacactacgcacatcatcatgactctcccggctgtgcaagcatcagatgactggtgtgaccaggagaagaactacagcatgttcttacaaggagtctttgatcacgagatgagatttctcaacatggttaccggctggcctggcggcatgaccgtctccaagcttctcaagttctctggcttcttcaaactctgtgaaaacgctcagattttagacggcaatcctaaaactctatcccaaggagcccagattagagaatacgttgttggagggatcagttacccgcttcttccctggcttataactcctcacgacagcgatcatccctctgattccatggtggcgttcaacgaaaggcatgagaaggtgaggtcagtcgcagctactgcctttcaacagcttaaaggaagctggaggattctgagcaaagttatgtggagaccagacaggaggaagctacctagtataatactggtgtgttgtttgttgcataacatcattatcgactgtggggattatcttcaagaagatgttcctttgtctggtcatcacgactccggttatgcagaccggtactgcaagcagaccgagccgcttggtagtgagctcagaggatgtctgactgagcatttgcttaggtgaggatcttaaccttgggaattggacatcttcatctcttctctaaggccgtactaagcccgttagaccattcagcatcagtttagtggtagcccgagacatatcggacaaaagcaatgttatgaaacttttcttcaggtatcaacaccagattaacatcatgccagttggacctacaaaaatagattcatccttaagtgtgattaccatactttgtgaactactaatcttttgagaggagtggactatatccccaacggaactgtttgttttggcaatgtaaatgttatttttttaataataattggtgttttcttttagtattgagttgttgggttccattatattcgctctctgcgttgaaaagtttgtgattctacggaaaggaatatgctctggtggatgcgtctcggttttggttctttgtgctcacaagtaacgacggacgaagattcccaacaaattcacatgacaaactataaactatagtctataacaaattacgtaatctgatttatggctttattatgaattacacaattaaatacagtagtcatcttaaagagagattattacagtggaccttttggtttcgatagattgcgtcacaaaccaaaaaggttgttcatttctcgatgtacaaatattatttttaagtcgaatgtaaatttacaagaaatttgggggaaacgaataaacggcgacggaagggctgccactagaccgaga

SEQ ID NO: 166479 - DNA, 1296 bp, Arabidopsis thaliana landsberg
cctcctccgttgtatgttccgtgtcccaacgagcatgaccctatctccttgaactacacgtcaggtaccacggcagacccaaaaggtgtggtgattagccaccgaggagcctacttgagcgctttgagctccattattggctgggaaatggggattttccctgtctacctctggacactacctatgtttcattgcaatggatggacgcacacgtggtccgtcgctgctcgtggtggtactaatgtatgcatcagacatgtcactgctccagagatctataagaacatagaattgcatggcgtgactcacatgtcatgtgttcctacggtctttaggtttctccttgaaggaagtcgaaccgaccagtcacccaagtcctcgccggttcaggtgttgactggaggttcttctcctccggctgtccttataaagaaagttgagcagctggggtttcacgtgatgcatggctatgggcttacagaggccaccggcccggttctcttttgtgaatggcaagacgagtggaacaagtaatatatataaccattatgattttacataatatactacaatcttttatatataatcatgttgaagataacaatttttattataaaaatccaaaatagactaccagagcatcaacagatggagctacaacaaaggcaaggtgtaaggaacctaaccctagccgacgttgacgtgaagaacacgaaaactctagagagtgtcccacgcgacgggaagacaatgggagaaattgttattaaaggaagcagtctaatgaaagggtatctaaagaaccctaaagcaacatctgaagcatttaaacacggatggcttaacacgggagacataggtgtgattcatcctgatggatatgtagagatcaaagatcgatccaaagacatcatcatctcgggaggtgagaacataagtagtattgaggtcgagaaagttctttacatatatcagcaagtgctcgaggccgcggttgtggccatgcctcatcctctatggggtgaaaccccgtgtgcgtttgttgttctaaagaagggtgatgaggaatcggtgactagtgaaggagatctcattaagtattgccgtgagaatatgccgcattttatgtgtccgaaaaaggtggtgttctttcaagagctgccaaagaatagtaacggaaagatcctaaagtctaagttgagagacatcgctaaggcattggtggtcagggaggacgatgctggctccaagaaagttcatcaacgcagtatcgaacacgttagttcgaggctttag

SEQ ID NO: 166480 - DNA, 905 bp, Arabidopsis thaliana landsberg
ttttcagttcagaggtaatatctgtttaatggtttattaaagaagcaggtcaattttggattgcattggtataagtatatcgggaaaatggcttcaaaagaagttcctattccagtccgggaatttgtcttttggtaactatcatgagatttatgcacgctatctataaagtggtgaggatgtgttttagtcctgtggaaaaatgcgaggttcttgatgttgaaactggtgaatggagtgaactgaatccacctcctaacgatattgacgtgggaaggaagtcagtgtgtgtgaatgggtcaatctactggttaaaaaatgtttagcgtttcggaatcctagccttggatcttcacacactagagttccacaatgtttccgttccatctacgtgttgcaccatgagtgcccagatggtgaaccttgatgaccgtctagccataactaaaacaaacggtgcgccagaatgggagctagagatactgagcctgatggatgtagacaaagaaatatggagcaagacttactccataactttagccagtatcattattaaccacccatgggagtctagttggttcacggtgttgacggtttctaagctagggaatcttgtcttttgtgacaatcacaagcggttgtttaaatataataccgagacaaatgagatttgctgtctctcctcagatatttctgttatatctccttatctcgaggatttggtaccacttcgtttggactcaggacatgatcatcgggattacaaaatcaggacatctagttgcggattgttttcgaagcatccggaggcagggttattcaaggagatcatcacttttcggtttgtgtttgccactctagttctagttggttatcagtattatagatcattaaaattcaagtag

SEQ ID NO: 166481 - DNA, 1853 bp, Arabidopsis thaliana landsberg
aagctgttgaaaatctaggtgtagacagttccaagttagtttcttctgggttatgggttgctgtcaagaaacttgtggaccatggtagttctcgagttcaggatcaggcgagaaagctctttggtagctggaaggataaggatgattatgaccactctgaacatgacagtgaaagctgtaacaaaattcatgaagatgagatgagagttgtagcagcaagcatcgagagcagtgggcaaaaatctgctgttacactttgttcgacgcaaagtactagtgaaaaacattgtcctgaaatagcagatgaagccttgctatcaggatgctcagaaggaaacatcccagatcaagataagggtttgggactgcagaacgacaaggctgggtttgtctcgaacgtgaattcccactgctctaattcgatgactgaaactttcaatggttcttgtaccgatgatatcatgaaagaggttcaagaaaaactttctgtgaaggaaaaaagctctatgggggagacaagtggcccaacgacttttggtactatgcctactgggtctagtagcctactttatttagagcgtgatagtgctgaaggcccatcaaatgctccactggatgctgagatacccaaggaaaagcagatggcaaactattttcttgaaaaattgggtgaagcagggacatctagtgcagcaggacacgtagctgtgtcttctgattctattgttgccagcatggagttggagaaaaatagtcttttgcagagtagtcttgattcaaatgaggtgagcaagaatgtgtctgggacgatatgtgggtcgcacgatgtgagcgtagcccataatagcaaacaggtgtcttcattgactcatatgacggacaatcaagattctgacaattcatcaagattatcaggtggccttggtagaagtagaaaatttgagagtgacaatttaactggtcttgctgacaatgaaggaaaagatgatatgggtcattctgacaaaaagaggagagtaaaacggagaaaaaaacgcatctcttctagatcaatgaccatatcccagcgccttggagcaattgacaaaacaactactgatattgatcttggtattttggatgccttggaggtcgctaccaaagtcgcacaggaagtcgcaagagaagtggactctggagaaccttctcatagttcttcagaagaactatccgatgaaagcgggcagtctggttcgcaatactcccgcgatgatgatgtacatacaggttctccatctaagggattatcagtgactgaaacccattcctttgaggaacctcatgttggagatgatgatctaatggatgagaaagatgacaaacctgaaagtggtgatgttgaagaaagacacctagcaacagctgctaaatctgaagtaggcagagagaaaagcccatgtggctttgatcttaatcaagatatatgtcctgatgaaacagatgtcattatgtcctccacatctacaacccctgctcctatgtctgtttcattttctgtctcatcttctgcaatgcctgcagcagcaccgtggcatttggaaagatctcttagcgggaaaggatcagctgctacgagtgtatttcactcagctttacctcataaagttcctagtggggatttaagagaaaagcaggtgatttctcgtggtatcgatctgaacgtggctgaggtaggagatgatcaagttgaagatcttactccttggaaacagtttcctttctcctcatcaaactctaggggtggagagtcttcacatgaagccagtctgcgaggatcaagcaagttcaacttggatttgaattgtatgaacgac

SEQ ID NO: 166482 - DNA, 748 bp, Arabidopsis thaliana landsberg
atggcgacctcaagcatgaagagcattccaatggcgatcccaagtttctccatgtgtcacaagcccgagctccttaaggaaggcaaaagcgaaggccaagaagaagaagggctaagctacgagttccaagagatgttggactctcttcctaaggagagaggacggagaaatcgttacctttacttattccaagggtttcggtgccaagctaaggagattcaagctatcatgtctttccaaaaacattttcagtcccttccagacgacgttgtcctcgccaccatacctaaatctggcacaacctggttaaaagctttaactttcaccatccttacccgtcatcggtttgatccggtttcctcatcaagttccgaccaccctcttctcacatccaaccctcacgacctcgtacctttcttcgagtacaagctttacgccaacggaaatgttcccgatctctcgggtctagccagtccaagaacattcgcaacccacgtaccgttcggtgcccttaaggattcggtcgagaatcccagtgtgaaggttgtgtacctgtgccggaacccgtttgacacattcatctccatgtggcattacatcaacaacatcacttccgagtcagtgagcgcagtcttgctagacgaagcttttgatctatattgccggggattactgatcggatttggcccgttttgggaacacatgttgggatactggagagagagcttgaagaggccagagaaagtct

SEQ ID NO: 166483 - DNA, 1599 bp, Arabidopsis thaliana landsberg
ctcgagaacatgctcgaccaacgactcgacctcgactgccagcttcttttgagagctgatcattccaacttcggatgactggtctgaacttaaggcaccgaaggttgatctcaaaccacttcctaatggtctaaggtacgcattccttggtccaaactctacttaccctatgatcattaatgctgagtgaaatgatgatgaagtgaaactgctattacctgaacttaaaaagtataggagagcaattggttattcattatctgacattaagggaatttcacctagtttatgcaatcataggatccaccttgaaaacgaatcctactctagcgttgaaccacaaaagagtttaaatcccaacttgaaagaagtagtggaaaaagaaattttgaaactgcttgatgctggtgtcatctaccctatatctgatagtacttgggtttctccagttcattgcgtccctaaaaagggcggtatgactgttgttaaaaatgaaaaggatgaattgatccctactagcactataagtggtaatagaatgtgtatcgattatagcaagttaaatgctgcattgaggaagatcattttcctttaccattcattgatcaaatgcttgaacgcttagctaatcacccatactattgctttcttgatggatatagtggtttctttcaaataccaattcaccctaatgatcaggagaatgtcatttggtttatgcaatgctcctacaatatttcagaggtgcgtgacctcatgtcatgaaaatagacaagacgcttcatgtcatatattacgccagccgaacgttggatgaacctcaaggaagatatacaacaactgagaaggagcttctagctgttgtattcgcatttgagaagttcagaagctatttggttggatcaaaggtcactctctatacagaccatgctgctttgaggcatctgtgtgccaagaatgtatactataccaagactgttgagatggatacgtctggggcaagagtttgacatggaaatagtagacaagaagggcactgaaaatggttcggctgaccatctgtcaaggatgagaattgaagaacccattccgatagaagactcaatgccagaagaacaactcatggttgtagaattcttcggtgagagttacagcgggaaagagttccaccaactgaatgctgttgagggaagatctccatggtatgctaatcacgtcaattatttggcatgcggagtacatccccccaacttgaccagttatgaaaggaagaagtttttcagggacatacaccattactactaggatgagctttacctttacactctttgtaaagataagatctacaggagatgcgtcccaaaagatgaagtagaaggtattttgctgcattgccatggctccgcatatggtggccactttgcaacattcaagacagtgtcaaagattctgcaagcaggcttctggtggccaccaatgtttaaggatgttgaggagtttgtttcaaaatgtgattcatgccatagaaagggcaacatcagcagaaaaaatgagatgcctcagaacccaatcttggaagttgagatctttgatgtatga

SEQ ID NO: 166484 - DNA, 2657 bp, Arabidopsis thaliana landsberg
atgaagtcaggcacgcccatgctggcgcaccggacactctacagtacatgtccggtgcccaccggacatccaggcgggcccagaagtcagagctccaacggtcagaacccaacggctttggtgacgtggctggcgcaccggacatgtccggtgtgcaccggactgtccggtgcaccatgcgacagacagccccaccaaacggctagttctggtggttggggctataaatacccccaactacccaccattcattgaaatccaagttttcacacttccaaccacttacaagagctaggcattcaattctagacacactcaagagatcaaatcctctccaaattccacacaacgccctagtgattagagagagagatttgcttgtgttctttcgagctcttgcgcttggattgctttcttccttcttgattctttcattgcgatcaaactcacttgtaattgaggcaagagacaccaatcttgtggtggtccttgtgggaacctttgtgttccaagtgattgagaagagaaagctcactcggtccgagggaccgtttgagagagggtaagggttgaaagagacccggcctttgtggcctcctcaacggggagtaggtttgcgagaaccgaacctcggtaaaacaaatccgcgtgtctcacttcattgttcgcttgcgatttgttttgcacctctctctcggactctattatatttctaacgctaacccggcttgtagttgtgattatttttaagaatttcagtttcaccctattcacccccctctaggcgactttcaattggtatcaaagcccggtgcttcattagagcctaaccgctcgaagtgatgtcgggagatcacgccaagaaggagatggagaccggcgaaaagccactacaagccacgggagcacttcatcggaagagtcccgcaccaacaggagggagaagaaaaagagctcctccaacaaagggaaggagaagaaatcttcttctcaccacaaagagaagaaggaaaaatcttcttcccacaagccgcatcggagtggggacaagcaaaagaggatgaggaaagtggtctactacgagaccgacacttcatcaacatcgacctccggctccgatgcgccctccgtaacttctaaacgccaagagcataagaagtttagtaagatcccctacactatcctcacatttctaaacatgcacctttactttccgtcccattaggcaaaccaccaacttttgatggtgaagattatgctaggtggagtgatttaatgcgatttcatctacctcactccacaaaagtatatgggatgttgttgagttttgtcacaggtaccatccgtaggggataaagactatgatgaggatgaggtggcccaaatcgagcacttcaactctcaagcaacaacaatactcttcgcctctttaagtagagaggagtataacaaagttcaagggttgaagagcgccaaggaggtttgggatgtgctcaaaaccgcgcacgagggagatgagctcacaaagatcaccaagcgggaaacgatcgagggggagctcggtcggttccggttcgcaaaggggaggagccacaacacatgtacaaccggctcaagaccttggtgatccaagtgcgcaacctcgggagcaaaaagtgggatgaccacgaggtggttaaggttattctaagatctcttattttccttaaccccactcaagttcaattaattcgtggtaatcctagatatactaaaatgacccccgaggaagttatcgagaattttgtaagttttgagtgcatgatcgaaggctcgaggaagatcaacgagcttgatgattcctccacatccgaagctcaacccgtcgcattcaaggcaacggaggaaaagaaggaggagtctacaccaagtcgacaaccaatagacgcctccaagcttgacaatgaggaaatggcgctcgtcatcaagagtttccgccaaatcctcaagcaaaggagagggaaagactacaagtcccgctccaagaagatttgctacaagtgtggtaagcctggtcactttatagctaaatgtccattatcaagtgatagtgacaggggcgacgacaagaagggcaagaggagagaaaagaagaggtaccacaagaagaagggcggcgatgcccatgtttgccgggagtgggactccgacaaaagctccaccgactcctcctccgacgaggacgccgcaaacatcgctgtcaccaaagggcttctcttccccaacgtcggccacaagtgcctcttggcaaaggatagcaagaagaagaagaaggtaaatctagatcctccactaagtatgcaacatctagtgatgaggctagctctagtgatgatgaggatgatttattcacactttttgccaatctaaacatgcaacaaaaggataaattaaatgaattaattagtgctattcatgagaaggatgaactcttggatagccaagaggacttccttattaaagaaaacaaaaagcatgttaaggttaaaaatgcttatgctctagaggtagaaaaatgtgaaaaattatctagtgagctaagcacttgccatgatgttatttccaaccttagaaatgaaaatgccaaattaattgctaaggttgagaaatcaaatgtt

SEQ ID NO: 166485 - DNA, 1576 bp, Arabidopsis thaliana landsberg
ttgtatgtttcaaaaccaaaaactcatattaacttttgtttcagcatcaaaactttgagagggaaggggaagactgctctgttgatcagaaagaagcttactttgaagaaaaatcaaatgagtactcatcctaccatatctcaagagatgatgcagagtatgattcaagcactgaaaattcaaccacagaagatgaggacttctatgttcctctcgtcaaccttttttctaactaagcactgtaggagtcaagcttcgtaacccgccttcattgaaacgctgttgtccctttgtcttctttccccccccccccataattgcttttgtccccccattgcaattcccgaactcaacaacctcatctctccgcctcccataccaaagcaatctcgaatgtcgaatccttacaattctctctttatctccttcacttccctttcttatcaaaaacttttcacaaattcatttgtttcctccatcattcaatctcctaacctactaaattttggttttgagtttctcccacttttgttcttgatgacaaactggcgctcgcttttgtcaaggatccggaacaaagctctctccccatcgaagaggtacccaacaccttcttcgcatgcagcagctcgaggactttctgaatcgtcacccttcaggtcgagcaggagagaacaagcaagtttcgagatcgatcacagtgaatcgagccaagaggaggaagcgatgcaagaagaagagactttcagctctcccgctggaaatactcgatcccgaaggtcgagtaagcactctacaagggaattctcgaggaacaaatcagacatcactcgaggaaagaagcccgtggggaggaggttggaactggtagatgaagactccgaggaagaaatggcttcaccagaggaagatgatcaaacagagaaaggaggcaatgatgatttggaatcagagaagtgtgcaactcgaaacgagtactacaaactactgaagcgcaatgagtttttaggaactcgataccctcatcccgagaccatggagagactcggcatctatgatgatgtaaactatatatttaagcagtgcagcctgaatattcatatgtttcggccaatggaggggtatgaggaagagaccatccagtttctttcatccgtggaattgttcttatatggagagtcaaaggacgatgaaatcaggccagacggaagtttgggatactttaagttctttgtgtatgacgtagagtatcggcttccaatcgagtatcttgagctgatgtatggatttctaagcggaaaagacacaagtcatcgttttgacaagagagagcttcagtcattctaggccacgcttgagtctaaacatggattttcatcctctaggaccaagagcaacgagataaggagtccggtggtcagatacttttataggtctttagccagtgcactatttgcaagagagaggaatgggacctttgtcaatggagagctagaattaacggagacagcgctgcaggagctacttggtttagcatcagtaggtccgttcttgcagcagatcacacagatgcttc

SEQ ID NO: 166486 - DNA, 743 bp, Arabidopsis thaliana landsberg
cacgtcggtatctgcagagaagacggtgtcatcctcgactttgcaggacctaattttgtctgtgttgataattttgcatttggagctgtttctcgatatattcaaatcaacaaagaaatggtaacgtttgcaagatgccggctttcattttcaaccttgatacaaagtaacaatttattcatattggccttggatttgaatcaggagtcatctcgttcttccagttctggtatgttcaatggtgagaggagatatgagcaagaagaagatagtcatgagaaagagccaacatgggatgatgcactgagaaaaagcacgcaagagtaccaacatcactcatataacatactcacatgcaactgtcattcctttgtagccaacaacctgaaccgtctatctataaagtcaagcggatggaacgtggtgaatctcgcgacactagtgcttttcaagggacgttgggtgaacaaaacggctatagtaaagtccttgttgcctccactcatagtctacactataggaatcttactcggtggttggactttcattgcctcctgctcgattctagtggttttgcttaccgggtggttcatcattggaacgtattgtttcaagaaactgattcagctgtagatttgaatcataatgtacaaatgatgtctacaaaatgttttttactttttacgatggatatttacaactttgctttgtgtgtggttaatttgttacaagtaaaactttga

SEQ ID NO: 166487 - DNA, 500 bp, Arabidopsis thaliana landsberg
atggcagccccttccccccgcatgcgcagctgccggtggagcagagtttactttgatgtctggctgaagctatggcacgagaccatcgatgaacattttgctggagcaaaagcaggtgaggcaaagtggcggggcgataagatggcggccatgttcctttccaagatcgggtattatcgtgatcattcagcaacaccattattatgagcactaccgtacaacaacctgtagctgtagcctgcctgtttacctggatcggctttgtctgcgcgatcagcttcctggaggcatggcttaaattccgcgcacccggtgtcaccctacctgttggcttagggatcggcaggctggtattcgctgcactcaataaagcagaatgggtgctggctattgcaacagggatcagcgcagtgctgcacgggagaccactattcaccttacccaatattttgctattgttcatcgctgctattcttatcgcgcaaacagcgtggctgttg

SEQ ID NO: 166488 - DNA, 1376 bp, Arabidopsis thaliana landsberg
ttgagcaagaaactgttatcgtcaagtgttagtaatatgtctggaaagaagaaggagcttttctcctcagccatgaagagaactggcgaatggtttgttcctcactttgttccaactttttctcattttatttcttattttttacaaaataaatttcaggatttcttctcaagaaattcctagtgacgtcactgttcatgttggagaaatttcgtttacactccacaaggtgatttctattttcaagatctactaaattatacacaaggagatcactttctcatatacatagtctctgtgataatctgcagtttccacttgtttcaaaatgtgggtttataaagaaacttgcttctgaatcaagcaatgattccaacattatcagaatcccagattttcctggaggtgcagaaggatttgagctagcaatcaaattctgctacgacataagcttcgagataaacacagagaacattgcgatgctactatgtgcagcagagtatctagagatgacagaggaacactctgttgaaaacctagtggagacaatagaggtttacttaaacgaagtgatcctcaggagtttatcaaaatcagttaaagttatgcgaaaatctcaggatttgttgcctatatccgagagagtaagactcgtggacaggtgtatcgactcaattgcttatggaatttgtcaggtgagccagagcaatgaggatatagttgactggtgggctgaggatttagctgttcttaggattgatatgtttcgacgtgtctttgtcgcgatggttgctagagggtttaagagatactcacttggtccagtacttaaactctatgccgaaaaagctcttagagggttggtgagattcttgaattttttaacagaacaatgtgtttgcttactttaaagaataatgtaatgtcggtttctctgtgggaaatgcaggacatttttgggaaagaggcaaagaagatggaggcagaacaagaacatgagaaaaggttgattcttgaaacaattgtgagtcttcttccgagggagagaaactcagtgtcagttagttttctttcgatacttttaagagctgcgatatacctcaaaaccacggtagcttgtaggcttgatttggagaagagaatgggattgcaattaagacaagctgttattgatgatctcttgattccttcttattcattcgatggagacgatacaatgtttgatcttgacactgttcaacgtatcctcatgaactatcttgagtctgaagttgaagaaaactctgctgattttgcaagtgatattggtgaattgatggagagttatctggcggaaatcgcttctgatagaaacataaacttcgcgaagttcgtgg

SEQ ID NO: 166489 - DNA, 4474 bp, Arabidopsis thaliana landsberg
  unsure (1)..(4474): unsure at all n locations
atttgaaaccgtatgcgggagaagatgaggagttgccgtcgaggacgacttcagttcaagaaggggaggatgatgcggacatcaacaccaacatgagcacatctacaccagcagcaccttctccagcccaggcgccaccccttccacctgggccagtgactcgggcccgtgcaagagaattgaactacatcatgttgttaaagaacgaaggcccggaagaatagacgaccagcccaattgcggcccataatggacgacctagggttggccgcccctaggggctgcgcccgtctctatttattcaggagctgcgcctcctttatttcctgagttttgttttacgttagccttagctactctcgaacacgcgcaaatctgcgctgtcttcgtgtattcagaactccaccctcgagtaatagattagattgctcgcatcttgttcttgttcgttcttcgattgcgcacaggaaacgatcttcgtgatcaggccgatctcgcatcagcaaggtcggtaaccacagggagttggttcagcgattgcattggcgcctcgggcttgctcgtcgtagtcggatcgcaagggtcatcttccgccaaatcggaattatctctactcgccgaaagatcgggcccctcagctacatcataaaccctcagcaacaagatcctccaggtcatccgccgtgactgtggagaaaggccatggatcacgcggcgagacgatggtcacccggtcggccatcaccgagcaaaaggggtggcggcggaaaggactgggtgggcggtttccttttctccggctaaacctctcaggttgcgaaaacctaagaaggaggcgagaagtggagcaaagaaccgtcgccagaccctcccccgagtatataaagaccgaggcgagacccgttcaacgtttcgcccggacccgccgcgggattcaaaaacccaaggcgaaacggccgttcctcgaacgactccggcacgcgcaacggccgccccgcgaaaccgctcgccccgtcgcattaactccgcggcgggatagccggccctctggcaagagaagcgagcgatgcttcaccttcgccataatgaccgcatcaaaaaaggtacgccacgtcattcgatttcgtatccttttccttttntcctctttctctatctcttgcaacagggaccgggaaagggggataccccgaaaaggatccttcccagtgaaggaaccaggctccgagcccccctactgatcagaggttcgaaggctggccctccgaggggttcaacagccgcctcagatcgcgtgggccctacacccactactggtcagaggttcgaaggccggccccccgaagggctccacgaccgcctcaggctactcgggctccgcgcccattactgatcaggggttcgaaggctggcccccgaagggttcacagtcgcctcagacaccgagcgagggatgaccaggggtacgttcgatacataaccaaggctcggctgcgctcccgaggtaccctaggacatttccgagaccagcgggagcgatcttgtaacagaatcccatcggagggaggcatcgagccctcggaccccgtcgccaggggaccgggtccggcaaatcacccgcaggtacttttgggcgtgcctccgggcccctagccgacccccaacgaacggggcacggacgtccactcggattacccgtcagcagctcactggagacaccatgttcaaccgcctccaagggcaacatggcgctttttcccccgtcctcttgcggaaagttgacgcaggggcgtatgtaaaaaagtcgagtctgtccttgaccgtcctctcgctctgtgcaggggctcgggggctgtctcgcaaacccggctccggccaaaccgttgacagcgtcaacataccagcccgagaacttgggacccgaccgtgcacccgggctacggccagctcgcatgaggaacaaccagaccagccgaagcattgcgcgaggcattaagaccttgaaggagtcaaaccactgctccgaggcctcaggggctacacccaggctgtcgctcgtgcgcacccaccgaaacaaaacgcaaccgagaaaggctggtccccttgcaaaaaagtgcgacaaaagcctccaagcgagtgctaacactcccttcgaggctcgggggctactgtcggtgaccataattagggtaccctcaagactcctaaatctcagctggtgacccccatcagcacaaagctgcaaaggcctgatgggtgcgattaagttagggatcggtccattcgagggacgcgatcacgcctcgcccgagcctagcctcggacaagggcagccgaccccggaggatctctgcctcgcccgaggccctcctccagcggcgaacatatttccggctcgccgaggccctatcttcgccaagaagcaaccctgaccgaatcgccgcgccgaccgaccaaatcgcaggagcatttaatgcaaagggtggcctgacacctttatccttacgncgccttcagtcgacagagccgaagtgactgcagtcacttcgccgctccactgaccggcctgacagaaggacagcgccgcctgcgccgtaccgactgcagtgccacttgacagagtgaggctgacaggcagtcaggcccggcctcaggcaccataggaagctccgctccgcccgaccaggctcggactcgggctaagcccgaaagacggcgaactccgctccgcccgacccagggctcggactcgggctaagccccggaagacggcgaactccgctccgcccgacccagggctcggactcgggctaagcacggaagacgacgaactccgctccgcccgacccagggctcggactcgggctaagtcccgcgaagacggcgaactccgctccgccagacccagggctcggactcgggctaagtcccggaagacggcgaactccgctccgcccgacccagggctcggactcgagctaagtcccagaagacgacgaacgtccgttcgcccgaccacagggctcggactcagccctggcctcagccgacgacctccgcctcgcccgacccaggggctcggactcggcctcggccacggaagacagactcgacctcggcttcggaggagcctccgcatcgcccaacctagggcgcaggccagccacgtcaacaggaggcgccatcatcaccctgccccgagccgactcgggccgcagagaacaagaccggttcccatctggctagtccgccagataggcaatgatggcgccccgctagccctgtgacgacggcggctctcagctcccttacggaagcagagggacgtcaacaaggactcaaccgctccgacagctgtccctccgccaggctccgttgctcctccgacagccacgacatcacgccagctgggtgccaagatctctccggctgccacattggcatgtactcaagggcgctagctctccctccgctagacacgtagcactctgctacacccccattgtacacctggatcctctccttacgactataaaaggaaggaccagggccttcttagagaaggttggccgcgcggggacgaggacgggacaggcgctctcttggggccgctcgcttccctcacccgcgtggacgcttgtaacccccctactgcaagcgcacccgacctgggcgcgggacgaacacgaaggccgcgggacttccacctctctcacgctcgactccggccacctcgcctctcccccctttgcgctcgcccacgcgctcgacccatctgggctggggcacgcagcacactcactcgtcggcttagggacccccctgtctcgaaacgccgacaaaaatgatcatatagcaaaattagatgctaaaattgccgagcataacttagagaatgaaaattttaaatttgctcatagtatgctttataatgggagacgccctggcatcaaggatggcattggcttccaaaggggagacaatgtcaaacttaatgcccctcctaaaagattgtctaattttgtcaagggcaaggctcccatgcctcaagataacgagggttacattttgtacctgccggttatcccgagagcaaaattaggaggattcactctaggaagtctcactctggccctaatcatgcttttatgtataagggtgagacatctagctctaggcaaccaactcgtgctaagttgcctaagaagaaaattcctaatgcatcaaatgaacatagcatttcatttaagacttttgatgcatcctatgttttaactaacaaatccggcaaggtagttgccaaatatgttgggggcaagcacaaggggtcaaagacttgtgtttgggtacccaaagttcttgtgtctaatgccaaaggacccaaaaccatttgggtacctaaagtcaagaactaaacttgttttgtaggtttatgcatccgggggctcaagttggatactcgacagcgggtgca

SEQ ID NO: 166490 - DNA, 530 bp, Arabidopsis thaliana landsberg
  unsure (1)..(530): unsure at all n locations
caaaagaagatcaacgtctgcttggcttgatcaagcacgcttggctagaaagcggaggtgtatacggctaccgcaaaattcacgatgacctacgtgagctgggagaggaatgcggacgaaatcgagtcgggcgcttgatgcaggcggaggggctgcgttcgcaaacgggctatcggcggcgtccagggttttacggtggaaaaccaacagtggcctcgcccaaccacctcgcgcggcagttcaaggtcagtgagccgaacaaggtctgggtgacagatatcacttacatccgcacctatgaaggatggctctatctagcggtagtgctggatctgttctcacgccaagtaattggttggtcaatgaagccaaggatgtgcagcgacctggctatcgacgcaatgttgatggctgtgtggcgacgcaagccacagcagcaagtgatgattcactcagatcaaggtagnnnnnnnnnnnnnnnnnnnnnnnnnnnnnnnnnnnnnnnnnacaatgtaatcagcagcatgagt

SEQ ID NO: 166491 - DNA, 426 bp, Arabidopsis thaliana landsberg
tatctatccacacaaaagtagagattggagaaaagatgctctacaggcgatacctcatgcatatgaatggtcagagcaaggaaacaacccctatacacacgctagagcgaggtcaactactacagatcatggatggaaggctccaaaacatggctaccataaatgtaactatgattgtagctacaatcatcaaagcactgaggttcgagctggatggatcatgagagacagtggtggattttacaaggaagccacacaaagtaaaggtcactgagtcgcaaatactttagaagcagaactgcaggcattacttatggcaatgcaacacgcatggagccgaggatataagcatgtcgttttttaaggtgacaaccaacaagttatgaacctcatcaatggcaggtccagaaacttccaagttcacaa

SEQ ID NO: 166492 - DNA, 3453 bp, Arabidopsis thaliana landsberg
atggcggacaaagttcgggcatatctggggaaaggcgaggccgagacagtagagcatctcgaggatacacaccggaaacgggaaaaaaaggccacatttctcaaagaaattggcataagcgcacactcacccgaccggcacgttctcacgatgcagtggcggccttgggagtatcatagttacccctaccggaacctggcatctcctccggaggtcgaccaggtcgctgtttgtcatcggcgtgcctcctttttgcttggcagcctttttcttcttcggtttgtcggctctgatagacggcggacgaattggacccattctgtctagggttatgacgcgcctttgtacttgcggcagtgaccccgtcgacctggtctgggacgaactctcatcgtcgccgtacctgtggttgcttttgttctgggaatcctcgaaggcgctcatcttttggtttggatagagaaagacgagagagatgaaagaaaagagcaaagagggcagatcgagaaacacgagagtagcagacaaacgatggagatagcagaaaaagatgaaatttttgtatctctaaagacaaaacgcagtagataataaaggtggacagaatttaccttaagagtcgcttgagttgacgtgacgtcaagtgaagaggtgggaagttatttaaagccatcatcaccatgattttcgagattgtagagatctcttctccgcgtccgatctggactgtcagatgcggtgcgctgaagagacgctccatctcagccgtccacatcagcagcgactcatctcgcgtatctcctcaaaatcttttggttggagggaatctgaaattaaaacgaaattgttgagtttatcttcaaaaccgactgatctaatcacatttatcctctcgtcaagaatattttcgcaatcttacctgacctatatgtccgctcatcgagttcgcctactcactcaatgggctggggggcaaatgttggagctggattcccctccaggaatccacctgtgaaaataccaagccagcccacaaaagcccaccaagcccactaagtagaggacctacgcagctgacgagcccacatacgcgaatgggtatttgggccagaaaagcatagtcacctgatgcagggagataagcgaataatgacctaggaactgacgaggagatattcgcggagcggatctgatatctcggaactgacctgccgaatatccaggaggatctccgcatatcctggacggagctaccacgtgtgtagacctatataagggagctaggacgacttggaaaacacaatcaatctagttcacattcgcacacacactttttcacttgtaatctcttttcacattgtaaaagttttgtcataatcaatacaaaaagtccagtcgttcttagcaatataactctcaaggtttcagtgaagatctagccctcctttctcatcatctcaattacaaatctctagtgtggatttcagaacccacatttggcgccgtttgtggggacggaaatagatcataccaacaccgaaacaaacacatcaattgtgaccaacgatcatggatcccaattcatccaattcaacgggatctggcttaccagttcagatcccaaacaataacgttacagacgggcacctcccaacggatctccctcctggaaccaaggttgatgttgtccataacgctgatgcggagaacatttcccaaaactcgaattcttctggatctgaccaaatcactccgcctccgcacacaaggggcggagaacaaaacgtcacgatacagcctctgaacggagataacccagccaacccgtctaaccagccgatcctactccgaggactcgtctagacttcgcctcgatagacgtctcacctcctatcaaccggcaggatgcctttttacaggcacctacgaacactctcgtcaaaaactcggcaacaggaaacgagataagcacaacgcctgccttcccaaggctatcggtcccacctttactaccgatgggctattcgcccctaggtacacgtggacgagaaaccaaacaaccgcatctagttctcgcgttcccgggaactcaacgcaacaacggacctctatcgcttatccgccatccattccccggataccaggaagtgacctccttaacagtccaaccgatcccaaagcaccggtcgatacgcgtaacgtcgtggatatggatacattccgcaatcacgcagctcaaacaaatgcaaacatggctcaaatgcattcacgaatgcatctagcagtgagcgatcctcccgtcatagatcgagtgatcgaagaaaccaggcgtaccccattcacggataggattacccattatcgcatcagagacgtcgagagattccgtttcccaggatacgacggaacgagcgacccaaaggctcatctgagagccttccgtctggctataacctgagcgtacctgaaggacgaagaaaacgaagcaggtcattgctgtttcttcgcagagaacctcgtaggtcacaccctcgaatggtttgctagtctattgataccttcgaccagcttgccgccgctttcttaaaatagtactcggtactcatcgtaaacaggacgtctgaagccgacctctggggtctcacccaacttcagaacgaatccctgcgatcttacgtcgaaaaattcaaagcaatcaaatcaaagattgcgaacctaaacgaggaggtagccatagccgcccttcgcaacggcttgtggatttcctctagattccgtgaggacctcactgttaggcaaccggtatctttagacgatgcgctttacaaagctctccacttcgcaaaagccgaagaggaactcgttgtgctggccttaagattcaaagaatctaaaacacaaaacgctccccttgcaaccaaaaaacccttcaaaaaggaaaaccaaacgcaagggcagcataccctattcgcaatagaagaggcagccgaggacgagagtccagaacttgacctcgaaaaatattgcaagtaccacaaaaaaagaggacattccacagaggaatgttgcgcccttaaaaaattaatcgcagttgggggcaaaactaaaaaaggttcaaaccccaaagttgaaacccctcctcccgacgaacaggaggaggagcaaaccctcaaacaaaagaaacgggaccgaacaccggagggaggtgactctcctccacctactaggagagaacgcatagacctagtctttgtagaactcgatctgcgaactatgaaagccgtcccatcaacctaccaccaatgcattaaattccccttggacaaggggataacagtcgtatacagcagccaacgcagatcccgaaaatgctatatgggcagctacgagcatatcaaaaaagccgaccccgtagtactaatgatagaagacaaacacgcgaaaatgaaaaca

SEQ ID NO: 166493 - DNA, 2491 bp, Arabidopsis thaliana landsberg
ttccggggtgccttagcacggttaatattgaaattgttgaagaggatgtacactccatgcgatgtagggagggacacaaaggatgcatggtgttgaagattgatctggagaaagcatatgatcgagttaggtgggacttcttggaagacaccttggagattgtaggtctttctaatacatgggtctgatggattatgcaatgtgtagagggaccatccatgaacttgttttggaatggggaacagaaagagctgtttaaagcgaggcaagggttgcggcaaggagacttgttatccttgtatctgtttgttttatgtatggagcgcctgtgccacttgattgatggagcaatagtaggaaaaaggtggaagcctatatgtttatcacagtcggggccaaaactgtcacatatatgcttcgcatatgatttgattctcttcgctgaagcttcagtagctcaagtccgagtgattcagagtgttttggaaaagtgttgtattgcgtcgggacagaaagtgagtcttgaaaaatctaaaatctacttctcggataatgtttcgcgagagcttggacaacaaatcattaatgagagcggtataaagtcaaccaaagaattgggaaaatatatgggtatgcccattttgcaaaagaggattaataaggcaacctttggtgacatccttgagagagtttcaactcggttggcagggtggagaggcagaactttgagcctggcgggaagagtgacgctcataaaatcagtgatatcatctattctggtgcgcactatataagtgattaagcggccacaatcgactttggagagtttggacagattagccaggaatttcctttggcaaagtatagcggacaaaaagaagcaacatttggtggcctagaaaagagtttgtttaccgaaatgggatggtgatctaggcattcagtttgcgaaagaaatgaatatagcgcttattgctaagatagggtggcgagtgcttcatgatatctcaagtctcttggtgcaagttgtgagaaagaagtataaggtggaattaattcaggatcagtcttggatggtggcaaagagtaattggtcctcaacatggcggagtgtgggaattgggatccgggaagtagtgtgtccgggctatagctgggtcattggtgacgggcgacaaatcagattttggagggataagtggttgtcatcaacaccgttactggatgaagtgataggggatctacaagagggatatgaatcacagatggctcatgatctgtggaatgatggtgctgggtgggatattcagcgcatctctccgtatgttacaaaagtgaagcggctggagttagcgtccatagtgctggatagggtcactggggcaaaggatagagtttcttggaccggtaatgctgagggccggttttcagttaagtcagcctatgctttgctaacacaagatgactcgccgagacaggatatacgaactttcttcatgagagtgtggagagtggttgtgcctgaaagagtaagggtatttctctggttggatgcaaatcaggtgatcatgaccaatgaggagaggaggagaagacacctttgtgacttagatatttgttaggtttgtaagggaggtacataatctgttttgcatgtgctttgtgactgcccagcaatggcaagaatttgggctcgcattgtgccaataaggtgaagacatgctttttcacgtagtccttgtatgaatggctctatgagaatttatgtgaaggagtcagaactaaggatggagtctgggcaacgatttttgcagtggctgtttggtggggatgaaaatagcgctgcgcgaatgtgtttggtgagcaacggaaatgtcgagatagggtccgttttttaaaggagctggctgtggaggttagtgtggcgaatgagacgaaatcagatggaggtatcagggagaatcgagtcgaccagtagatcggatggcgggtacctagtgctggttggtataagctcaatatggatggtgcctctagagggaatccgggtttagctgctgccggtggcgcgttgcgggatagtaatggggagtgatgtggcgggtttggggttaatattgggcgatgttctttaccgttggctgagttgtggggtgtctactatgggatgtacacagaatgggagaaacgggtcacacgactaaagttggaagtggattcagagatggtggtagggtttataaggacggggataggagaggctcatccgttgtcattcctggtgtggttgtgctatggctttttggttaaggactggacagtccgaatttgtcatgtgtatagggaagctaactgtcttgccgatgtgttagctaactatgtgttttcacttctgttaggagttcatattttttcttctgttctgctttgtgttaagacgattatgagggatgatgtcgacggaactacgcttccgcgacaagtccgtgtt

SEQ ID NO: 166494 - DNA, 507 bp, Arabidopsis thaliana landsberg
  unsure (1)..(507): unsure at all n locations
ctgtcaacgattgtttacgcaatgtgttggagtgtggagtcttggatcttgaactggacatcaatgtcagaggagattactcactgccttctgagatcttcacttgcaagagcgttgtgaaaatgaaactagggtctggttttgttattgacattctccctaagaatgcttggcttcctgctcttaagactctccttcttgatacagttcggttcgaattcgataacactgctggttgttcgtttacaaagcttattttttgttgccctgtgctcgaggagttagtcatagatggccacnnnnnnnnnnnnnnnnnnnnnnnnnnnnnnnnnnnnnntcagatccttaagcgacttactatttctgtgtaagaatgggttcatgatggctctagttttgagcctatcagtttggatattcctagtcttgaatactttaaatactttgatactcttcgagatagctatccagttgttagctcaactcctttgtgtagcttagctagaa

SEQ ID NO: 166495 - DNA, 195 bp, Arabidopsis thaliana landsberg
  unsure (1)..(195): unsure at all n locations
atgactatgttgtgcgggtacgccgctttggagaactacggatactatcatcccagtcgcgcgaggagccatgttatattcaggttnnnnnnnnnnnnnnnnnnnnnnnnnnnnnnnnnnnnnnnnnnnnnntctccatgaaggggggattcagacagcggtcaatcatccgtgatgcatatcacaacatcaaag

SEQ ID NO: 166496 - DNA, 263 bp, Arabidopsis thaliana landsberg
aagagtcgcgacggctgctggagaagaagagacgcgacggagaagaagaaaaagttagatcggtcggtgaaagttggattggaaagaagaagttatatcggagaagaagccgtttccttggagaagaaacagatcgactcgcggctgaagctggagaagaagagttacggcggctgctggagaatatgagacccggcggagaagaagaagagaggcggtgacgtaatcagatcgaaaaagaagagaggcggcgacgaagaaaa

SEQ ID NO: 166497 - DNA, 1435 bp, Arabidopsis thaliana landsberg
tatgttctacaattgttcacgttgtatgttcgaggtgtgtatggcttgtctgaagaggccattacttatctacaagacaacatcccacaagcacccgctttcccttatgcccatcgattctgtctctttcacttgtgatgcttgcggctctgtagataattcctcatatccttgcacatgtcttcaatgttgcttcatcattcatagagattgcattgatttacctcgtgttataagtattaatcgtcatgatcaccgtatttatcatgtcgatattcttagaccggaggagtggatatgcggagtttgccataaaattatcaataaccaatatggagcgtattcttgctcggtttgtcattatgcagtccattccaagtgcgcaataagggatgatgtatgggatgggaaagaacttgatggaatacccgaagaagagggagataacaaaaccgaggatatagcgccatttgaggtgattgatgacaaagttataaaacactttagtcatgaacatatattaagatttatttatcaagatgttcttattcgcgacgaaaaccaaagatgctacgcatgcgttcttccattctactacgatgcatgctatatatgcacgcattgtgatttcattcttcatgaaacatgcgctaatcttcctcggacaaaaaggcatgagttacacaagaatcactttactctatacccgaatcccaaacctggagaagatcttgagctttccaaaagctttttcacatgtgttgcttgtcaaagaccaagcaacgggtttaggtacgagagcggaaatgtaatgttggatgttcgttgtgcttcaatctcagacgagtttaaccatgatagtcatttgcattccttattcatcctctcactttttcctcgggagtgctcggcgtgtgaccaaatggtgtacggctcactgagttgtgttaaacttgatttctttttgtgcttcaaatgtgctactttaccaaaagaggtcttcaacaagaacgacaaacatcctctctatctacgatacagtggatatcgctacggtaattattggtgtgagatatgcgaaaaaccaaccgatccaaggaagtggttttactcatgtgacaaatgttgttcgactcttcatatcgactgcgtactcggtaaatcaccttacatgaggccagggcacagttttcttttatctagtcgtgagttccaagtggtttccaataaccatacatctcgaccgttttgtactatatgttcgttgcgatgcaaagatgcttttgttctgaagagcaaggatgagactgatacatcatgcctatgttctcttaaatgtctcgatcttcttgtgatgagtatgcaacgtattaaactgtaatctaaataataatgttgtggcaaagatcacattaattactttcatagttgtgtc

SEQ ID NO: 166498 - DNA, 1163 bp, Arabidopsis thaliana landsberg
aaaagaatcttggtataataagatatgaattatataaaagtccatcacgtagatatgattttacaattttggcgagaaaacatgattttacgattttggcgggaaacatgtttttacggttttggcggaaaatatgattttacggttttgagagaaaaatatgattttgcagttttagcggaaaaacatgattttacggtgttgtcgggaaaatatgattttgcgattttggtggaaaaattgaatacaattttaacgtaaaataatagtccgtgatttcccaatttatagatttttttggtgcaatatgtaatttaaaaaaatattagataaaaatttatagaaaattagtattattgcaaaggttatatttgtcatttattcatttggactaaaccatctccatccaaatggttcgatcaagttcatccaaatgagtttcacaaattagtctaaatttacaaagtcattcagatggaccatccaaatgattcatccaaatgatctgttaaattatcaaaaacaaacatcatttttcatctccatctagatgatccatctagatggataaacaagagcctaactacaatatttagaataatttcgatgaataaatggagtgatcttacttttccaatgaaaatcgtacatgcaacaaataaaatatattaagtttccttttcatatagtttccttttaaaaaataaattatataggacttctcctccacaatgtaacataaagaaataatcataggatatgtaaaaattgtttatcacataataattattatgaaaaaggaagaaacgtagattgtaataatttaatccatattaaatcaaaaggacataatttctaatataagtatatatacaaatactccaataagcatccaaaaatatagagcatgaaagtattgtataacagccacggttgtttatcgtactcgattttttttttatcgtcaacttaactttccattaataaaattacgagacattgtactctataatcctaggagaatattgttgataaaatataatttcagaatcctgtcgatatttataatttaaaaacataagattccttttatcatgtgttaccatgtgttgagattgggttatagagccgcccttctacaaggcagaagaaactgttgccgt

SEQ ID NO: 166499 - DNA, 575 bp, Arabidopsis thaliana landsberg; identical to SEQ ID NO: 61600

SEQ ID NO: 166500 - DNA, 1636 bp, Arabidopsis thaliana landsberg
ttcgtcttctctacaagaagtgctacacatcattcagtactcccgttgttttggtgcaacaataaagaattcgatattgatggtggatgcaatatatgccgtcactcaaattttggcactgactattatttttgtgacatttgcaagaaaaagtatcacaaagaatgcgtcgagtctccacttaaaatcaaacacccttatcaccctcagcattcgctccaactttactttcacttccttctttacagtattaattgtttatgctgtagaagaagagtaaacttcctggtatattattgtaccatatgtaacgttttcatgcatccagtatctgcaatgaagccaataccctttgttatagacccaccaaaaaggcatgtcgaccatcctctcactttttttcctagacaaacttctttaacttgcaacttttgtggtttggtgagaaaactatatcccacctacatatgtgtcagatgcaactttgtgtttcatagtgattgtatgtactctccaagcgtcatcaagatatcacgtcacaaccatcgtatctcctacactttttctctacgatcatgtgaatggtcttgtggagtttgtcatcaaattattgacggtgattatggtgcatatacttgtgataagtgtggtcattatgctgttcattcgagatgttctctagagaaaaatgtgtgggatggaaaagatctcgaaggtttaccagacaaagatgatattacacaagatgttggatcattcaatataatatctaaggaagtgatacttcattttctccatgaccatcatctccggctcgaagtcagtatactttataacgaaaaaaaactttgtcaagcgtgttatttacctattttcgaaggtaatttctattcttgtgtggagtgtgatgatttcatcttccatgaaacatgtgcaaaattttgcaggatattacaacatgcattacatcctcatccactaacattaaaagctgcaagtagatatggtatggatcgttttggatgcagttcttgtaatcgtggttgtcgtggctttgtctataagtgttgcataaggggatgtatcttcactctagatgtaaaatgtgcttcaattgctgagccgttttgtttccaaggtcataaacatccattgttcatatttgtaggccgagacggaaaactcatatgtcgcgtatgcaaaacagaacgtcataatcaattaaattgcatcaaatgtgattttattgtttgtatgaagtgtgctacattaccctatagagcaaggtatgaacatgacaaacactttctcacagctatatgggaagaagaggtccgtgaaaaagattggtgcgaagtatgtgaacgtaatttaagagacacaaacacaaaagtgttctattggtgcgttgagtgctgcaccattttccatattgaatgcgtactaggtaaaaactcgaatttgagtctaagccaaactctcaaattctgggttcagcgggctcaaattcttttagaaaatcttaatctgtaatagactaatagacaatatttccaagcattcagtgagttatatagctctacctctctattcaaatgtaatttgttttcttcatatttgtctccttggtttgtgt

SEQ ID NO: 166501 - DNA, 396 bp, Arabidopsis thaliana landsberg
gtcgagtgtcttcacctccaccacctgaccatcactcgatcacaccactctacctggaagtcgagtatcaccaccaccactcgactacatactcgatggcgagcttcagagtcttctctattccgcactcaaccagacactcgagcacaaggaagaaaagaagactccagctattcactcgacctctcactcgaccacctgggtcgagtacagttcttaatctgtcccaatactggtcgttttgagtattagggtttcagaatattttgctataagtagcatgtactttacattttcgagaacaagtttttatctagttttattccgcagacactgtgttcttgaccttttgtaatccggatttctctttatctattcagtattcagtatttgttc

SEQ ID NO: 166502 - DNA, 1174 bp, Arabidopsis thaliana landsberg
atgatgatagtcgatggaaaccagaagtttctgatcttgagagagtcgcttgagaagtattgtagaactggtagtggtggtggtggtggtggtgctagggtggctgtttccggtgagaatagatcggagcttggtgaaacttccggtgctaagtcgactgattgaggagaggcagaaacattattacctgcagaatattaatgaatgaagcaagttacatgtcaacgaaacttaaaacagaatccaccggaataatccgtttcttaccggaaacaaacggatttgtgaactgaatactctgaagcggaggaagctccggcgactctgcaccacagatcaaaaccatagaaatcacacatctgagattcgaattcaatcgattcaattacataggaggattcgaaattaacctgataccgaacagagagattcaaaagattcttcggaattctgatcggtacagatctgagaaagagaaatcaatctagatctatccaacgggaatccaaggatcatcggctgccggagaagataacagagacagtttccggtgctagaatgaacggaggaggtaaaaaccgagcagcaaataggatccggagtctctgacatattgtttggtggagaggagacgtaaggaaggcaaggagagaacatgacgagctcctccgtacaagtcagaaccggtggagaagacgaaggtgcttgctgcgtcgcggttacggcggaggaggaggagaaggtgatcgtgagtatgaggatgaaaacgccggtgattttggtcgccatttttgttgcttcagagatctctcgtcttcgtgattagagttagttacagagatttcacacttatggctgattcgtagcgataactgagattgtatgacgatggtggcgggaaataaacagttgtggaggtttgataacgaagttactaatttgcccctatatggatattttcgggtgatgctgagttggtagtgactggccactaaggtccgtccacgtgggtgaagattagtttcgtttgggcttttagattgaatatcaaagcctacagtttatgtttttgacattttatagtttagttgactttgaaattttatacttctgttttttaaagaggataaataaaaatctaatggttacggcggttgaggcgaacaaacacttc

SEQ ID NO: 166503 - DNA, 773 bp, Arabidopsis thaliana landsberg
acaatgcatcttccggaggatttggtcctggagatactctctaaggttccggctgtatctctggcacgatctcgatcgacttgcagaagatggaacgctctggtcgtcgatggaagctttgctaagaagcactatgcgtccgctccaaggcagtatcctatagttattatgttgatcgagtttagggtttatttagtgagtatagatctccatggaattaacaataacaacggtgccccatctgcgaagctaacaggtcaattcagcctaaaagaccctctttctaattcttcagaagaagttgatatacgtaacgcctttcactgcgacggcttattgctatgctgtaccaaagacaggagattggttgtttggaatccatgttcaggggaaaccaagtggatccaacccagaaattcctacaaggaatcagacttatatgccctaggttacgataacagatcctcctcctacaaaatcttgaggatgcatcccgttggtaacccatttcacattgagtccgaagtctatgactttgcttctcattcgtggagaagtgttggtgtgactaccgacttccacatacaaacgaatgagagttatggcatgaatgtcaagggaactacttactggtttgctcttagtaaagactggtggtcatctgacgagtcgtcgtttcttactaagttttgatttttcaagagagagatgtcaatgtctgcctcttccggcggatgttaaaaatctacatcttactgtggtttatcggggac

SEQ ID NO: 166504 - DNA, 783 bp, Arabidopsis thaliana landsberg
ttgcaatcacaaggtgtacataatctaaattatgaagagagaattgaattatgaaatttggaaaatgagcaaattgaacagttaataattcaaccgtcattgagttgctacaatcgaacctttgaaagaggaccaattcaaacagatggcgggatgggatggaaaaatacttggcgtcgaatacaagaagataaggctgcttatcttcagttactacgaatgtctctggattgttttagatcattatgtgacataatggaaacaagttatggattaattcctacattgaatgttagcattgaagagagtgttgccatgtttttacggatatgtggacacaatgaagttcaaagagatgttgggttacgattttttgaaggccttagagtgacaaagttacttgcttgtgattgtatcaagacgccaacaacacaagaactacgttgaattcatgaaaaagtacaaatggatcgaagatattggtcatattttagtgatttgctggggctatagatggagttcatgtgtgttaaggtgaagcctaaactacaaagaatatattggaattgacacgatagaacatcatttaatatcatggccgtatgtgatataaatatgttgttttcatatgtttgaaatagagcacatggatcgtgtcacgatagagtagttctaacgatggcacaagataatgattatgaatttcctttgcctcctagacacaagtattatgtagttgattttgggtatccaaataaacaaggctttttagcaccttataga

SEQ ID NO: 166505 - DNA, 233 bp, Arabidopsis thaliana landsberg
tcaaactttcgacatgctcgaatgtctcaacctcatcaacttgaagctcgggcaccagctatgacgccttgttgctctattctctttggtctaattgatctcgatgttgctgtttgcctttgcaccgcgctcaagctcagccttcttggcatcaccatcgacactcctattcaccttaacttgctcttaacgcctgtggaggtacccttcctgatggattccgttgcccaaca

SEQ ID NO: 166506 - DNA, 2065 bp, Arabidopsis thaliana landsberg
gcattgtaacctggatatgttgtagaaaatgtttctagtatattgcggagattcaagtggggacatgctgccgaagaggcccttcacaattttggtttcaggatggatgcataccaagctaatcaagttcttaagcagatggataattatgcgaatgcgcttggtttcttctattggctgaaaaggcaacctgggttcaagcatgatgggcatacgtataccactatggtaggtaatcttggtcgtgcaaagcaattcggtgagataaacaagcttcttgatgagatggttagggatgggtgtaagccaaatactgttacatataaccgactcatccatagctacgggcgtgcaaattacctcaaagaagcgatgaatgtttttaatcagatgcaagaggctggttgtgagcctgaccgtgtaacttactgtaccctgatagatatccatgctaaagctggatttcttgacattgccatggatatgtaccaaagaatgcaagaagcagggctttctcctgataccttcacctacagtgttataataaactgtcttggaaaagcgggccatttacctgctgcccataggctcttttgtgaaatggttggtcaaggttgtactcctaatttggtcacattcaacatcatgatagctttgcatgccaaggcgcggaattatgagactgcgttgaagctctacagagacatgcaaaatgccgggtttcaacctgacaaagtgacctacagtattgttatggaggtacttggacactgtggatttctcgaggaagcagagggtgttttcgctgagatgcaacgtaagaactgggttcctgatgaaccggtttacggtcttttggtggacttgtggggcaaagctggcaatgtagataaagcttggcagtggtatcaagcaatgcttcaagccggtctgcgacctaatgttcccacctgcaattcccttctcagcactttccttagggtccacaggatgtctgaagcctataacttattacaaagcatgctggcgcttggtctacatccttctttgcagacatacacattgctattgagttgttgcacagatgctcgttcaaactttgacatgggcttttgtggccagctaatggcagtctcaggtcatccggctcacatgtttctgctcaaaatgccacctgcaggtcctgatggccaaaaagtgcgtgatcatgtcagcaacttccttgattttatgcacagtgaggacagagagagcaagcgaggactcatggacgcagtagtggattttctccacaagtcaggtctaaaagaagaggctggctcggtatgggaagtggctgcaggtaagaatgtgtatccagatgcattgagggagaaaagctacagctattggcttataaatctccatgtaatgtcggaaggaactgcagtcatcgcactttccaggacacttgcatggttccgtaagcagatgttggtttcaggagactgtccttcacggattgatatagtaactggttggggaagacgaagtagagtcacaggcacgtcgatggttagacaagcagttgaggaattgctcaacatattcaacttcccgtttttcactgagaacgggaactcaggctgttttgtaggaagcggagagcctctcaagaattggttgcttgaatcatatgttgagaggatgcatttgctttagttgtagattagttgttttgttttcttcttttaaggcctctttttttttttgatcttttggcggaatctcaatggtttggttttgtaggtcataagtttaaggttattgatgactggaatttgtctccagatttttgttctcatgtcaacattatataattcaatctttgagggtgatacgaccctaatttattacatttggaatattttttatattttatttttgtacatcatcaaatgttacaaaaatgttttcttaccagccatgtactacatagacggctggttctacaatgatgtcaatggaaaaggaaaattggagaaaaatctaaaggagccctgagttgtaggagccacaggttgtg

SEQ ID NO: 166507 - DNA, 834 bp, Arabidopsis thaliana landsberg
  unsure (1)..(834): unsure at all n locations
ctttacttcatcaccatggtttccaacttccaagcttagacatttagagctctacataatcatggtttgttcgtcaatctccatagcctcagagctcttcattggacccaagaaacatcaaccctttgactctgatggtaccatcccttcaaaccacctccacaactttgaacactcctctatctccatgtcattcttagtctacgcgattttcgcagtagttcttgatcaagaaaggcgtagatcaaatatttcgcatggactgactatgctcgttgcatcttctgcctttgctcaacagctcttccttttccatcttcactctgccgannnnnnnnnnnnnnnnnnnnnnnnnnataagctcctccagctcattatcttcgtttctttcctcaccactctaatcggtatcactttgcctaaaagtttcttggtaagctttgtgaggtcatcaagcataactttccaaggagtgtggttcgtagtgatgggttacatgctttggacacctagcttgattcccaagggatgttttcttcacgaagaagaaggacaccaagtgattaaatgttccagcgataaagctatacacagggccaagtcgctagtcaacatcgagtttagttggttctttgttggaatcacaatttttgtaatgtcgctattcttgatcctaagtgggctttacggtgaaaatgccgagtactcaattctagtcactaaagacaaaggtgaagaaagtggtgaagagaaacaagacatagagtcgctaaagaaaagtaaaccaagttttggctgaactccttggaagtcgtcaagatgtgaaagataaaa

SEQ ID NO: 166508 - DNA, 698 bp, Arabidopsis thaliana landsberg
aagctaacggattcgatccctgcgtagattctagggaaggcgtctaatgcaatggctcttcggtcactgaattgtatataatcattcccctaatttaattacgagccatagtctcaaaaacttacttgtaccacaagtcatcttatattctttctttttttctctggcagacagttatcaggctttgagctaagtggatctctcggttatctactaagcaacctcaaatctctcacaactttgtgagaatcctcatttaatagtctcgtttaaattagttaaacaagtaatcagaaaataacagttttggtttttgaatatggtgatagtacagtgatctcagcaaaaacaatctcaaaggaaacataccttatcaactcccacccaacattgccaatctgtaagttcatacatttgtttgtttttttaattacttattatgcaagaaacaaattgtaatctgctatttgatatagagacttttctgaaaacgaactcgatggaaacgtgccctactcgttatctcaaatgaaaaatctccaaagcatgtgagtgaaaacaaagaaattgattaagcatatctttgctgtgaattatggtttatgatcacttgttaatttatatatgtgaaatgcagtaatcttggacaaaacaagctcaatggagcctaccaaaaagtttcaaaactgccaaactcg

SEQ ID NO: 166509 - DNA, 687 bp, Arabidopsis thaliana landsberg
  unsure (1)..(687): unsure at all n locations
atggaggactattctaagaacttgttcctattacttttctcatgcacagcgttgattatcagctaccacaacgttgattctttaagtactgcatcagtcgtcggattgaattacggactcctcggagacaacctcccatctccgtccaatgttatcaagttctacaaatctcaaaacgttgcgaaaatcaggatattcgagccaaacaaagacgtcctaaacgctttgcgtggaaaccgagatattggagtcaccgtaggcatcaagaacgaagacttggaggcacttgcagccaacaaagacgcagttaaatcctggttaacattgatccttacatagccgacgtgaacataacattcattaccgtcggaaaccaagccatcccgggcgacaaacatggccctcacgtgcttcctgtcattcaatctctcaccgacctcgtcaagtcaagaaatctccagatatcaatcagcaccacggtcactacgacgagccnnnnnnnnnnnnnnnnnnnnnnnnnaggagttttaacaccccaagcacgtcaacagcttgtccccgtgctgagattgttgtctcaaacaagtacaccgatcttcgtcaatatctatccttactacttccatgcctccgacccaaagaacgtccctctcgagtacgccaatttcaataacgaccagatcgtgg

SEQ ID NO: 166510 - DNA, 400 bp, Arabidopsis thaliana landsberg
gccccatcgtgctctccccgggcccgtgctcgcctgacaaagcggctctttgtctggatttgctcgcccgtctgtatgggcgctttccggtcctcggcgtgtgtataggccaccaagcgatcggccagtcattcgtgtgcgtggtcacgcgcgcgcgcgccgtgatgcttggctaggccagcgcgattcatcacgccgatgtcggtctgttcaaagggctgccgacgccgtatcaggcgacgcgctatcactggctggttgttggcaaggtgggtttcccagcgtgattggacgtgaccgcgcgaacgcaactcggagacggcatccgtgccgagttaatagggctgaaccgcttgttgctgccgatcgaaggcgtgcagttccatcgcgtgtcgatcct

SEQ ID NO: 166511 - DNA, 527 bp, Arabidopsis thaliana landsberg
tattcccaaataaaatatgaaaatgattgtaaggctctctgcaatagcaatagtggttactactctgctcctagcatctcaccttgcccattctaggaccgagccttttcttctttcaccaaattcaaaattccaagccaattcaaaaccaattcatcgattactagcttctctaaccgacgcgaagatatccgtgaaccaaattcaaactccttgttttccatggtacaagcattgccctccagttctatccccatcctcataaactcatatgttttctgtttaaaatagtattcaatgtttcaataaagaaatttaatatatgacaaaagttaattttgttgtgttattgtgtatttacgctatgtccgtaattttcttagacctgaaactacagcatgtaatattagtttcgttctaagcgtcactcgaaccggcgacctctaacgttcgcctaagatctttaccagttgagctaacgacacttggtcgttttcacatttaactttgatttcacaagatatata

SEQ ID NO: 166512 - DNA, 3140 bp, Arabidopsis thaliana landsberg
ataaaaaaaatatgcaggttatcattctgaattcaagtacaattaataatatttaataaatattttatctacatgtttacatttacaaaacaaaagagagagatattaataattcagaatgtttttttttattattatttactaacgctaaaaagaaaacttaactgactaaaatttaatttgtttttaaaactattcaagattttgtgcatcagtcacttcttaaagattctggaaatcgattatgtgaaggaagtcttatcaaaatttgcatgaaaaaaataaatataatggaaacaatataatagaaacataaaagcaaaatctaactttgtttttccgagccatctatttttgttttctatttttttgtttattttcacgggttatgaaaattttaaatcaaaaacccgcatatatgcgggtcctaatctagttatttatataagattcatcatatttagtacacatgatatccaaagatttttttactttaaattaaattaagattcaagagaatcaccatatatattataagaaaacatgtgagtagcatgaaaatattgcgtggaaataaatgtgtctctaaattgcatgtaattagcgtggaattaccatcgcattaacgattcgactcaatatcgtcgaaaatgtgtttggaaaattttcgtcgctaattcgaggcagataagcgtataattagcgacgaataaggatggactagtgtaattcaactcaacttcgtcgcaaatatgcttggaaataattcgtcgctaattcgaggcggataagcgtctaattagcgacgaatgtgagtcgaagtcaacagccaatccaattcatcgcaaagtacatgcacatttggtgtggaatttgcgtgtaaaaatttgacacaattgtgagacatatttgagacgaatatatatggtaggtgataaacgttttaaaatgtgctacctaactagtttacaattcctcgcaatatagtcgcaaaaattcgtcgcaaatagatttgtatgcctatataaagtcacgttgggatgagtaaggaacatcacaatctctcttcttcaatattaaacattcttcttcaaatttcgttttcaaatctttttttctcaaattttatatttcttttatcttcaaaataaatatatataatatgtcggcgtctcacgagatttatatccggcgggagtggatatataaacacaaagatgttgatggatcaatgacaagagagtttgcagataggctagaagaattcatgataaatgcaaatcaattgtcaatcatgcaagaaactggtaatatgtcttgtccatgtcgaaagtgcaaaattggtcgctattttctgtcaaaacggtcgcaaagcatttatataatagagggttcatggcaaattattatatttggttttggcatggtgaatgaaacgtctactaattctagttttcaacatgaagaggaacctaatatcacttttgagccccaacagtttgattataatcaacaaaatcataataaatttgaagatatggtctatgatgcgtttcatgaaacaacaacaatcaccgataaccatgaggaacctaatttagatgctcgacaattttattttatattagatgctgcaaatcaaccgatctacaatggatgtaaagaaggaatgtctagattatctgttgcatctagaatgatgaacattaaaacagataacaacttatctgagatttgcatggattcatgggttgaattaattaacgatattttgccagaggataatttagctcctgagtcatattatgagatgatagaagtttgcattgatgatcgcatgatattctggaaagaaaacgatcaattgcaggaatgttgagattgtggaaagctaacatataagctgagttcaagacgaatcaagatctcttaccaacgaatgtggtaccttacaataacggatagacttaagtgactatatcaatcagaaagaacatttacatcaatgacatgacatgcagagcattcacgtttagatggagaggtcacacatccatcagatgcaaaggcttgacaacattttaacacggtacattctgactttgcaagggagagtaggaatatttatcttggtctatacactgacgggtttagtccatttggtatgtccggtcggcagtattctttgtggccggtaatcgtgacaccatacaatctacctccatttatgtgtatgcagcgagaatttttatccttgagtattttagtctctagtcctaagcatcctaaacgttctcttgatgttatcttacaacctttgatctatgagttacatcagctttggtataccggagttcgtacatttgattactcacaacaacaaaattttacaatgcatgcaatgcttaagtggaccataagtgattttcctgcgtacaaaatgctatcacgttggactacacatggcaggttatcttgtccttattgcattcatcggacagatgcatttcaactgaagcatggtcgtaagacaagctggtttgattgtcatcgtcgttttcttccgatgagtcatctgtataggaaggacaaaaaaaaatttcaagaagaacaaagtagtacgtgaacctccacctgtacatgtgtctagagaaaccttgcttgagcagttagattattggggtgctcaagaaactattctatgtgggggtaattggcacatccccgccaatatgctagatggatatctagttaatcacaattggcaaatgaaaagcattttttggcagctttcttactggaaggatcttatgttgaggcaaaggatgtattgcatatcgaaaaaaaaaattttgataacatgatgcatacacttttgaatgtgcaaagacgtagtaaaaccaacttaaaaacaagactagatttgcctgatatgtatatgttcgctacctgatttgcatcttacaagagatgggaatttcagttcatatctttagattatcccaggaagtaaagatggcgttttttgaatgggttagatctgatatcaaatttttaaatggttgtgtgttaaaattttcaaaaaaaattgttaaagaaggccaaaaaaatttcggatatgaaaagtcataactgccatt

SEQ ID NO: 166513 - DNA, 347 bp, Arabidopsis thaliana landsberg
atggcacacctgatttcgttagagaaccgaaagccagtcattcatcccaacacattcctagcttcgagcgcgcaaatcatcggcgacgtcaccattggtgagaactcctccatttggtacaacgtcgttcttcgcggtgacgtttttcccatcaaaatcggtaaagactccaacgtgcaagacggcaccgtcgtccacggcacgtatcagaagtgcggcacgacgatcggcgatcgggtgaccgtgggtcacagcgctattcttcacggctgcacgctcggcaatgagtaaaaaataggaatgggagctttggtgatggatctctgtgaagtggccccgcggaccat

SEQ ID NO: 166514 - DNA, 751 bp, Arabidopsis thaliana landsberg
ccttcccagcgctcatccttttttggataagaatgcatgatattccaatgcaccactgctcaactcaaaccctcaaaaccatagggggggatctgggtccgttactggatgaagacctaccggaaggtaggattagagtcaacatcaatggtttagagtccttggaaatgtccatccctatccggctccctacaggcgaagtgacctctgttcagttggaatatgagaagcttgaaaaacattgtttcctctgtttctctctgacgcataaagaaaaagactgtcccagaaggtgggcgataagagtgacaagacgcgtactcggacgctgaatcaagaacgcactttgagtaacattactgacaataagagaagacaagatgagagacggaatcttggttactctaacagggagagtgctcctcatttccgtttcacggccaatcgcaacgatccaaaagatagttctcggtctgatcttagagatagaatcagacacagagctgttccttctcatggtagtagggatcatcatcgtgagcagagtcctagaagatggaccagaagggagagtagaagagagtctccgcagcattctaggggtcttgcagggaggtctgaaggggaatcccaagcctataaaccctctcaggctaggggatcttcccagcgtgaccactctcagcctgattctcaattagtgtcctctgtccacagaaaccagcatctacctctcggtgaggatattctt

SEQ ID NO: 166515 - DNA, 474 bp, Arabidopsis thaliana landsberg
caccatcgtgttgctggccaatgaaagagatcgtacagaaagacgcaccgtgaacatgcaccgctattaacaatccggaggtgctcaaagccctaaacctcaccaaagagaacgctctcctacttcccaaggcatgtggagttaatcctgacgtttcactctgctccaaaatagccagtgagtgatgattattcttttatttataagatcccataaatatataacttaatcaaatatctttgataagtataaacgacgttattttaatgtttttttctctcttgtaaatgaagctccttcgcctattgcgtcgccgggatcaaccaatggttagcactaattcgtatttattttcaaatttgttgttacattttgttgaaaaaaccataaaatacacaaactctgataatattttctttacaaattaattgacatggccttcttaatgaacaggaacctcttccgctgcaacta

SEQ ID NO: 166516 - DNA, 797 bp, Arabidopsis thaliana landsberg
  unsure (1)..(797): unsure at all n locations
atggcaaaaacagaaccaaaaacgtcaatggataggaattttcctgtcaagtacttcgtggtaattgtatattcttttctttgtttttgctctgataatgtgatcttcttattctttatgaacgagtattgctaaacacaggttgatgcattcactgagtcagccttcaaggggaaccaagctgcagtgtgttttctcttgaagaggatcatgagagagacgacgtgtggcttcagtctatggcctctgagtttgaccttccattgacatgttttcttattcccatccccggctccgaaccaccacgtttccttctgaggtggttcacggctgtagccgaggtccatcttgcaaacattttttgatttcattactccctccgttccatttttatacaatgttcggtttatttgattttgtagatggatatatgtggtcatgcaacattagcatcagctcacagtatcttctcaaacagtttggttggttcttctgacactgtcgagttttccaccaactcggggattctaaccgctaaaaggttctctgaatgtgacactnnnnnnnnnnnnnnnnnnnnaatgaatttccctgtgattacaacttgtgagtacagctccaatgatgtctccatcttctctaaagcattgaatggagctaccattgtcgatgttcgagaaactaatactgataaactcatctttaaaccattgaaaggagctttcaaaacactttaacagaccaaaatatcgtatgcgtttcagttttcttagaaagaaacctgcgaactttctttt

SEQ ID NO: 166517 - DNA, 489 bp, Arabidopsis thaliana landsberg; identical to SEQ ID NO: 73993

SEQ ID NO: 166518 - DNA, 498 bp, Arabidopsis thaliana landsberg
  unsure (1)..(498): unsure at all n locations
taaacatggcgccaaagtggtaattgtggatctagatgagtcctcggcacgtgatgctgcggaaactctgggtgagggccatctggggctgggagccaacgtcgctgatgaagcgcaagtgaaatccgcggtggctaaagttcttgaacactttggacgtatcgacgttctggtcaataacgcgggtatcacccagccaatcnnnnnnnnnnnnnnnnnnnnntccgattacgacaaggtgctagacgtcagcctgcgtggcaccctcctcatgtcgcaagccgtaatcccgacgatgcgagcccaatccgcaggcagcattgtatgtatgtcgtcggtttccgcccaacgtggcggtggtatctttgggggcccccactacagtgctgccaaagccggcgtgttaggtctgggtaaggccatggcccgagagtttaaacctgaccaggttcgcgtcaactccatcactcctggccatatacacaccgacatcacagc

SEQ ID NO: 166519 - DNA, 545 bp, Arabidopsis thaliana landsberg; identical to SEQ ID NO: 58872
  unsure (1)..(545): unsure at all n locations

SEQ ID NO: 166520 - DNA, 960 bp, Arabidopsis thaliana landsberg; identical to SEQ ID NO: 9994

SEQ ID NO: 166521 - DNA, 751 bp, Arabidopsis thaliana landsberg
atgggaggagaaggtggtgctgagcccgtaattcactttgtgtttgttcatggagccagtcacggagcttggtgttggtataaactcaccactcttctcgacgccgccggttcaaatcaacctccgtagatctcaccggcgctgcatcagcctcatagactctaacagtcgcttcgactccgaccaatataaccgtcctctcttctctctcttgtccgatctccctcctcaccacaaagtcatactctatggacatagcatcggcggaggaagtgtcaccgaagctctttgcaagttcacagacaaaatctccatggccatttacctcgcagcttccatggttcgacccggatccattccttctccgcatctttcaaacgtgagtgtgactcttttactaactcacctctcttcttcttcgttttttttgtaatgtatagaagatatatagaaccactagctatttaactcttgtgagtatttgatagatacatgtgggagaagaagatatatgggagtacacatatggtgaaggtaccgataaaccacccaccggagtcctcatgaaaccggagtttatacgccattattactatagccagagccctcttgaggttactctcttaattactagtatacataaattatatttcaacactatagcattattattattggttttggtaatatgtggcgaatcgagtatataaataaaattggttatatggtaggacgtaactatgcatctaag

SEQ ID NO: 166522 - DNA, 225 bp, Arabidopsis thaliana landsberg; identical to SEQ ID NO: 70362
  unsure (1)..(225): unsure at all n locations

SEQ ID NO: 166523 - DNA, 1425 bp, Arabidopsis thaliana landsberg
gattcaccagctgcagccacaactgcagcaacaacaacaactacagatgtcacagcaacaggtgcagcaacaagggatttataacaatggtacgattgctgttgctaaccaagtctcttgtcaaagtccaaaccaacctactggattctctcagtctcagcttcagcagcagtcaatgctccctactggtgctaaaatgacacaccagaacataaattctatggggaataaaggcttgtctcaaatgacatcgtttgcgcaagaaatgcagtttcagcagcaactggaaatgcataacagtagccagttattaagaaaccagcaagaacagtcctctctccattcattacaacaaaatctgtcccaaaatcctcagcaactccaaatgcaacaacaatcatcaaaaccaagtccttcacaacagcttcagttgcagctactgcagaagctacagcagcagcaacagcagcagtcgattcctccagtaagctcatccttacagccacaattatcagcgttgcagcagacacaaagccatcaattgcaacaacttctgtcgtctcaaaatcaacagcccttggcacatggtaataacagcttcccagcttcaactttcatgcagcctccacagattcaggtgagtcctcagcagcaaggacagatgagtaacaaaaatcctgtagccgctggaagatcacattctggccacacagatggagaagctccttcttgttcaacctcaccttccgccaataacacgggacatgataatgtttcaccgacaaatttcctgagcagaaatcaacagcaaggacaagctgcatctgtatctgcatctgattcagtctttgagcgcgcaagcaatccggtccaagagctttatacaaaaactgagagccggatcagtcaaggcatgatgaatatgaagagtgctggtgaacatttcagatttaaaagcgcggtaacagatcaaatcgatgtatccacagcgggaacgacgtactgtcctgatgttgttggccctgtacagcagcaacaaactttcccactaccatcatttggttttgatggagactgccaatctcatcatccaagaaacaacttagctttccctggtaatctcgaagccgtaacttctgatgcactctattctcaaaaggactttcaaaacttggttcccaactatggcaacacaccaagagacattgagacggagctgtccagtgctgcaatcagttctcagtcatttggtattcccagcattccctttaagcccggatgttcaaatgaggttggcggcatcaatgattcaggaatcatgaatggtggaggactgtggcccaatcagactcaacgaatgcgaacatatacaaaggttagagatctttctctccctttccatagctgtactcttttgcgtcttcc

SEQ ID NO: 166524 - DNA, 2696 bp, Arabidopsis thaliana landsberg
  unsure (1)..(2696): unsure at all n locations
ttcaaaaagcctggaataccataaaagcggacttattacttcttgtaaactccttttttcaaaatggagtttttgagaancggataaatacaactaatatatttttgattcctaaaatggagggaccgaatcggatgacggagttacgtcctatatatatgtgtaatgttaggtataaaattatttcaaaaattttatgccaaagaattaagacggttttaccaaatcttattttggaaacgcaatcaacatttgtagaaggacgtctaatttcggataacatccttattgcacaagagcatccttattgcacaagagatgtttcatgagttaagatctaacacatcatgtaaaggaaaatacatgacaattaaaacagacatgattaaagtgtatgatagggttgaatggaatttcgttaaggaattattaagaaaatagggattttgcttaaagtggatatcatggataatgtggtgtattacttcagttcagtatagagtccttcttaatggacaacctaaaggactaataataccataacgggaattaagacaaggatatctacgttctccttacttattcatactctgcacaaaggtgctaatagcgaacatccggaaggcaaaacaaggaaaattgatcacaagtatcaaagtagcagcatcgattccttcagtttctcacttgttatttacggatgatagtcttttcttttgtaaagcggataaagaccaatgcgggataatattgggtatcctaaaacaatatgaagtggtttcgagacaaatgataaattttgcgaaatcatcgattcagttcaggcataaagtagacgaagctataaagaacaaaaataaaatcaaccttggctatacataatatcggaggtatgggatcctattttgggctaccttagagtttagtggggctctaagacaaagattgtttcctttgttagagatggattatagactagattaaatgggtggtcggttaaattcttatcaaaaggagggaaagaagtgatgattaaattggtagcctttgcattaccaacttatgtgatgtcttgctttaggcttccgaaaacaattacttccaaactaacaagtgaggtcgcaagattttggtggagtttaaatggggaatctagaggtatgcactggatggcttggaataaactgtgtagtagtaaatcggaaggtgtcttaggttttagggatgtagatgattttaatttggctttattagaaaaacagttatggtgtctaatttcattctcggactctctttttgcaaacgtttttaaagggagacattttacgaaatccaatcatttggaaaatataaagtcacagtctccatcttatggctggagaagtatttgttctgctagatctcttgtttgcaaaggacttattaaaagagacggttcaggggcttccatctctgtttgggaggacccgtggatccctgctcaattcccgagtctagcaaaaagtaatggttcaacttttgatctatctttaaaagtccaaaatcttatagatagccggtcaaatttttggaacattgatctcttgaaggagctttttgagccggatgatgtcgagctgataagtgcactgctcttgggtgcgtcaacaagggaggatatcctatgttggcatttcccaaaatcggaatactattcagttaaatccggctaccattcatcacgaatagttaacaaggatcttaattcatctttcatttgtccagagatcaaagctctagaagcacatgtgtggaaagtgcaatgtccgccaaagttacggcattttttatggcaaatattatcaagctacgtgtcgatatagagaatttgcagaaaagaggtataaattgtgattcaggatgttcagatgtggttctatagaggaaacaataaaccatactcttctctagtgtcatccggcgagacaaatatgggctctttcaaagatccctattgtccgagggatttttcccacatattctatttatgcaaatttggatcacttattctcaagaatctcttcagaattagattcatcttcatttccatagataatctggtatatttggaaagtaaggaacgaaaaaatatttgaaaatatggataaagatccgttagacgtattatgtttagcagaaaaagaggcacaatcatggcagttagctcaatttaagctcaataccgaaaataacggttccatgggatcggaaaaacaaattcgggtccagaatatatcacacgataatatttattcaggttttcgttgttttgtggacggatcttggaaaggaagcgataagttttctggattagggtggttttgcacatcatcaaatggagactcgccaaccatgagagctgctaatcttcgtagaagtctttctccactacatacagaagtcgaaactctactctgggcgatgaagtgtatgattggtgccgacaaccaagaagtagcatttttcacagactgttcagacctggtgaagatggtgttttccccaaccgaatggccagcgttttcaacttatttggaggaattcaagaccgataaggaagaattcataagattttctttatctttaatttctcgaactgcaaatgtaagggcacaaattaacacgaaaaattcgtattgaaccgcttcatatcactt

SEQ ID NO: 166525 - DNA, 300 bp, Arabidopsis thaliana landsberg
ctaatcaaaacactcgagcttatagagaagcacgaaatcacattagaggatttagtgaagaagaagcagcgagaagcattggttgggaaagaagagattgaaaagtttgacaaggagattggtgaaaggatgaagatgcaagagatgcttgttaaggatcttgaatacttaaagccttgtgaagaaactgtgatgaatggtatgagtcgagaaccaaggggtgcaaaagttgcagactaacgtaatgtgaacaagtttgaatcacaagagggtaattttaagtgttttttgatatgtgtc

SEQ ID NO: 166526 - DNA, 630 bp, Arabidopsis thaliana landsberg
aaatgtttagagaaactaaacctgagtttatcggataaagaagtgaaaggtttatatagttggtgtgacgttgatgcaagcaaagggatacaattcaatgagtttatagtccttctctgtctcatctatcttctggcgaaaccttcctctgaatccagcacggtaataatcagtgacatgatgatgaatatattgactatttaagctaaaatatgtagtgtgtttcttaggaatcgagagagatgggtccaaagttggttgagtctatatttgatccaatagtagaagtgttcttgtttttggacaaagacggtaaagggaaattaaacaagactgatgtgataaagacattgaacaacgaagactatccgctagaaagatctccttcacatgtcaccaacatgagatttggtacatatgaatctcacgcacactcttcaattctcattgttttgatgaattggattatatatactcattggattctatcttttatggtgtaatgcagaagaaatggattggggaagaaaagggaaagtgggttttagagagtttctatttgctttcatgagttgggttggtcttgatgatgcagatgatgattttatgagcagctaaagaaacaactta

SEQ ID NO: 166527 - DNA, 1147 bp, Arabidopsis thaliana landsberg
tttgaagagaatgattggagaaggtatttatcctaacagagagaggtttgggcagattcttagtctgtgctgtagaacaggctgcgtctctgaagcatttcaagtagctggattcatgatttgtagtggaatctctgtatctgataatgtatggagcatgttggtcagcgggttttttcgttcaggagacccgcaaaaggcggttgatctgttccataagatgattcagattggttgctcccctaatcttgtgacgtatactagtttgatcaaagggtttgtggatttaggaatggttgatgaagcgtttaccgtgctaagtaaagtgcaatctcaaggtttagctccagatattgttctttgcaatttgatgatacacacgtacacaagactcggaagattcgaagaagctcgtaaggttttcactagtttgcaaaaaaggaaccttgtgccggatcagtatacttttgcatcaatactgtctagtctatgtttgtctgggaagtttgatctcgttcctaggatcacccacggtataggaacagattttgatctggttactggaaacttgctctcaaactgtttcagcaagattggttacaattcgtacgctttgaaagtactcagcatcatgtcttacaaagattttgctttggattgttatacatatactgtgtatcttagtgcactttgtcgaggaggagcacctcgcgctgccattaagatgtataaaataataatcaaggagaaaaaacatctcgatgctcattttcattctgcgataatcgacagtcttatagagcttggtaaatacaataccgcggttcatttgtttaaacgatgcatcttggagaagtatcctttagatgttgtgtcgtatacagtagctattaaggggcttgtgcgtgcgaaaaggatcgaggaagcctattctttgtgttgcgacatgaaagaaggtgggatttatccgaatcgacggacttatcggactattatttctggtctgtgcaaggagaaggagactgagaaagtgagaaagattttgagggaatgcatccaggagggagttgagttggatcctaatactaagtttcaagtgtatagtctcttgtctcgatatcgcggagacttttctgaatttagatcg

SEQ ID NO: 166528 - DNA, 456 bp, Arabidopsis thaliana landsberg; identical to SEQ ID NO: 46452
  unsure (1)..(456): unsure at all n locations

SEQ ID NO: 166529 - DNA, 422 bp, Arabidopsis thaliana landsberg
  unsure (1)..(422): unsure at all n locations
ggcgtgcccaacccgttcgtcggtgccgagttcctgatgtcgtgcgcgaagatcacgcagctgccggccgacggtctgccggaaatcacgttcgccggccgctccaacgccggctaatccagcgccatgaacgcgctgtgcggacaaaatcagctggcgcgtgtcagcaagacgccgggccgcacgcagctgatcaacatgttcaacgtcgccagcgnnnnnnnnnnnnnnnnnnnnnnnnnnnnnnnnnnnnnnnnnnnnnnnnnnnnnnnnnnnnnnnnnnnnnnnnnnnnnngcgactacctgcaaggccgcgccaatttgcgtgcggtcgtgcaaatcatggacatgcgccatccgctgaccgacttcgacgtacagatgctggagtgggcagcgcatcgccgtctgcgctgcttgtg

SEQ ID NO: 166530 - DNA, 502 bp, Arabidopsis thaliana landsberg
atgggtaattgctgcgtcagctccggtaccaccgatcgggaaaacgagaacgtttccgacaagaacacaaccattgtcgaagaagagacagtagtcaaagaagtcttgtcagagacaaccttgttcactccttcctctagcttccgcacttcgacgttcaaagacccggtgaagaccaagatccgagaagatgagaagaaaaaaccaggtttcttgaaaatggcttcagacccggttttgatccgacccggttcggttgatcctgaagaaggctctgaggtttcggagatttgtagcttgagtttgagcgagagtgtgtcttcaacggttgtgatgaatggttacgatgaggaagatgtgatgatgatgaaacagaggaaatttcagagatctctggcgaaactcggacccgggtcacggtaataattatctgacctggagaactgatcaatctcacgtaagagaacaatggtcatgtaatgagcgagatacgggcgggtgt

SEQ ID NO: 166531 - DNA, 361 bp, Arabidopsis thaliana landsberg
  unsure (1)..(361): unsure at all n locations
atcatcccttgccgatcccacggcggcacgccgaaatcgtggccctgcgcgcggcctgcaaaaccatcggcaatcaccgcttccggcaggcgccacgttgtacgtcacgctggagccatgcgccatgtgcgccatggcgctggtgcatgcccgcgtcacccgcgtggtctacgccgccagcgacccgcgcaccggcgcggccggcagtgccttcgacaccctcgtgtcggatcgccacaaccaccgcgtggtcgtgcagggnnnnnnnnnnnnnnnnnnnnnnnnnnnnnnnnnnnnnnnnnnnnnnnnnnnnnnnnnttgaagtctgaacggacgacctcgacgcatttgccccgaccaa

SEQ ID NO: 166532 - DNA, 463 bp, Arabidopsis thaliana landsberg
acaatgaatgatttgaattcagctctcttaatattgcccagtcattacctggctttcttttgtgccattgttattcacgaagcggcacacgcatggatggcgaataaattcggtgatccaacagcaaaaaatgaaggaagacttacacttaatccggttgctcactacgatccgtggggaacaatctttttcccgctgcttgctgcttttacgaactttgcgatgatcggttgggcgcgaccagtgcctatcgaagttcgtaatttcaaaaaagtacgtgccggaattttttgggtgagttttgcaggccctctttcaaacattcttctgggaacgttatctgccatcatcatggcacttatcgcgacgaaagtttcaactgactggggcttttatacgatttcgatccgtatgcttcagtatttcagtttttattaaatttcatttctggcattcttcaatt

SEQ ID NO: 166533 - DNA, 1865 bp, Arabidopsis thaliana landsberg
taatattaatgggtctccatctttgagaaatgaatatgatcaagggacataccaggcctcagagattgtctcagacttatcctttgtgagtagagattggccaatcatggcttggttcgaggacaaccgatccaactatgctacatactcaagctcatctgaaaaacaggccatagatttgtgttcttcttattctgcattctccacaagctgccaagaaagtgggagactctcatcattgccaatgaatagccaggtaaattaataaaaataacttactaatcaaactttgtctgccttaattaatatttcttgattactctataaattctcacaggatgatgtagaatctgagatgagaaggctacaactagaacttaagcatacaatggacatgtataatagtgcatgcaaagaagcaatcgcagctaacaagactgtataactacatacatacatatacatatatacttgaaataatcatccggtcttatgatattaagatatgaatctatgtgtttgtcagactatcgagctacacaaatggaaagaagaaaggaaacataaactagcagacgctatacttgccacagaagcagcaatggcaatagcagagaatgagaaggcaaagagtagaacagccatggaagcattagaagccgctcatagaatggctgaaaccgaagctcaaaaaagaaagcaaatcgaaacggcggctctacgagaagtagagcatgaaaataaagcaatgcatgctttacctcatagtaatagaatgtataggaaatacacaattgaggagattgaacaaggaacaacaaaattctcagatagtcataagattggagaaggcagttatggaacagtttacaagggtactctagattacacaccagtggcgctaaaagttgtgagaccggatgcaacacaaggaagatcacagttccagcaagaactggaagtcttgacatgtataagacatcctaatatggttctgctccttggagcctgcgcggaatacggatgtttagtctacgaatacatgtccaatggtagcttagacgattgtctccttagacgaggaaactctccagtgctttcttggcagctaagattccgcattgcagctgaaatcgccactagccttaatttccttcaccagctaaagccagagccactagtgcacggcgacttgaaaccagctaacatattacttgaccagcacatggtcagcaagatttctgatgttgggttggctaggcttgtccctcccacaattgatgacatcgcaacgcattatagaatgacatccactgctggaacattgtgttacattgatccagaataccagcaaactggtatgcttggaaccaaatcagacatatactcatttgggattgtgctcttgcaaatacttacagcaaagacaccaatggatttgacaaatcaagttgagaaagcaattgaggaaggaaattttgccaagatacttgaccctcttgttactgattggccaattgaagaggctttaatattagcaaaaatcggtttacaatgcgcagagttaagacggaaagatagacctgacttgggaacggttgtgttgcctgagctgaaaaggctcatgaatttagcagaagaaaacatgtctatcacgcgtccttcgtcgtaaagcagccagaataatagccaagttgatagtctagcatctacaacttcaatcaaagtaaatacatgacagaaaataaagctttttcactcaagattatatgaaacatgtcttcattactaaaccttttatttttcctcttttcttttgtttttcaggagaaaataagcgatcaatctctcaacatgtatggata

SEQ ID NO: 166534 - DNA, 375 bp, Arabidopsis thaliana landsberg
gactctaactgaggggttatcagtttcatccttctgtaggtaagagtatatgcaagagcctatataggcagttacttaaacccttgatagccaaatgttctcatttcgtttgcctcatatcggttctttttttttatttgcaggcgtaggctatctactgtgctggttcacctgaagtttgcagagcaccacaaagaagctgtgacatacatagagcaaggacacgttcgtgtaggaccagaaacaattactgatccagctttcttagtaactcggaacatggaagatttcatcacttgggttgattcatccaagattaaacgaaaggttcttgagtacaatgacacattggatgattatgacatgcttgcttag

SEQ ID NO: 166535 - DNA, 1009 bp, Arabidopsis thaliana landsberg
atcatcatgtccgatggttatcgtagttctaagaagacggatactatctgcgaagatgtttgtggacaggtttggcttttgtttctttatttttcatctgatcctattctggttttgattcaaggcttaggatgtcttatcattcttaatcctactaaagagtgtttattacttaagaccagactggatgatttctgcattttgttttatatgaagtcttgcatattcaccgggcttcgagtgacttgagtaatatcaactcttttgctaatggaatctcttcttttgttatatatatgttacaggaaggttctcgagcaggcaaggccatttcaaggcttagatgtgttctaagaggactcgatttcaaaacattcctgtttctcttcactctcctgccactcttcatcttcggcatctatctacacggccagaagatcacatatttcttgagacctctatgggaatcacctcctaaaccttttaacatccttccgcattactatcacgagaacacttccatggaattgctctgcaatcttcatggctggaaactccgcgaatctccaagaagagtctttgatgctgccttgttcagtaacgagatcgatatgctcactctccgttggaatgagttaaatccttacattactcagtttgtgcttctcgaatctaactcaactttcaccggactgtcaaaacagttggctttcgcagacaacagggagaagaatttcaaattcgttgagccaaggctgacttatgggaacgttggaggaaggttcaagaaaggcgaaaacccctttgtggaggaatcattccaaaggcttgcacttgaccagttgatcaagctcgcaggtataaaagaagatgatcttttgataatgtcggatgtcgatgagatcccgagcggccataccatcaatctgcttagatggtgtgacgggttcccaccgatccttcatcttcagttgagaaactacctctactcatatgagtactatgtcga

SEQ ID NO: 166536 - DNA, 380 bp, Arabidopsis thaliana landsberg
gtttcaagtacacgaaagactcagtgttagtggtgtcagaagaagagtacaagaaatgcaaagcgaccaaaccacaactctactcaaacaacgaagacactgttttcaaactagaccgacccggtttgttttacttcatcagcggtgtctctggccactgcgaaaagggtcagaagatgatcgtaaaagttatggagacggagtcttctacagagtctcctcctccatcctcttcttcttcttcttcgtcatcatcatctcttccggcgtcaactcccaaggccaagaagagcaatgccttcaaaaccgcagtccagttcagtagttccggttttgttgtctctgctgttctgattgtttcagtttttggtttggtttag

SEQ ID NO: 166537 - DNA, 481 bp, Arabidopsis thaliana landsberg
acttccggggaaaggatattcgccacggctttgtcagtttccttaaatttgccttgaaaagaaaaaatatcaacttcttcatcgatacacatgaacaaaagggaagagacctgaaccacctctttaaacggattgaagaggccacgatcgcgctggtcatcttatccccaaggtaatgttccggttatgctcattgctcaatatatattattaacctgaaaactattctgattaggtatggggaatcaaaatggtgtttggaagaactgacgacaatcatggaccaagaagaaaaagggcaaatgattgtcatcccaatcttctataaagtgagaacggaagacgtggagaaacaaacgggagatttcggccatatgttttggagttgcgatgaagaagcaagtcttgaagagatggagaaatggcaagtggctttgaaggctgtgtgcaacaaaattggactcacgttggatcttaaaag

SEQ ID NO: 166538 - DNA, 1413 bp, Arabidopsis thaliana landsberg
aagctggggcaaacttcattagcataactggctcaacgcttacctcaaaggtacatggaaccttaaaactatgttgtttgcactgtcacgttgatattccactttgtaaacatcttcatataaataagaagaatatctaatgacataagaaaaacttttccaccccggtcatcgacttattattgtcaatgccgattgtaacttagagtaaatctctttccaactttacctttgattggttctgatttaagtcaatttcgtccattgtttggcacagtggtttggagatgcagagaagctcacgaaggctttgttctcttttgcaagcaaactagcccctgtcattatatttgttgatgaggtgagaaattgtttagctttatatcacttttcaatttcggttattgctttttatgaggaatacttttgtgatgcgtaaaatgtgttactcaaggactaactgtaatttattttgttgtcgtataggttgacagtttgttgggtgctcgtggtggtgcttttgagcacgaggcaacacgaagaatgagaaatgagtttatggcagcttgggatggactcagatcaaaagatagccaaaggattctcattctcggtgccaccaaccgaccttttgatcttgatgacgctgtcattcgtaggctaccaagacggtaatttaagctttcaagtaatttctcctttggaatatttgtatcttttcgataattgtattgaggcttgtgtttataggatatatgtggatttaccagatgcggaaaaccggttgaagatattgaagatatttctgacaccagaaaatcttgaaactggtttcgagtttgataaacttgcaaaggaaaccgaaggatattcaggaagcgatctaaaggtttggtcattcggggtttcatttacaagttcgagtatgattcaacacagtagttctgattccttttcttttcttacattgcagaatctatgcatagcagctgcatacagacctgttcaagaattgttacaagaagaaaacaaggtaaggacatgcataaacccacacagttgatttctgttgttacgaaaaataatttttgtactcactccatgcttttgaaacgtcgaattatcaggactcggtaacaaatgcgtcccctgatctacgaccactgagtttggacgacttcattcaatccaaagctaaggtattggatcaatctcttaaaaaacatcatcatcatctctattcatgttttttcccctggtgtttttattatcgaaattgcgtcattgtaatgtaatttgcaggtaagtccgtcagtggcatacgacgcgacgacaatgaacgaattgagaaaatggaacgagcaatacggtgaaggagggacccgaactaagtctcctttcggcttctaagcc

SEQ ID NO: 166539 - DNA, 1687 bp, Arabidopsis thaliana landsberg
cctcttaatacgtgcactcttgttcatcattccctcttctttcacaaattttcttcataatcaaacgaatttattacacccctcacatcaatttttccagtacaataattcagacatgtttcaatgtaaaatgaataaacaataaatagataaaacccagtaaacttacgattgtagtagaacagaacatgcgccatgatttgattagacgaaaaatgaacacgtttaagaaaatgactgtggcttcttctctcccagatgctttcgcagacgacgaatccacaatttgtttcttctttcactgtctgtttcaaataatgtcgatgaaattaaagagaagggacccctaaaaacttgttaggccttattattttcccgctaaaagcccattaagtcctagtgggtcttctctaatgggccttattagttaagattaagaagtaaggaaagtgagggagaggcgagggaaaactgaatccaactgaagcaagcagcaatggaggacaaaagcagcggcggcggcgttaggcttcacgtcggcggattaggagaaagcgtcgggagagatgatcttctcaagatattctctccgatgggtaccgtcgatgccgtcgaattcgtcaggaccaaaggtcgttcctttgcctacatcgatttctctccatcttccaccaattcactcaccaagctcttctctacagtgagtgaattcgatctctctctctctctctctctctctctctctctctctctctctctctctctctcagtttttaccaatttgttttagtaatactggttctagtgacatattttgagatctatgattgttttagaaacttgtggatgttgcaatctcttgaatgtttgtgatcatcactgtgctggatcttaacttgtgtctaatataggtggataagttgtatttggtgttgttagtgtgatggtttagctcttgaattttcgatttgtcactgcttttgattctttgattcaacctacttcagtcaatttggctgtggaaggttccatatagtcccataagggatttgttatttgaagtcggctttttaagtttcagttcgagtgttggaactttgtcttttgctttggtaaaccttatttgctagtgtgattgtttagctctggagttatccctatagtgaattaagggttttgttagttggaaactggaatcagctttccaagttttagtttggtttctttgttcattggaagtttctcttctgctttggtaaaccttatttgtgtgtgtttcttccaggtggttttctattccttgggctaatgatagacaggctgcatcattacatgagggagctacgcataagaaggaagaacatggaagttataaagaaggaaggagcattattggaaggtgttaaggccagaggtttagatgaagttaaaaacttgatggaagaaattacgtcccttcggaaaaggcaagagcagctggactctgagcttgaggcaaggtctaaagaaatccgtaccgagaaaactagtgcggttgctctacagaagcaatctgaagggttccttattgagtttaaccggttgcttgaggaaaaccaggtgctgcgagaccaattgcacactgtggattcgaaactttcgcgttcaagcagcaaaaagaatacttgagagaccttattccaacact

SEQ ID NO: 166540 - DNA, 487 bp, Arabidopsis thaliana landsberg
atggcacgttttcattttcgggctttctcttttgagctatggttgcgccgcttgagttgcaagcttgccatcttcgactttgacggaacgctggctgattccggcgagtggtgctggcgcgccatgaacgagatttccggcgagttcggcttcaacgccatcccggagtcggaccgcgaacgagcgcgggcgcttcccacgcgcgaattgttcgagttcatcaaattgtccgcctggaagcttccctgggttgcccggcgcatgcggcagctggccgctcgcgattgcggccagatcaagttattccctggcatacctgaaatgctgctgaggctgaaacaggcagggtttctcctggcgattgtgacttctaattcacaggaaaatgttttgaaaacgctggggcctggcctggccgcggtctttgaaacaaattctttcgatgcttcgttgtttggcaaatctggaaacctgagaagtgtcgcgg

SEQ ID NO: 166541 - DNA, 515 bp, Arabidopsis thaliana landsberg
atggccgaatcgcaaaccggtggtggtggtggtggaagccatgagagtggcggtgatcagagcccgaggtctttgaatgttcgtgagcaggacaggtttcttccgattgctaacataagccgtatcatgaagagaggtttacctctaaatggcaaaatcgctaaagatgctaaagagactatgcaggaatgtgtctctgaattcatcagcttcgtcaccagcgagtaatttctttctctactttctcaaaaatgttacctttttgttgctttggtggttatagcgtgtaaagccctcttctttgttaagttagattgatgttatattcattgggttgttaagcaaagtcactatgtcgattttggaatattgttttgccttttagggctagtgataagtgccaaagagagaaaaggaagaccatcaatggagatgatttgctttgggctatggccactttaggattcgaagattacatcgatcccctcaaggtttacctgatgcgatatagagag

SEQ ID NO: 166542 - DNA, 775 bp, Arabidopsis thaliana landsberg
tcaatgggagaaacttgccgatattgtgatctctgctttagatagtcaccgtccgatcggagaaggtcagctccggcgagctaagaaagctctgattgatttagcaatcggaatgcttgacgagaaagatcatccttctggaaccaatctagctcatcgtaaccgttcattcggaagagtcaaagacagtcaccaccgttcgattggtcatttcagatctctttcttggagtgtttcaagatcatggtcagcttctaagcagttacaagctttagcgagtaacttggcaacgcctcgaccaaacgatgtcgttgctagcaatggtttagctgtaccggtttacacaatgacttcggttttgctttttgtgatgtgggttttggtagctgcgattccttgtcaagaccgtggattgcaagttaacttctttgtgcctaggcatttccaatgggcagctccggttatgtcgttgcacgataagattgttgaggaatctaagagaagagataggaagaattgttgtggtttgcttaaggagattgataggattgagaagagttcgaggttgatgaatgaattgatcgattcgattcatttcccgttgaatgatgacaaggaagttgaggtgaaacagagagttgatgagcttgttcaagttcgtgaagctttgagaaatggtttggatccgtttgagaggaaagtaagagaagttttccatcggattgtgagaagcagaactgagagtcttgattctctttgatcttgcacatgtttg

SEQ ID NO: 166543 - DNA, 484 bp, Arabidopsis thaliana landsberg
ggctgtatcgccgccctgcaggacgcggcgtacatgacggccatacgccggctgttttacctccgcgcgctacgtcacctcggtctgcaccggttcgctgatcctgggtgccgccgggctgctcgccggcaagcgcgctgcctgccactgggcctggcgcgacctgctcaccccgctgggcgcgatacccgacccggcccgcgtcgtgcgcgacgggaacatcctgaccggcggcggcgtcaccgccgggatcgacttcgcgctcacgctcgcggcggaaatcgccggcgaagaggctgcgcaggcgctgcaactgggctttgaatacgcgcccgcgccgccgttcaattcaggcagccccgacacggcgccccgcgccgttctcgaacgggtccaggccctcaacgccgcgcaacaggccgcgcggcgcgccgccatcgaccaggccgcccgcgcgctgggagcagcctcgaccaaaacataa

SEQ ID NO: 166544 - DNA, 326 bp, Arabidopsis thaliana landsberg
  unsure (1)..(326): unsure at all n locations
gttatcatttcgggctttcctcttcccacactcgtcttgacgccggggtgggcgatttttcaatccgtccaaaaggagattacatgcgtcattatgaaatcgtttttatcgtccatccggatcagagcgagcaagtgcccgcgatgatcgaacgctacaagggcatcgtcactgcccgcaatggcaagatccatcgtgttgaagattggggccgtcgccagatggcttacctgattcagannnnnnnnnnnnnnnnnnnnnnnnnnnnnnnnnnnnnnnnnnnnnnnnnnaccctggctgaaatcgaaaccggtttcaatgaatgc

SEQ ID NO: 166545 - DNA, 932 bp, Arabidopsis thaliana landsberg
  unsure (1)..(932): unsure at all n locations
atggcggttacattttctgatctccacacagagcgaggtctcaaaaccctcgaggaacatctcgccggtaaaacgtacatctccgggtaaacacgcatattctttcataatttgctatatcattcatcaatagcttagattttgcacagtttctacttacatcttggaactcggttttgtttcagcgatcagctttcggttgatgatgtgaaggtttacgctgccgtattggagaatccaggtgatggttttcccaatgctagcaagtggtacgattctgttgcttctcacctagctaaaaggttcgttttattctcattcgtttttgcttcttgttgatcttctgattgaatggctctttggagaatgatgacttctttgaatgtttcagttttcccgggaaagcagacggagtgagagttggtggtggtgttgctcctccatctgaagctcatccacatactgaggtactaaaagtagtcaaaatatggaatgacgccaatgtaatctgtttgtagaattgaaacaattatttgatagtgtgagatcaagtagaggaaaatgcaattgtggtgctgttggaatgatgattttgtatactgtaatttagctttgcccctcaacttatatctgcaggaacctgctgctgatggtgatggtgatgatgatgatgatattgatcttttcgctgatgannnnnnnnnnnnnnnnnnnnnnnnnnnnnnnnnnnnnnnnnntaagaaagatactaagaagactaaagagagtaagtctttctctaaacttggattggatcactgtggactattatagtgtaaattgttagaatcttgagatcctgctcatgtttggctaacttttgtattctcttttaacttttttggtaggtggaaaatcttctgtgctactggaagtaaaccatgggatgatga

SEQ ID NO: 166546 - DNA, 1895 bp, Arabidopsis thaliana landsberg
atgtggatggtgtgtgctcatgataatatatagttgaagtgcagtggtctattttggagcacaattgagttaattagattctattattaattgtgtcaattttctatttcagaatgagacggagaggatgtgtcaggctataaaacatatttctcctgatttaagttgtaatccgagtttgaaatcatgcgccatttgtggacctgcagccacaaattcttttcaaatcctctcgaacgagacagacagtgtcaaaggactggagcttggtgagttgactttgactacgacagaggaagtaaggaattcttttcactttgataggtgaactttgtgctgtacatgatataggcatagtgtggggttttacctgttgcatgtcttcacagttttacagctgaacctggagaattgactctttttttctttactgagacacaaattgagcttttgaggtaacactgagacttaggggaacccaaaaaatagtacaatgaaacgtttatggaccttgaataagtgatacaaagagctttttgtttaaaacctttaaaagctagatctaaaaggaatatatctccattcatcactgcatttgtaaacattgcttaatgaagtatcagcgcctgaaatatgtatgcacagcttacacttttctgctcatttgcaggaacgtcccgttgcttttgtgtttttcaagagtcgttatgatgctcttgttgtttcagaagttcttcaaacaccaaatcctatgttatgggtggcagatttggctccagagcctcatgatgttcactggagaaatctcagaataccttatcggcagctttggatgcgaagaatagcaacccttgttggtgcaattgccttcatgtttgtgtttctttttcctgttgcctttgttcaagggctgactcaactaccaacgttatccaggaattttccttttctaaaagacctcttgaacaggtgagtatccagcatttccttactgttgtactcagtaatagaaggttcttgttcgtattcttctaggtacgttgcttttagagaatttcaagatgcgtatagtcggagctgctaggcagttgatatatttatgctagatttaaaagcgcagtaaaatactgagagcaattaaaatctgtgtaattgatttatttttatttcctttcaatttaattatccctttgaaaaacattgcaggaggtttatggtgcagatcatcacagggtacttaccaagtgtgattttggttctattcttttatgccgttccaccattgatgatgtacttttcaaccttagagggatgtgtttctcggagtctaagaaagaaaagtgcatgtctcaaaattttatacttcaccatctggaatgtgttcttcgtcaatattctgtcaggctctgttatcaggcagtttaccgtcttgaatagtgtgagggacgtacctgcacaacttgcgaaacttgttccagcacaggtaattttcagtgttccttttacacttgtgactatattcaattttgttatattctataaggttaacggtatgaaaatattcattgactacatgcaggctggcttcttcatgacctattgtttcacgtctggttgggccggtttggcatgtgaaatcatgcaacctataggtcttatctggaacctgatagcaaaagttattgttaagaacaaggaggagtcatatgaaacacttaggttcccataccacaccgaaattcctcggctgcttttgtttgggctcctgggtttcaccaattcagtcatagcaccactgaaactgccgtttttgctgataaactttttccttgcatgtctcatatccacacaatcaagtaagtataaaccctcctctcttgtacataatatcacag

SEQ ID NO: 166547 - DNA, 398 bp, Arabidopsis thaliana landsberg
gttgtgggactgctgaaatgttgtatgggttgatatgttgtttgtttgcgataccgtgtgtgtatacatgcacattccggaccaagctccgaagcaagtacgggttaccggatgctccagctccagattggatcactcattgcttctgtgaatattgtgctctttgccaagaatatcgtgaactcaagaatcgtggccttgacccttccattggtaaaccaaccagctcttagatctctttaaaataaatattctaaataatgggttttagaaatgattaatttgacttattgcatatcttggtgtatttaggatggattgggaacgtgcaaaagcagcgaatgggtcagcaacaagagatgatggctcctccaatgggtcaacgaatgatgggttga

SEQ ID NO: 166548 - DNA, 1065 bp, Arabidopsis thaliana landsberg
gatcccttaacagtaatctccaaaacttaaaaaccaattcgtgtcttttgttgtggtctttggcagcaaaagaggtcgaggtattgtgaatgcggacaggatcagtcagttgcctgaggctttgattattcagatactgtctttgcttcctacagaagttgctgttaccacgagtgttttgtctaagcaatggcagtttctgtggaagatgttgcctaaactcaactttgattctttagatcagagacatgaattcaaaacattttcaaagaatgttaaaagggctctgctttcacataaggctccggttctgcatagtttgcatctcatagttcatttacatttatgtaattcaatgaatactgcaaaattgattggcattgcatttgcctgcaatttgcttaagttggtactcgaagttgacgggggacggttctcaattcctgaaagcttgtataactgtgaaacgctagatatcttggaactcaagtattcgattcttatggatgtcccttcttcgatttgtctgaaatcccttagaactctgcaccttcactatgtggacttcaaaagacaatgaatcagctcttaacctttatctggctgtcttaatcttgaaaacttggtggtgcatcgatatccattcagcagtgtaaagacattcactattgcggtgtcatccttaaagagactaacaatttatacatcaagtactgttgatccgcgtgctggatatgtgataaattctccttctttaacatacttgaagattgtaggtcaaattgggttctgtctgatagagaacgtaccagagctggtggaggcaagtatgattgtttcctctcagataatcaataagaaccttctggaatctctaacttcagtcaaacgtctgttcttagaattctcacccttgatggtagattttcttgcaattgattagattagtttttatcatattgtttatatataaatgtactaattctgaatcatgcacagactaagtttcctactggtagtatcttcaatcaactggtatatttggagttcctgccacatccacgc

SEQ ID NO: 166549 - DNA, 1243 bp, Arabidopsis thaliana landsberg
gtatattaactagacttttttataatcttttggttacagatacgacagtagtaccaataatgtttggtgagactatactactacgagtaataaactcagcattaaaccaaccgttattcttcacggtggctaatcacaaactcacggtggtcggagctgacgcgtcatacctaaaacccttcaccactaacgtgatagttcttggcccgggacaaaccacagatgtcctcataaccggtgaccaaccaccaaaccgctactacatggccgcaagagcttaccaaagcgcccaaaacgcaccgtttggaaacacaaccacaacagcaatccttcaatacaaatccgccccttgttgcggtgtaggcggcggaagtggaaccaagaagggtaattccttcaaaccgatcatgcctatcctccctgcctacaacgacacaaacaccgtcacacgtttcagccaaagcttccggtcacttagacgagctgaggttccgacagaaatcgacgagaatctcttcgtaaccaacggacacggtctcaacaactgtcctaagaacttcagatcaagaagatgtcaaggtcctaacggcacacgtttcactgcatcgatgaacaacgtttcatttgctcttccaagtaactactcactccttcaagctcaccaccatgggatccccggagtcttcacaaccgattttccggcgaagcctccggtgaaatttgattacactggtaacaacataagccgatctctctaccaacctgatagagggactaagctatacaaactcaagtatggatcaagggttcagattgttcttcaagacacaggtatagtaactcccgaaaaccattccattcatctacacggttacgatttctacattgttggtgaagggttcggtaactttaatcccaagaaagatacttctaagtttaatcttgttgatcctccgcttagaaacactgtggctgttcctgttaatggatgggctgttatcagattcgtggcagataatccaggtaatgaacaaaagttgattatatctttagtaatagttacattttgatttgatattaggggaaataatgctgttatggttttgaaacaggggtttggttgatgcattgtcacttagatgttcatataaagtggggtcttgctatggcgttcttggtcgacaatggtgtcggagaattggagactcttgaagctcctcctcacgatctacctatttgctag

SEQ ID NO: 166550 - DNA, 1208 bp, Arabidopsis thaliana landsberg
gaaaaacagcaaatctttggtgtttagtatggatgatcatgaggaaattgaagatgagttcgaaggtgtgaaggtgaagtggtattcgaatgtgaaagtgattcagcctcagtctaattatggtcaacgcagctcagaggagagaaggcactttactcttagtttccataggcgacaccgaggtatgatcattgagacttatcttgatcatgttttgagagaagggaaagctattggattgatgaacagagagaggaagctttacactaataactcaagtcaagaatggtatccttggaggtcaggaaagtggagcaacgttccttttcaccatccggcgacgtttgagactttggctatggatccagagaagaaagaagggattaagaaggatttgataaagtttagcaaagggaaagattattacaagaaggttgggaagccatggaagcgcggttatctcttgtttggcccgcccgggacagggaaatcgacgatgatagctgcaatagcgaatttcttggactatgatgtgtatgatcttgagctaacgacggtgaaggataactcagagctgaagaagttgttgttggatacaactagtaagtctatcattgtgattgaagatattgattgctcgcttgatcttacggggcagcgaaagaagaaaaaagaggaagatgaagaggaggatggagaggagaaaaaggaaggtgagaagaagcccaaggtagatgataagcagagcaaggttactttgtcagggttattaaactccattgatgggttatggtcagcttgtagtggtgagaagatcatagtgttcacaactaattttgtggataagcttgatccagcattgatacgtagaggaaggatggacaaccacattgagatgtcttattgcaagtttgaagcattcaaggttttggctaagaactacttggagattgaaacacacgacttgtatgaagagatcgaaagaaagctcgaagaaaccgatatgtccccggcggatgttgcggagactttgatgcctaaatctgacacacaagatgcagatatttgcatcaagcgtttggtcaagactttggaggaagagaatgaaaaagcaaggaagttggctgtggaagaagagaagaagaaagcagagaaggaagcgaaaaagattaagaaagcagaggaagcagaggagaagaagaagaaga

SEQ ID NO: 166551 - DNA, 1796 bp, Arabidopsis thaliana landsberg
tcctttccacattgctggtaaagaaggcgaattaggtatgaattttgtcggttttcttctatccaaaatgatgaaaatttcaatgtttgcttgatattaagaactgaacttaaaactacctatctttgtttgttcttaagaattgggaagaaaaaattacacaaaaatatggttaaagtgttaatctttggttgatttaaagaattgaatggaaagaattaaagaaacactgatgataatattctatatttatttacatgtgtgatacattgatgaaatttgaaatctatttttatagatgttttgagagtactaatggaagaacatccggagctatcaatgacggtggacttatcaaacacgacggctctacacacggcggcagctcagggacacgtagaggtcgtagagtatctactagaagcagcagggagtagcctagccgcgatcgcaaaaagcaacgggaaaacagcattgcactcggcggctaggaatggtcacgcggaagtggtaaaagcgattgtggcggtggaaccggacacggcaacgaggactgataaaaagggtcagacgccacttcacatggcggtgaaaggacaaagcattgatgtggtggttgagttaatgaagggacatcggtcttcgttgaatatggctgattctaaagggaacactgcgctacatgttgctactaggaaaggtcgcattaaggttcgtcaatcatctccaataaaacaaaatttcaaatgaaaattttactattttaaatggtaaaacataaaaattacttttgtaaaatgtacatgcaaacatagacattacgttttgacatttaacgaaatttatatgttgcaaattaaatgtaatgactataattggataaatctttgatattgtaacttagggagattttaatgtgattgcagatagtggaattacttctagataacaacgagacaagcccaagcacaaaagcgataaacagagcaggagaaacgccgcttgacacggctgagaaaaccggccatcctgcgatcgccgcggttctcaaaacccgcggccttccctcggctaaagctatcaacaacactactaggccaaacgcggcgcgtgagctcaaacaaacggtgagcgacatcaaacatgaagttcatcaccagctagaacacgctcgagagacaagaaaacgcgttcaaggaatcgccaaacgcattaacaaaatgcacgtagaaggtcttgacaatgcgattaactcaaccacagtcgtggcggttctaattgcaaccgtcgctttcgccgccattttcactgtcccggggcaatatgcagacgaattgagttcgctcttaccaggacaatctctcggagaagcgaacatcgcggatagacccgcgtttgcgatcttcttcatattcgattcaatcgctctttttatatctttagcggttgtggtggttcagacttcagtggttgcgattgaacacaaggcaaagaagaatatgatggctgtgataaacaagttgatgtggttagcttgcgttttgatatctgtggcatttttggcgttagcgtttgtggtggttggtgaagaagagcggtggctagcggttggcgtgacggtgtttggtgcaacgataatgctcacgacgcttgggaccatgtgttattgggtcattatgcatcgaatcgaggcttcgaatgttagaaagtcgagaaaagagtcgatggcaagatcgagacaatcaggtttattggaattttctgggattttaactaagagaatgtatgctatttag

SEQ ID NO: 166552 - DNA, 1293 bp, Arabidopsis thaliana landsberg
gagtttcgtgcgaagatattgaaagattatgagacatcgcacagatctcgcaatctatacttacaaccaaaaagattcatcatgggaatcagccatcttcgagcaccacacgaccttcgagaccttagccatttagccgcaactcaagaccactatgattgacgatcttgatgctttttctaaaggaaaagacttcttcaagagcgtgggacgcgcttggaaacgtggatatcttctttacggtccaccaggtactggaaagtcctctatggtggctgctatagctaatcacatgaactgcaatatctatgatctccagattcagagcgttaaagatgatgctgagttgcggagggttctcaccgccaccaataacagatcaattcttctcattgaagacattgattgtggtactgattcgtctcgtagacgccagaccaaaaatgaagaagatgatgaggtcaaaaagaaaaaaaaaaagcctgaccttggggtaagttgaaattgttagagtaatagataaatattaatcttctatatcttcttatttaaatctctagtgtatattctctagatcctcccttgtaatctatatatagagatttctctattcatcaataacatacaattttaccaatcttacagaaatgattcctctgtttctaattttattaacctctctgtttttgaacctaatgaatcttctttcttgtggacagatatctttgtctggtctattgaactttgtagacggtctttggtcgagctgtggagaagaaagaatcataattttcacaaccaatcacaaggagaagctcgacccggcattgctaaggcccggaagaatggatgttcacatttcatggactattgcactccattgtcttgaagaagcttgtggctatgtacctcaaaattgatgaccatgtcctgtttgatcccattgagaagcttgtccttgaggtgagtgtaactcctgctgaagtcgcgcagcagctcatggtgagtaagaacactgatattgcgctcaaaggtctcatcgaattcatcgaaaaaaagaagatagagaaggaagaagttaccaaagttgaggaagagggtgagattgaagatgctgagactaacgaataaaagatgctcaaccattagtagctctttggtgccataaatatcttcaagacttcattagaagtaactttatatttcagttttactacaaattgttgctgaaacgacatgttggttgtctatgaagagaaggctacgacatgttggttcacagtagaacaatat

SEQ ID NO: 166553 - DNA, 1734 bp, Arabidopsis thaliana landsberg; identical to SEQ ID NO: 4774

SEQ ID NO: 166554 - DNA, 2223 bp, Arabidopsis thaliana landsberg
atggcaaatggagccggcaatggtggtggtggagctggtggcaatggtggtggtggaaacaacggagcaggaaaccgggcggaggagttacaaccccacccagtgaaagaacaactccctggaattcaatattgtgtcaacagtcctcctccttggcgtatgtttttttatttataaatgaaccttattttctatttaatatttttgagtgttaatggattactttgatgtgtttgcagttgaagcggtagtgttaggtttccagcattatttgttgagtcttggtattacagttctcattccgagtctattagttccactcatgggaggtggtgatgtaagtacatatatgattctttgatatatattttcaaataactttttaaagatctgattgtaacaaattttgtaaattattaacatatcatacataattattaacatatctcaatacacacaatatatgatcttctagcttttgattttttaaatcatggttttgattatttttaaatattatttcagttttgttttgaagttagtagttaattaccatattttcaaatttctggttatcatagtttttcatctacaccaacaaatttgctatataaataaattcatgcaaaacattattttattttaacatataatattcaatatagtagcaataatacagcacatgatttttagattgaattaataaattataataaaaactaatgacagcaaatttatttaaatttctagaaattaaattaaaacactaaatcgtttacatatattttagttttctatacatacattttgatttttctttcctatcaacattttcaggcagaaaaggttaaagtaatacaaacattactatttgtgtctggattaacaacattgttccagtctttctttggaactcgattgcctgtgatcgcttcggcttcttatgcctatatcattcctatcacttccatcatttattccaccagattcacttactacacggatccttttgaagtaagtcttaacgttagtattatcatcaattttacaaactatattgtactaataacaaattgtttgataacataattaatcagaggtttgtgagaacaatgagaagcatacaaggagctctgattatcactggttgttttcaagttcttgtctgtttcctcggtgtatggagaaatattgtgaggttaattacctctttaccaaaaaattacttattactattttgtgtaccgaattatgactctaccgttacacatgaatgtacttttcgtttgtgctgtttagatttctaagccctctgtcgattgctcctttggtaacatttaccggattgggactctaccacattggtttccctttggtatgtatatgtatatacactaattttggccattaacatttttaattttttaattgattattaagtaattatatagatttataatatgataaaaaaatttcttttgttcagttagcaagatgtgttgaagttggacttccagggttaatcctactggtttttatcactcaagtaaagatctaaccgttgtttcttacttttcttttgttttagatccatacacatgattataaaaacattaatttagtcaacgcgaactatatttggttacatgtacattttacatgtcactttttgattttaattttacatcaattttttttgttaagaatgtttttgttttgtgcttggctttggtatttacaattaacaaagtctttttttttttctttttcctgttgggtgtagtacttaccgcgttttctgaaggtgaagaaaggaccgatgatttgggatggaaatagatgtgacccttatggaatgatgttatgcattccagtggtatggttgttcgctcagctactcacatcgagtggtgtttatgaccacaagcctcaaactactcaaaccagttgtcgtacagatcgtactggtctaatcaccaacactccttggttagttcttctatttgaaatgtttttttctttttccaagtggagatatttcactatttttattattatatttatatgaatactaggatatacataccataccttttcaatgggggagtccaactttcgacatcactgattcttttgcgatgatggctgcatcttttgtcactctctttgaggttaaactttattctttacatgaaactgatggaaaataatatttagcatact

SEQ ID NO: 166555 - DNA, 1205 bp, Arabidopsis thaliana landsberg
  unsure (1)..(1205): unsure at all n locations
atgtcgcctctgtcttctcttcctcccaaaacatttatctcctccttccattgccactcagtgactcgcctaagaaggtccgtcactgctcgaaccatgagctctcagtctagtcaacgcgtcttccagctcagacaagaccctctcaccggaaattccgaatggattgtcattgaagacaatgaccaacccggaacttccactgacggcctactcgcgacgacgtcgtatctcgacatgctcaatgattctcgccgtaacatagcttatcgtctcgctatcgagaaaaccatcactgaaccttgccacgtcctggacattgggttcgtcnnnnnnnnnnnnnnnnnnnnnnaacttgattcaattcttggtttaaacactcagattttgataaaggagaatgtggaatttgtgtgtatagtgctggaactgggttgctatcaatgatggctgtgagagcaatgagaggtgattcaaaaggaatggtgacggcgtgtgagtcttacttaccgatggttaagcttatgaggaaggttatgcataagaatggaatgactaagaacattaaccttatcaacaaacgatccgatgaactcaaagttggatcagaagacattgcttcacgagctgacgttcttgtgagtatacaaagatctatactttgtagttaatttttcagaaggaaataaccataagtgtgtctctcttcttcattaggttagtgaaatattggactctgagttacttggtgaaggtctaatcccaagtttacaacacgctcatgacatgttgctggttgataatcccaaaacagtgccatatcgagctactacttattgccaggttcgttatttagtctaatagaattttggtcattctttagcttgattgaattcattctcacattgtttccctttgctctgtctttacaatattttcaagcttgttgaaagcacattcttatgtaacttgcaagatctacgaaataacgaggctaaaacatccgatggtgttcgtctagttcctcctggattagagagtctatttggtatcaagtcacaacagtatagcatgcatgttgatgctattgagaaagagatcaaactggtactagtatcctgaacttctccctacagttttgcaatgagctttagtttataaactcaattcatatattcatccagttgtcagagcccgtcgaaatt

SEQ ID NO: 166556 - DNA, 2456 bp, Arabidopsis thaliana landsberg
agacccaattgttgacgcaggagatgctgcaggggagtggcttgttcgagggaatagacgtcacggcaaatctctatggactgagcctgattcagatgcttgcgatgattttgatatggcaaggattatcagtctagctgatgcaggaacgccgtcattgagttccgacattgatggaagatgcgaagaagatatctttgccaactactctgaggatgaggctgttctgagggagatagaggccttagaaagagctgcagcggaaaaggcttgggttaaaggcaaagggaaaatgccattaacagatgtagactttacagggagcgaagacagagctttccacagtgaaagccttgatggctatacctcagggtataatgtattggatgattcattgtctgttgatgacgacgttgaggactcacaattctgggctgatgtgtaccaaagagcgaatcctgagtttgatgtttctagtgggagggacgaagtactaggaactccagaacctgaaattcaagttgcagacagtgacgtaatcccagaggaaactggttgtcaaggtggcggtgttggagaggacattagtcaactgttcttgcgtaccggccttttccaatgcagcttgacaacatttatgatgatgatgagattggaacttgtccaacaactgatgcggacccatgttttgacgatgagttgaacttaaccacaactgaagtagctgcgactgtgtcatcttctgaagatgctatctacagaggacgagtcttcagggataaattgcatatgcaaacaacgttagcaatttatgcaattcgcaggctcttccattttatacaaacaaggtctgacaagaagcgactaatatgtgttgtgtcgacagaggctgtgcttggcgtgtatatggccatgttgttgccaacggatccaagaactttgaagtcagaactgccactttaactcatacatgctctgttacatcaagggcacaatatggtaagcaagctacagctaaggtgattgctgaagtcttaaaagggaaatattctaatggagcggcagagccacgggccatggacgtccccgacattgtattgtctgagctaaaagtgtttgtgacgtacatgaaggcatggtatgcgcgtgaggctgctatgatcaagagtagaggcagtgaagagaccagctacaaactgttggctgtctacatgcatttgcttgagcagggcaatcctggaactgtctataagctgcatcatattcagaaagcatttggcgttcaacaattcaagtaccttttctttgcacttggggcttctattcttggtataaagcacatgcgaaaagtgattcttgttgatggaactgctatcaaggcaagatttaaaggtgtccttttggctgcaagtatgcaagatgcgaatttgcaggtatatcctattttgtttggtattgtagacgctgagaacgagccggcttggacttggttcttccaacaacttagtcagattttgccggatgcggaggatttggttctggttacagatagacataggtctatttacgcagctgttggtcagatttatcctaaagcgtttcatggttgttgtgctgtgcatctagaaaggaacgtaaaggttaggtgggcaagatatggaatcccgggactagtgcgcaaagcggcacgagctttcaatgtcgggcagtttaaagcacattataatgaaattagggctcaaagtgggagctgctttcagtatttggaagccattcctaaagaacattggacgcaagcatactgtcccgcaaaaaggtataacattatgagcagcaatattgcggaggcgttgaatgctgctcttgcaaaaattctggaacttccacttgtgacaatggttgacgggataagaggtaagctgatgaggtggttttgtttaaggcgtgccaaagcagcgactctgaaagatccaataactccaaatgcaaacaagatgctattggagcacaatgttcactttgctggcttggctgtcattcaagtgtcctagtggtcctaccaagttgctgtctcagatgatttgtcatactatgttgatctggaagcaaaaacctgcacctgtttgcagtttcagaagctgcttatgccgtgctgtcatgcacttgctgctgcgaggatcaataatgttcatatactaactcttgttggtattgagtataggtcagaactctttgcgaaacaatatgaagcaatgatctacccggtcccaaatcaagctgatgaagaagtccctgccgctgtagaagagactcagttagtaccgccggatgtgaaacgtgcaccaggacgccgccggacaagaagaattccgtctgctggagaaaacgttgtggtaagcattggttggacctttgagcttgtttggtaatggtagtgccgatgtgtaactaaaatt

SEQ ID NO: 166557 - DNA, 453 bp, Arabidopsis thaliana landsberg
gcgactttcaattggtatcggagcctggtacttcattagagcctaaccgctcgaagtgatgtcgggagctcacgccaagaaggagatgctgaccggagacaagcccgccacaagccacggaaggctccatcgggggagtccggcaacaagaagagggaggaatcacctccccgcgtcaagtcgcaccggagtggcgacaagaagaagaaaatgaagaaagtggtctactacgagaccgattcttcgtcgccttccacctccggatccgacacgtcgtccatcacttccaaacgcactcctttactttccgtcccactaggcaaaccaccggtttttgacggtgaagattattgtatgtggagtgataaaatgaggcaccatctaacctcactccacgctagcatttgggacattgttgaatttggagcgcaggaacgatcgatgggggatgaa

SEQ ID NO: 166558 - DNA, 570 bp, Arabidopsis thaliana landsberg; identical to SEQ ID NO: 13695
  unsure (1)..(570): unsure at all n locations

SEQ ID NO: 166559 - DNA, 2168 bp, Arabidopsis thaliana landsberg
  unsure (1)..(2168): unsure at all n locations
agtaacgtcatgagcttgacgtcataccggtacgtaaataccaaactcnagtaatctcgtacaaattttttaattttttggtaatataaattttgtacggctcaactcttaattaagaatgaaacagtatctatgatcttctagatgctctttttttgtctgcaagctttaattgtagtaacatcagcgatatatatatcacatgcatgtgtattattgatgataatatataatgttttagttacaaatttgattctcaaggtaaaactcacacgccataaccagtataaaactccaaaaaatacgttttgtttagaaatacatatccttcattaacagtagttatgctataatttgtgattataaataactccggagtttgttcacaatactaaatttcaggaaaaggtgaaatgatgacttgctctccaaagttaaaccctgaattgttctatggagttttaggaggtttgggtcaattcggtattataacgagggccaggattgcgttggatcatgcacccacaagggtatgtatcatctatagtgtaatcaatttataattttaatgtagtggtcctaaatccaaaatttgatttgatttggttggaacgtacgtatatataacaagtcaaaaggctgagtttgaagatgaatttatatatttttgttgaattaactctgatattgcttacgttttattagattctgcgtaataaatcctaggacttgctcgagtgtaatcttgtcttatgcttgcaaatcttgttgatgtcaatatctaatcttttttattatatttccctacgtaagttttagatatagttatattaaactgctataaattgtgtacgtatagactttagataaaagttatggtcgcttggacctatatgtctatcgctatagtgattaaagttctatatatgattcttggtttttctttatgaaaaaatagaccatacaatctaaagaagatgatcttaaatggactaatttatggatataaattgatatacaattctgcaggtgaaatggtctcgcatactctacagtgacttctcggcttttaaaagagaccaagagcgtttaatatcaatgaccaatgatcttggagttgactttttggaaggtcaacttatgatgtcaaacggcttcgtagacacctctttcttcccactctccgatcaaacaagagtcgcatctcttgtgaatgaccaccggatcatatatgttctcgaagtagccaagtattatgacagaaccacccttcccattattgaccaggtactaaaatccattcatgatgattatcttcacacaatcagtatcatcaccaattaccatcatcacttgtcatatatgatccaaagtaaataaatcacatgatataaataaatcgttcaaatctttttgtttaaagaataaaagaatcattttcaagcattactcatacacatctacgaatcaccgtgaccatatataaccatacgctccaaaataaaggatttattgttgtaggtgattgacaccgtaagacaacctctgggttcgcttcaggggttaatgttgcgaccaagaggttccggatttcgaatttcttgaaccgtgtccgaaacgaagaagataaactcagatcgttaggactatgggaagttcctcatccatggcttaacatctttgtcccggggtctcgaatccaagattttcatgatggtgttattaatggccttcttctaaaccaaacctcaacttctggtgttactctcttctatcccacaaaccgaaacaagtaagtatttactttttgatatatttctagttgaaattatatcccattaatgtatgttaaattgttaacaagattttattttattaatagatggaacaatcgcatgtcaacgatgacatcggacgaagatgttttttatgtgatcggattactgcnnnnnnnnnnnnnnnnnnnaaattggcaagaacttgaaaatctcaacgacaaggttattcagttttgtgagaactcgggaattaagattaaggaatatttgatgcactatacaagaaaagaagattgggttaaacattttggaccaaaatgggatgattttttgagaaagaaaattatgtttgatcccaaaagactattgtctccaggacaagacatattt

SEQ ID NO: 166560 - DNA, 7379 bp, Arabidopsis thaliana landsberg
  unsure (1)..(7379): unsure at all n locations
atgaagaacaagaacatattcgtacaatttgactatgggtactattcagaaaaccatgattgattttcaaacaattctttaagtggtgtgttgttgaagacgtcaaagataacatactcattgttagtagaaaacatatgcaagaagattggaatagatgaaacctcaaggaaattgaacttgagttacattctatgcacatctaagagagagatatctattgtagatgatgatgactttttagggtatctaatggtagtgaatgctaagggaataagacaagctttgcatgtggaggtagtaaataaagaatgtacttattgagcatgtggatagccagatggatagggaaaaagataatggtgtggttggtagaattgagaattatgatctttcatgtgctgctagtgaaagaagtgagagtagtgagaaaattcagagtgttacggaatgggaagatggaacggggattgaactacaccaagaatttttttctaaggagacggtgcaagatttggtttacagagctgcaaataagtattgttttgcgaccgcaactataaaattggatctaaagcgactcatgatctgatgccgacaatctacaacaactgcttgtaaatggtatttacgatgtgcaaaagtaacgagctcaaattgtttcagtgttagagttcacaggaagatgcatacaatcaagcggtctgataagaattcaagcgattgttaacatatcggcacaccacggttagccgcgtctcttttgcatgagaattatccaggtgagtttcaaactccaccacctaaaagcataatgagtattgttcggggaagagtgggtttgcattgttcgtatgctaccgcatggagaggaaaaagacaacacattagtgacgtgcggggtagtcctgaaaaaaactacaccgacttgtactcttatttatacatgttaaaggaggtgaatctcgggacaatatcatatgtggaagtggatgcacaacaaaagtttaagtacgtattcgttgctttgggtgcttccattgaaaggtttaaagttatgaggaaagttgttattgtggatgccactttttttaagaccgtatacgacggtatattagttttcgcaatagcccaagatcctaatcatgacaattatatcattgcgtttgcagtaattgatagggagaacgatgctagttggtcgttgttttttaacaagctaaaatccgttatgcggatgaaccaggtttggtttttgtgagtgatagacatcaaagcatcatcaagtcagttatgcaggtgtttccaaagtacgtattcgttgctttgggtgcttccattgaaaggtttaaagttatgaggaaagttgttattgtggatgccacttttcttaagaccgtatacgacggtatattagttttcgcaatagcccaagatcctaatcatgacaattatatcattgcgtttgcagtaattgatagggagaacgatgctagttggtcgttgttttttaacaagctgaaatccgttatgcggatgaaccaggtttggtttttgtgagtgatagacatcaaagcatcatcaagtcagttatgcaggtgtttccaaacgcgagacatggccattgtgttnnnnnnnnnnnnnnnnnngttaaagtaagggtgaaaaatgagaaggaagaagtcgcggttaaattccttgcatgcgcacatgtttatactcaatttgagttaacgagagagtatgctcaatttaggagaggatttcctaatgtcggttcgtatttggatgaatgggctcaggtggaaaattgggcaaggtgttattttgaaggggagaagtataacatagacacgagcaatgcgtgtgaatcattgaacagtacgtttgggcgttgaaggaaatacttccttttacctttgcttgatgcaatttattttgttgacttgctaaggaaaacttgttattgccgacgttttgatgtcaacaagtatctgtgtgtacatgcgattgccgctgcccaaaactttgtggggaccgaatcgatattagatagtctcgaaatggaagacctaacttcgcgttattaccatatgattacgtggaaattggcatagctcattaccatttatccagtcccgcaatcatcagtttagtaagggtgaaaaatgagaaggaagaaatgatttagtaaaaaaagaaaatatttagtaaaaaagaaaaccgacgtcttcgcgggactcttttctccgatacgtgattttctccgatttcgtcgtcggcgacttgagcttcgatttcgccggcgatttgagctccgatttcaccggcgaattagcttccgaggacgccatagcttccaagccgataatctgctcccaaagttagcttcctcctcaccgacaaaagtaaatccgatatttttttgatttgtagattaatgtgaatttcttggttgagttagttgttaataacataaattttttgtattgttcgttatgggctgttgtatcgttttgaatcggagagttcaatcgaaattattgatttgagaaatctagaattgacgaactggaacaaatggtaaaactgagacataatagtacagggggtacaaatgttttattgagataaattatgacaattggtataaatggtatcaatgagatataatataggtacaattatgtctcaatctgaataattacgtaattatgttttaataatttatttgtaattacatgaggcgatgaagaacaagaacatattcgtacaatttgactatgggtactattcagaaaaccatgattgattttcaaacaattctttaagtggtgtgttgttgaagacgtcaaagataacatactcattgttagtagaaaacatatgcaagaagattggaatagatgaaacctcaaggaaattgaacttgagttacattttatgcacatctaagagagagatatctattgtagatgatgatgactttttagggtatctaatggtagtgaatgctaagggaataagaccagctttgcatgtggaggtagtaaataaagaatgtacttattgagcatgtggatagccagatggatagggaaaaagataatggtgtggttggtagaattgagtattatgatctttcatgtgctgctagtgaagaaagtgagagtagtgagaaaattcagagtgttacggaatgggaagatggaacggggattgaactacaccaagaatttttttctaaggaggcggtgcaagatttggtttacagagctgcaaataagtattgttttgcgaccgcaactataaaattggatctaaagcgactcatgttacgatgccgacaatctacaacaactgcttgtaaatggtatttacgatgtgcaaaagtaacgagctaaaattgtttcagtgttagagttcacaggaagatgcatacaatcaagaagtctgataagaatttaagcgattgttaacataccggcacaccacggttagccgcgtctcttttgcatgagaattatccaggtgagtttcaaactccaccacctaaaagcataatgagtattgttcggggaagagtgggtttgcattgttcgtatgctaccgcatggagaggaaaaaaacaacacattagtgacgtgcggggtagtcctgaaaaaaactacaccgacttgtactcttatttatacatgttaaaggaggtgaatctcgggacaatatcatatgtggaagtggatgcacaacaaaagtttaagtacgtattcgttgctttgggtgcttccattgaaaggtttaaagttatgaggaaagttgttattgtggatgccactttttttaagaccgtatacgacggtatattagttttcgcaatagcccaagatcctaatcatgacaattatatcattgcgtttgcagtaattgatagggagaacgatgctagttggtcgttgttttttaacaagctaaaatccgttatgcggatgaaccaggttttgtttttgtgagtgatagacatcaaagcatcatcaagtcagttatgcaggtgtttccaaacgcgagacatggccattgtgtttggcatttgtttcaaaacgttaaagtaagggtgaaaaatgagaaggaagaagtcgcggttaaattccttgcatgcgcacatgtttatactcaatttgagttaacgagagagtatgctcaatttaggagaggatttcctaatgtcggttcgtatttggatgaatgggctcaggtggaaaattgggcaaggtgttattttgaaggggagaagtataacatagacacgagcaatgcgtgtgaatcactgaacagtacgtttgggcgttgaaggaaatacttccttttacctttgcttgatgcaatttattttgttgacttgctaaggaaaacttgttattgccgacgttttgatgtcaacaagtatctgtgtgtacatgcgattgccgctgcccaaaactttgtggggaccgaatcgatattagatagtctcgaaatggaagacctaacttcgcgttattaccatatgattacgtggaaattggcatagctcattaccatttatccagtcccgcaatcatcagtttagtaagggtgaaaaatgagaaggaagaaatgatttagtaaaaaaagaaaatatttagtaaaaaagaaaaccgacgtcttcgcgggactcttttctccgatacgtgattttctccgatttcgtcgtcggcgacttgagcttcgatttcgccggcgatttgagctccgatttcaccggcgaattagcttccgagggcgccgtagcttccaagccgataatctgctcccaaagttagcttcctcctcaccgacaaaagtaaatccgatatttttttgatttgtagattaatgtgaatttcttggttgagttagttgttaataacataaattttttgtattgttcgttatgggctgttgtatcgttttgaatcggagagttcaatcgaaattattgatttgagaaatctagaattgacgaactggaacaaatggtaaaactgagacataatagtacagggggtacaaatgttttattgagataaattatgacaattggtataaatggtatcaatgagatataatataggtacaattatgtctcaatctgaataattacgtaattatgttttaataatttatttgtaattatatgaggcgatgaagaacaagaacacattcatacaatttgactatgggtactattcagaaaaccatgattgattttcaaacaattctttaagtggtgtgttgttgaagacgtcaaagataacatactcattgttagtagaaaacatatgcaagaagattggaatagatgaaacctcaaggaagttgaacttgagttacattctatgcacatctaagagagagatatctattgtagatgatgatgactttttagggtatctaatggtagtgaatgctaagggaataagaccagctttgcatgtggaggtagtaaataaagaatgtacttattgagcatgtggatagccggatggatagggaaaaagataatggtgttgatggtagaattgagtactatgagctttcatgtgctgctagtgaaggaagtcagagtagtgagaaaagtcagagtgttacggaatgggaagatggaatgggaattgaactacaccaagaatttttttctaaggaggcggtgcaagatttggtttacagagctgcaaataagtattgttttgcgaccgcaactataaaattggatctaaagcgactcatgnnnnnnnnnnnnnnnnnnnnnnnnnnnnnnnnnnnntggtatttacgatgtgcaaaagtaacgagctaaaattgtttcagtgttagagttcacaggaagatgcatacaatcaagaagtctgataagaatttaagcgattgttaacataccggcacaccacggttagccgcgtctcttttgcatgagaattatccaggtgagtttcaaactccaccacctaaaagcataatgagtattgttcggggaagagtgggtttgcattgttcgtatgctaccgcatggagaggaaaaagacaacacattagtgacgtgcggggtagtcctgaaaaaaactacactgacttgtactcttatttatacatgttaaaggaggtgaatcccgggacaatatcatatgtggaagtggatgcacaacaaaagttcaagtacttattcgttgctttgggtgcttgcattgaagggttcaaagttatgaggaaagttgttattgtgaatgccacttttcttaagaccgtatacggcggtatgctagttttcgcaacagcccaagatcctaatcatcacaattatatcattgcgtctgctgtaattgatagggagaacgatgctagttggccgtggttctttaacaagctgaaaacagttataccagatgaaccaggtttggtttttgtgagtgatagacatcagagcatcatcaaatcaattatgcatgtgtttccaaacgcgagacatgaccattgtgtttggcatttgtctcaaaacgttaaagtacgagtgaaaactgagaaggtaagaagcggcggctaacttcattgcatgcacacatgtttatactcagtttgagttcacgagagagtatgctcgatttaggagaagatttcctaatgtcggtacgtatttggatcgatgggctcctgtggaaaattgggctaggtgctattttgaaggggataggtataacatagacacgagcaatgcgtgtgaatcattgaacagtacgtttgagcgtgcaaggaaatacttccttttacctttgtttgatgcgataattgagaaaatttcagaatggtttaacaaacataggaaggagtctgttaaatattctgaaacaaggggtcttgtgccagttgtggagaacgaaatacactccttatgcccaattgcgaaaacgatgccggtgaccgagcttaacagcttcgaacgtcaatacaacgtcattggcgaaggtggtatgtcttattctgttgacttgctaaggaaaacttgttcttgccgacgttttgatgttgacaagtacccgtgtgtacatgcgattcccgctgcccgacactttgtggggaccgactggatattacatggtctcaaaatggaagacctaacttcgcattattaccatatgaatacgtggatattggcataccacagaaccatttatccagtcccgcattcatcagtttggattattcctgatgagataagacaattgatagtcttaccgccagataccacaaataaaccggggagaaatcaagaaacctggtttccatcaacaggggaacgtcgtagaaagaggactaacaacaagttttag

SEQ ID NO: 166561 - DNA, 934 bp, Arabidopsis thaliana landsberg
aacattttgatatgcagtatctactgagaagagcttcactaacagctgaagatgcttttgcttttctaaaaactgacaatgatggtgaccacattacattcatgggcttctgtgagactcttcggcaggtatgtagaatctgtaacgcagttaatcatattcctatgactgccttactcagcttaatgtttacagagttttctctttcttaatttcatactctttctctatacagctcaatctaacaggtcattgtaatggactcacgacaaaagagatcaaagatttgtggactcaagctgacattgatggaaacggtcttctagattataaggagtttcaggtaatgtttcttcattagactccccctctctagattacaaggaattgttcatgataaggtagtttttagtagaacttaagagttacaatagctgaacataatcgcccgtgaacatctagacatagaatcgaaaacccttgttcttgttcttgaaactacacacaagtttctcaattgcttatgtaatccattgcagcaaagaatatggaaccaaacctggtcagaacaaagagatgcagaggacggagaagcaaaaggtaaccaagaacaaaccgttggattcagtgtcaaaaacgcagttttgtttcctcctgaagttgaaaaaggaatgtggccagaaaattactctctatcagatcacgcgagactcactgttgtattctcacccataagaatgccttgctctcaattggtttcatgacaaaacacactcaccaaacaaactttagcttcttccatttttaagagacctctgagttttggtgtccccttacagagaaacttcgctctgtctctccattggatcggcttgaccgctctcacgttgcggttcctgcgttgggtgggaagaagagagaaagggggacatag

SEQ ID NO: 166562 - DNA, 666 bp, Arabidopsis thaliana landsberg
atgaatccctttcctaaccaagccaattttattgattctttaacaagtcaacatgaaacctcaaaccgataacccaacccttatgagacacattcaccaagtattaaacttggtgaatctgaattccttgtctttaacacccaatggcatgaatcacatcttcaaggtggaaacacaactactaagcgcacaactactacgaggaacaagtggacaagtaaagaagatatcgtcctcatatctacttggctaaacacaagcaaagattcagtagttgggaatgagcagagagctgatgctttctggaagcgtgttgtagtttattttgcaagtactctgaatgtttctagtcagataaagagagaaccaagccactctaaacaaaggtggggaaaaatcaacaagattgtatgcatgtttggtggatcacatgaagcagcaaacactcagatggcgtctggaatgaatgaggatgttttgatgaagttagccaatgagatttacgagaatgattagggttttaagtttagcttggaacatgcttggagaatattaagacctcatcaaaagtgatgtgcatcactgcctactgaagtagctatcacgagtaagaaaaagaaggctgaggcaaagaaggctgaggaaaatgagtctccatctgttgtg

SEQ ID NO: 166563 - DNA, 1342 bp, Arabidopsis thaliana landsberg
cgcgacgtaacaagtccaatgtgggatttgtggaaaagggagttcaacaggatagattgtcccttttggatggaattggttctactaagcaacctgatgatggtgctgctgctggagataacaaggctgttttgcaatcaaagagcacaaatgtcagtggaggttcgtttgtctctagtgaatgtgaggacaaggatggcgctaaaatgtattgtgatcttgtgaatagggtgaatgatgttacgttgtcttgccaggagtctgtgtcttctacaggtggtcagaaggttgagctttctagtgttgaggatcaaaagagtgctccaaaggctgatggggcagggaactcttcaaatgaaagcagtacgagacattttgatatctttctcgagaagaaggggatagtactcaagcccaaccttctggttctgagcagagaaaaaatgaaagcagctaaagggtacagtggaactgttattagacctggaatggtacttctcaagaactacttgtcaatcaatgatcaagtcctagcacgctatctctcaatctctcccctgtttccctctatatgcgtgtgtctgcctttgtatctgcactcagctgtctcattgtgcctcgtctgttcttcaaattgtgtgtaggtaatgattgtgaacacatgccgtcggctgggtttgggtgaaggtggcttctatcacccaggttgcagggatgaagcaaaattgcatttgaaaatgatgtgccttggcaaaaactgggaccctgaaacatctcgatatggagaaactcgaccatttgatggttctactgcgccaagaattcctgctgaattcaatcagtttgttgagaaagcagttaaagaatcacagtccctagcggcctcaaattcaaagcagacaaagggaggagatgaaataccatttatgttacctgacatctgtattgttaacttctactcatccaccgggagacttggtctccatcaggtcagtatttcaaacaacttcttgatatcatgaagctcaaaggttgtatcatgagtttccaatccttgatgtttcaggacaaagatgagagcgaaaattccatccggaagggattacctgttgtttcattttctattggagattcagccgagttcttgtatggtgatcagagggatgaagacaaggcagaaacgttaaccttggagtctggagatgttctattattcggtggaagatcaagaaaagtcttccatggcgtcagatcaattcgtaaggatactgcccccaaggctcttcttcaggaaacaagtctccgaccaggtcgtctgaatttgacttttaggcagtattag

SEQ ID NO: 166564 - DNA, 533 bp, Arabidopsis thaliana landsberg
  unsure (1)..(533): unsure at all n locations
tcaactattgcatgggctgccacagcgccaagttccaacgctacgagcgggtcgccgatgacttgggcatcccgcacgaactgatgctggaaaagatggtgttcaccggnnnnnnnnnnnnnnnnnnnnnnnnnnnnnnnnnncagccgagcgatgccaagacctggttcggtgcagccccgccggacctgaccctggtggcgcgggtgcgcggcaacgatnnnnnnnnnnnnnnnnnnnnnngcttctacgaggacaagtcgcggccttacggggtgaacaacaaggtcttccccaacgtcggcatgcctaacgtgctggctggcctgcagggcaaccaggtgnnnnnnnnnnnnnnnnnnnnnnnnnnnnnnnnnnnnnnnnnnnnnnnnnnnnnnnnnnnnnnnnnnnnnnnnnnncatgaagcctgtgaccagctgaccctcacgccgaactccggtaccctgaccaccgagcagttcgacgaaaaggtcaagaacctggtgaccttcctggcctattcggccaacccg

SEQ ID NO: 166565 - DNA, 817 bp, Arabidopsis thaliana landsberg; identical to SEQ ID NO: 3382

SEQ ID NO: 166566 - DNA, 2102 bp, Arabidopsis thaliana landsberg; identical to SEQ ID NO: 3549

SEQ ID NO: 166567 - DNA, 568 bp, Arabidopsis thaliana landsberg
  unsure (1)..(568): unsure at all n locations
ctatatattatacaaaatattatttttttanaataaaattgaacataagaaatgattccgaaccatagatctataccaaatttctaatggtttcggttcggttggttcaatatggtttggtttgacaggtggtggcggcggtgcatcacttagcgacttaagtgcggagcagctagctaaaatcaatgtgttgcatgtaaaaattatagacgaagaagagaagatgaccaagaaagtctcaagcctacaagaagacgcagcggatattcccatcgccactgtggcttacgagatggagaatgtcggagagtctaacgtagtggtggatcaagctctcgacaagcaagaagaagctatggctcgtttattggtcgaggccgataatctaagggttgatactttagcgaagatcctcgggattctatctccggtacaaggagcggatttcttgctcgcggggaaaaagcttcatctttcgatgcatgagtggggaactatgagagatcgtcgccgtcgtgactgtatggttgacaccgaaggtaatgccggaggagaggaaggaaagtag

SEQ ID NO: 166568 - DNA, 1031 bp, Arabidopsis thaliana landsberg; identical to SEQ ID NO: 18700

SEQ ID NO: 166569 - DNA, 1345 bp, Arabidopsis thaliana landsberg
atggggaaggagaatgctgtttctggaaactctataccaatccatggtcgccctgtaactcgtgctcttgcctctgctctgcgtgcttcttctaagctgataacatcttctgaagtggctgctacaacacagaaccagggacgggttcttagagcaaagagtaaaagaacagccttggatgagaagaaagccaatgcacctaagaagcgagctgttcttaaggatatcactaatgttacctgcgagaattcttacacaagttgcttcagtgttgcggttgttaactacacaatgcagcattttagaattgctaagtttatatgacaagaagtatgtttttgctgacaattgttgcttcttctttttacttaggtggagaatatcaagcagataaagaagggacgacaaagttcttcttcttccaaggtggcatcttcttcggctacttcacaagttacagatgcaaaggtagaagttgtgtcaaattcagcaggagcaagcttgtctgtttttacagatacaagcttaggcacaaacgaaacatcctatagcattatcgcaaagccaagctccagatcgcctccaagaccctttgggacaggtgaattttataaatggtcatttactgaagcttgagtgggcaatgtataacatttctgatgcatctttattcttgcaaatggtttacagttgagagaagttgtggtggagcaagtagcccgaaattcgttgacattgattcagatgacaaagatcctctactctgtagcctttatgcacctgacatctactacaacctgcgtgttgatgaggtatttatcccttggattttgatatcttacgatgatgcatttgaggcatttgaatccttacgacttgtctacttatcagcttaagcgaagaccatttcctgattttatggagaaaacacaaagagatgtgactgagacaatgcggagaattcttgttgattggcttgtagaggttagttctctacttcccagtttgtttgttgcttacttatgaagtctttttgtgtagcttctcacaactcaaaatttcaggtctcagaggaatacacacttgtacctgacactctttacctcacagtgtatctcatagactggtttctccatggaaactatgtggaaagacagagacttcaattgcttggcatcacttgtatgctcattgcttcgtaagttcctcatccacctaaaatcaaataatgctctggtctgaacacaacatctaaaagagttcttgcaggaagtatgaggaaatccatgcgccacgcattgaggagttctgcttcatcacggataacacttatcaagagatcagg

SEQ ID NO: 166570 - DNA, 971 bp, Arabidopsis thaliana landsberg
gatcctattgtttccggtatcgaggacaagctctcaacatggacatttctcccaaaaggtaactttaacaatctgaatggtttttcaatagtggtctctctgtttcacaatgtcaattgacaaggaaccttaactgttgttgagtttcttgaaagggtttttcagaagatattattgtttcctaagttcttcactttgtggtcacagaaaacggggaagaccttcaggtattgagatatgagcacggtcagaaatatgatgctcactttgactacttccacgacaaagtcaacattgcccgtggtggacaccgcatagcaacggttctcttgtatctgtccaatgtcacaaagggtggagaaactgttttccccgatgcacaggtttgttgtttttcagacaataccaccaatttccgcttacatttccacaattgctaatcttgtattggttctctatatacgtggacaaataggtctttactctttttctgtatgatgaatatttctgcgcaggaattctctcgccgctcgctttctgagaataaagacgatctttctgattgtgcaaagaaaggaatcgctggtgagctatatataaaaggaatcatgacttgttctttccatgttatctctaagaatgtttgtgtttgatattggttggtaatgttattagtgaaaccgaagaaagggaatgctctgttgttcttcaacctccaacaagacgcaatcccagacccctttagccttcacggaggttgtccagtgatcgaaggagagaaatggtcggctactaagtggatccacgtggactcattcgataagatattgacacatgatggtaactgtactgacgtaaacgagagctgtgagagatgggcagtgcttggagaatgtggaaagaatccagagtatatggttggaactccagagatccctgggaattgcagacgtagctgtaaagcttgttaa

SEQ ID NO: 166571 - DNA, 2366 bp, Arabidopsis thaliana landsberg
atggcagctttgatgaacagtactattcatctcgaactttcctctgatgagcagcctttatcggacggggaggaggcattagaaaactctcacatcgttaaattcaagtaattaagttgttatgtaacgcaggggtaaattcaaccttgttctaagtgtttgcttttgtgacaccaagatttaacgagttccccgagtggttatgggtatgtctcgtgagggatctcttgccctcaaacttccactagaaatcagggttacacaaagctctcaaagagattacaagaagaagctcaagagaaggtaaaactcacggcacataccctagaagaaaacctaccttgtgggcttctattaccaaagacccaactcttcttctctttactcttcaaataacgtgaggcccacttatttggcccatagaaaagaagttattagctggtcaaaccctttcaatgagtcataaaccaaaagagagaagacgaaaggacgatgaatagagagaatcgttactacacgttgtgttttcccaagtaattaagcgtttctgatttcccaaaaaaaacataaagcttttcatattcctctacgaaagaaactcgcttataaatctcaaacagagagagtggagtttcatttcttctcaacttcatcaaaaccctattttgcatttctcttacaataatcttactgatggctgattccggttcgcaatgtgtctttgtgaagactagtattgatacccgtttggggctactccttgacagtcatgatagcgtgtcttctttcaaaggtgactcttcataatctcttcccttttttttttttagtttggtaactttttgtagtaactaaactcttaaactcatgtttattgttgtttgtttattttacagacaaattctgcaaagaacacgaactgtgttttccaagtgttggcaacatcactgtttctgccttgatggtaacaacactttctctaacaacacgtttttgttttggaatcaacaacgacaacaacttaaggaaggagtacttgtttttggtttgtaggttaacgtgagtggtaatgattatcacttgtccgattctatgatattgaaaaaagctcttcaaggcctcagtaacgaggacttttttctatccgttgacctcgtacgtgtccaggagaaaagtgagctgcagattggtgaagcagttgagaaaaaaacgaggaagagaaaatcgaaaagtgccaacaatagtagaaagaaaccctccatagagacgccaacggaagcaaaaggtaacctttgttattgaatagtatataggagatctgcaaatgttattgaagagtatcggttgatttaccgttgtgttgttatatctgtttttcttaaggccttgaaagtggtgagggaactgtcactaggttggaagagaatcagaatatttgtgatgtagatcaagaggaacctgtcgatggtcataccattgatgttgaggccaagattgatctttcagggacaatcgaacaaggtaaaatagtttataacaattgttgagtgatgtgttccctcctattagatgttatagactaatatgtatgatttatgtgttcaatagacgacgttcaaaaggaggtagcaaatgcctgatttagtcatgattgaccaagacaatgatcttgaaaaaggtcattctgtttgtatatggtttaagtttctgattcttagttctagaatttagatgttactttggtacactcatcattgtcttagtcaatcatgactaaatcagcatttgctacctccttttgaaggtccattcaacacaaagttaaattaactgatatgcatcgataacatatgttatatactattcaataacagagaaaaaaagtagaggttacctttcgcttctgttggagtctctacggagggtttctttctgatcttgttgtcacttttcgattttctctttctcgttttcttctcaactacttcaccaatctgcagctcacccttctaatcgacacgtacgaggtggacggatagagaaccagtcattgttactgaggcttttgaagagcgttttttaaaatcatacaatccgacaagtgatagtcattaccacccaaattaacctaaactcatatttatcatacaatccgacaagtgataatcagcaccacccaagttaacttaaactggtttttggtttgaatgttagcttgggtggtaatgattatcacttaccaaaaacagtactccttccttaagttgttgttgtcgttgtttccaaaacaaaaacgtgttgttaccttcaaggcataaatagtgatgttgtcaacacttggaaacactgcttatgttctttgcaga

SEQ ID NO: 166572 - DNA, 2787 bp, Arabidopsis thaliana landsberg
cgtctacgtgtacgatctccccaaagagttcaacatcggtctcctccaaaattgccgacacttaaacatctacaccaacatgtgccctcacgtggccaacaatggccttggacagcctcttcaccgcggacgaacttcgtggttctctacgcaccagttcatagccgagatgatcttccacgcacgtgtcgaaaaccatccatgccgcacgtatgagccagacactgccgacatcttctacgtccctttctacggtggtctctacgcttcaagcgtgttccgagagcaaaacctgaccaagcgcgacgagctagctgtcagattagtcaactacattagtggccaacgatggtggaagagaagcaacggtcgtgatcatttcttggccatagggaggacagcttgggatttcatgcgctcctccgacactgactttggagctaacatgctcatgcaaatgccacgtgtcatgaacatgtcggtgctgaccgtggagaggcagccttggaatggtgacaatcactttggtataccgtatccttcttattttcatccgtacacgtcagcagaaatggtgacgtggcaggacaagatgaaaaatgtcgagagaccaaacttgtttagttttgtcggtgggccgagaaagggcttggagaaagctgccattagagacgagctgatcaagcaatgcgctgagtcgagccattgtgagcttctcaagtgtgaaaatggagggtccaggttttttacttttatcatgaatttgacaatttcgcaattaagtattatttaatacactcactagtcaccaaaatttcttgattggaggggcccataatcataaactttatttaatttttattgacaactggcacattgggttatactttattgggtagattacattttttgtggttaactctctctcaacttatttgactaagaggtgtaacaacaattcaactaggagacttggttgttgaactatattttaagcgttttgtgtatccttaactaagaggagtaacaataattcaacttattttttgtcttcatcaggaaatattggaaccttgattatttttactcaatgtaggtgtcacaacccaatgacggtattaggagtgtgctaggcacggtttcctacaagcaccggggactcattcacgcgagatcaacattcgatgcgatgttagccggggcataccgtctttttttcaccccacactatgtatacacagtacatgtggtatcttccggacgataaaagaagttactcagtgttcatggacgaaaagaacaacactcatatagaacaagagctcttgaggatctcggagaacgaagtggttcaaatgagagaaatagtcatcgatttgatcccgagactgacttatgcgcacccaaactctactaactatgatttaccagatgcggttgatatagcgttagaggcactagctaagcaagcaagagacaatgttgtggtttcattgtaagacctatagttttgtgctactcagatgtaattaatcccaaagaataaagaattgtagtgttcagacatcaagccaagcaactattgaactatggacattggcaatatgaaacatgcaacttaagacaaatgacagttatagaaacacgcttgtctatggttatgaagtttccctaatgtatttgattctaccactaactttatcaacttgcttctcaacgtctcttatcacatttacgagttacaaaagaacaagagtcttacaatgacaacattgagaatgtgataaagaataacactctcaagactagcaaggtttaaattactctgctctctgaataacagagtggaaatcaagattaacacttttaagactagcaagcttttaccattttctgaagtctttgggtaattttgatcatgaaattccccgtttgaaaaaatcgtcgtttaacagcgacggccatgaatgtcggagattgtaatttctgacggggaagacaaagaaataacttacagtagcacgaagaaatagcccatgactattttattgggctcaagcccaatatagttggaactttaatctgcgcagaacagataagctaaaatttacacgtttaagttaaaagtcacccgaactaataaaatcactcaataacttattggttggaaaaatgtgaaaatttccaaaaaacaaactatttggacgtttttaattttaatacctaatttcttttgattggaataaaaatacttaattatttatggttataatatatttcatatataaattatcagtagaattgaacccgtaacttaacatgggtataacagaattaaatatgaatgattatattaaaccgatcaatttagaaaaatttatgtaatttcagatattttcagccaattcatatattttagataggtgattttatgaattcgtatagtttctgaccaacaaataaataaatataagaagagaatattttgtttattaattgagcatagaatatgtataattttttttttttttttttttttagaatatgtataattgaatggatggtaagcttattttttttttaaaagactttgtttacgttatactccggaatatgtctcctgaagctgaatgtgtgaaagaaaaaactgaggatatagaaaaattatcaattaaaaactacggtcatgtacttattgtttgggactcaatacggtttgtttagggacaagcgtgtgggagatgcagagcatgacagcatgtggatgctcaaattgcacagacgatt

SEQ ID NO: 166573 - DNA, 410 bp, Arabidopsis thaliana landsberg
cggccgagtctcttatgaatcgtccggtgaacctggagcgctctttgcgtttgggcgaccgcattcatgaccacctggtctctgggcacgtcgatgggcgcgcgaaagtggtgtccctggaaaagggcgaaagctggcttgtgattttgtaaatcaaaaattatgctcgtcaattcatgtggcccaaaggcagcgtgaccttcaatggcgtgagtctcacggtgaataacgttgaaggctctcgcgtgagcgtgggattgattcctgaaactctcaaacgcaccaacctgcagtttttaaaacccggtgatggcgtcaacgtggagtacgatctttgggccaaagctttcgttaattaccaggagcagaggctcaaagaaaatcagccagctgaggatcgcttatgaaaa

SEQ ID NO: 166574 - DNA, 609 bp, Arabidopsis thaliana landsberg
tgcgactacctggtggtctgcgacggggggcgcaaccgcgtgcgcgccggcctcgacatcggcctcgaaggccaggccaaggtgttgcagcgctacctggtgcacttccgctccgacgcgcgcgagctgctgcagcgctgggggatcgcctggcactaccgcagcggcctctacggcgggctggtggcccagaacgacgaggacatctggaccctgcactcgcccttcgccttcgcccaggaggggatggacccccgcgcccaagtcgagcgcttcgccgggcgcccgttcgcgttcgaggtcctgctcgccaacccctggaccccgcaccagctgctggccgagcggtacggccaggggcgggtgctgctggccggcgacgccgtgcaccagaacgtggccaccggcggttacggcatgaacaccggcgtcggcgacgcgaccgacctggcctggaagctcgccgcgaccctccagggtttcggcggcccggccctgctctcgtcctacgaggccgagccgcgccccgtggcggcgcgcaacctgacggcgacctggacgcacacccaaaaacgcctggagatcaaggcggtgtcggaggttcatccg

SEQ ID NO: 166575 - DNA, 537 bp, Arabidopsis thaliana landsberg
atggagaacacaagccgcaagagacgtgctgtggaacaaaggaagcgtagtggtggagtcaagaaagcaaatgttgctcctttttcacaaacggcgagagagacacctgagtggcttgtcaatgtgatgacaaacatgaaagaagccaaagacgctaaattgatctttgagaagactctgttcgtgactgatgtaaacccaacacagaaccgtctctcaatgcctttcaacaacttactccgaaacgatttcctgacgtctgtggagtccataatcataaacgaagacatcaacaacaataacaagattggagtgggagcgattctcgtggatcaacggtgtaaaaagtggggtgtgatgttaaagagatgggagatgaagaaggaatcaggtaaaggaagctggagttacaatttgatttgtgggtggaacgacatcgttgaggctaacagattgaaagaaggcgacaacattactctttggtcgtttaggtgctgtggaatcctctgctttgccatggaacagagtagctcttcc

SEQ ID NO: 166576 - DNA, 5080 bp, Arabidopsis thaliana landsberg
  unsure (1)..(5080): unsure at all n locations
cttcaatacatcttcatgctttctccggggcagagggggccggtgactctgatgactatgtctcggccaatgcgtatgtcatctatttagggagaaaccccatctcctggtcctctaagaagcagcgtggtgtctcgcgttcatctacggagtcggagtatcgagcggtggccaacgctgcctctgaaatccgatggctttgctctctcctcacagaattacacattcgattaccacacggtccaaccattttttgtgacaacattggagccacctacttatgtgccaatccagtctttcactcatgcatgaaacacatagctctggattatcactttgttcgcggcatgattcaatcacgagctcttcgaatctcacacgtttccacaaatgatcaactcgctgatgcactcaccaagtctctctctcgtgcacatttcctttcagcccgttccaagattggagttcgtcaactccctccatcttgagggagcgtatagagtatattacacatgaagtcttaaaggacataattgtaattagttaatccctaatcatagggctgtgccttagtatatatatgtacattcctactctaataatattcaatacattcagcatttacttggtatcagagcttcgatatcctaaaacctacttttcttttcattttcttcttttcaaaacctagccgtcaatcatgtctcaagtcaacggcctccccgccactagagacgaagctatcgttctcacccctcagacactctttaacgtcaatacgtcgaatgtcactaagctcacatcgaccaactatttgatgtggagtattcagatccatgccttgcttgatggttatgatctagcaggttatcttgataactctgttgtcatcccaccagaaacaaccaccatcaacagtgttgtctctgccaatccggcgtttactctcaggaaacgacaagacaagttgatcttcagtgctttgatcggagccatctctcctgccgtgcaatctttggtgtcacgagccactaactcgtctcagatctggtccactctcaacaacacctatgccaagccaagttacggccacatcaagcagctccggcaacaaatccagcgtctcacgaagggaaccaaaaccattgacgaatatgtgcaaagtcacaccactcgcttggatnnnnnnnnnnnnnnnnnnnnnnnnnnnnnnnnnnnnnnnnnnnnnnnacacatcctcaagggtctccctgaagaatacaaaactgttgttgatcaaattgaaggaaaggataacacaccgactatcaccgagattcatgaacgactcattaatcatgaatccaagttactctctgctgaggtacctccttcatcctcttttcctatgtcagccaatgcagttcagcaacgtaacttcaacaacaaccgcaatcaaaaccagcacaagaaccgctaccaaggcaacacacacaacaacaacaacaacaccaactcgcagccgtcaacatacaacaagtccgggcaacgtactttcaagccttacttaggcaaatgtcagatttgcagtgttcaaggccatagtgcacgccggtgtcctcaacttcaagcaatgcaacttccaacaagctcctcagcccactcgccattcactccttggcagcccagagccaacctagctatcgggtctccttatgcagctaatccatggcttcttgacagtggcgcaacacaccatatcacctccgacttgaacgcactctctcttcatcagccctacaatggtggtgaagacgttatgattgccgatggtacaggtctcacaattaagcaaactggttccaccttcttgccttctcaaaatcgtgacttaactttacataaagtgttatatgtacccgatatacggaaaaacttaatttcagtatatcgcctatgtaatactaatcaagtctcggtggaattctttcctgcttcgtttcaggtgaaggacctcaacacggggaccctattgctccaagggagaactaaagatgacctctatgagtggccagtgactaatcctccagcgacggctctgttcacaagtcctagtccaaagaccactctctcttcatggcattcacgtttaggccatccatctgcctccattttaaacactttactatctaaattttctcttccagtttctgttgcttcttcaaataaaacttcttgttctgattgccttattaataaaagtcataaactcccttttgcaacctcttcaatacactcttcttcaccacttgaatacattttcactgatgtctggacttctcctataatctctcatgataactataagtattatctagtgcttgttgatcactacactcgatatacttggctttatcctctgcagcaaaaatctcaagtcaaagcaacgttcattgcctttaaagctcttgtggagaaccgttttcaagccaagatacgtacactctattcggacaatggcggagagttcatcgcacttcgagatttcttggtgtccaatggaatctctcatctaacgtctcctccgcatacgcccgaacacaatggcctctccgaacgtaaacaccgccacattgtcgagacgggacttacactacttactcaagcctcagttccaagagaatactggacctatgcgtttgccactgcggtttacttaatcaacagaatgcccacaccggtcctctctcttcagtctccgtttcaaaaattgtttggttcgtcaccaaactatcagcgtcttcgtgtgtttggttgtctctgctttccatggctaagaccctatacgcgtaacaaacttgaagaacggtctaagagatgtgtgtttctcggctactctctcacacaaacggcgtatctttgtcttgatgttgacaacaaccggctttatacctctaggcatgtcatgtttgatgaatcaacatatccttttgctgcatcaacccgtgaacagagccagtcttctcttgtcactccacctgagtcatcctcctcgtcttctcctgcaaattccgggtttccgtgttcggttcttcgcctgcaatcaccacccgcgagttcgccggaaacgccgtctcctccgcagcaacagaacgattcgccggtgtctcctcgtcaaaccggtagtccgacgcggtcacatcactctcaggtacgcgattcaactctatctccttctccctctgtttctaattctgagcccactgctccacctgaaaatgggcctgaacctgaggcccagtccaacccaaactcaccattcataggcccactgcccaatccaaaccctgaaaccaactcatcttcttcgatagaacaacgaccggttgataaatcaactaccactgccttgccaccaaatcaaactaccattgctgccacctctaattcacgatctcaaccaccaaaaagtaatcaccaaatgaaaacacgatccaaaaacaacatcacaaaaccaaaaaccaaaaccagtctcaccgttgctctcaccaaaccacatctctccgaaccaaatactgtgactcaagctctaaaggataagaaatggcgttttgcaatgtccgatgaatttgatgcacaacaacgcaaccacacttgggatttagttcctccaaatccaacgcaacaccttgttggatgtcgatgggtttttaaactcaagtatctacccaatggactcattgacaagtataaagcgcgattagttgctaagggtttcaatcagcagtatggtgtggattacgcggagacgtttagtccggttattaaagcgacaacaatccgagttgttcttgatgttgcggtcaagaaaaattggcccctaaagcagctagatgtaaacaacgcctttctccaaggtactctaaccgaagaagtgtacatggctcaaccgccgggctttgtagacaaagatcgtccttcgcatgtgtgtcgtcttcgtaaagcaatctacggactcaaacaagcgccacgtgcatggtatatggagctgaagcaacatcttttgaacattggtttcgtcaattctctagctgacacatcattgttcatctactcgcatggtactacattactctacttgcttgtatatgttgatgacattattgtcacagggagcgaccataaatcagtttctgcggttctgtcatctcttgcggagcggttctcgattaaagatcccaccgatcttcattatttccttggcatagaagctacaagaacgaacactggccttcacttgatgcaacggaagtatataaccgatcttcttgcaaaacacaacatgcttgacgctaaaccggttgcgactcctcttccgacctccccaaagctgactcttcatggaggtactaagcttaacgatgcgtctgaatatcgatctgttgtaggcagcttgcaatatttagctttcacacgtccagacattgccttcgcggtcaaccgtctatctcaatttatgcaccagcctacatctgatcattggcaagcagcaaaacgagttctacgctaccttgcgggaaccaccacacatggtatcttcctcaattcatcgtctccaatacatcttcatgctttctccgatgcagattgggccggtgactctgatgactatgtctcggccaatgcgtatgtcatctatttagggagaaaccccatctcctggtcctctaagaagcagcgtggtgtctcgcgttcatctacggagtcggagtatcgagcggtggccaacgctgcctctgaaatccgatggctttgctctctcctcacagaattacacattcgattaccacacggtccaaccattttttgtgacaacattggagtcacctacctatgtgccaatccagtctttcactcacgcatgaaacacatagctctggattatcactttgttcgcggcatgattcaatcacgagctctccgaatctcacacgtttccacaaatgatcaactcgctgatgcactcaccaagtctctctctcgtgcacatttcctttcagcccgttccaagattggagttcgtcaactccctccatcttga

SEQ ID NO: 166577 - DNA, 1416 bp, Arabidopsis thaliana landsberg
ggtgacgctgatttcacaaagccgtttgctttagagtataaatgggagaaacgaggctatggagatcttctaatgctagctcatcctcttcatctcaagcttttatcaaccaacgattgttctatcacagttctagacaatttcaaatacaacagcatcgacggtgatttagtaggtgtcatcggagattcatgggttttaaaaccagaccctgtttctgttacgtggcactctatcaaaggagttcaagaagattctcaccaagagatcatctctgctctaatcaaagacgttaacgctttagattcatcagctgaggtcaccaactcttcgtatttctacgcgaaattgatcgcgagggcggcgaggttagctttaatagctgaagaagtttgttatctcgatgtgattccaaagattagaacttacttgaagaacatgatcgagccgtggcttaatggaagtttcggaccaaatggtttcttgtatgatccaaaatggggaggtgtgattactaagctaggatctagagattcaggagcagattttgggtttgggatttacaatgatcatcattatcatttaggttactttgtttatgcgattgctgtgcttgcaaagattgatcctttatgggggaagagatacagacctcaagcgtatactttaatggcggattacttgacgttggggaagaaaggagccaagtcgaattcgaattacccgcgtttgagatgctttgatcttttcaagcttcattcttgggctggagggttaacggagttcgctgacgggaggaatcaagagagtacaagcgaggctgtcaatgcgtattactccgctgctttgttggggctagcttatggggatacacatttggtggcggctgcttcgatggttctgacgctggagattcacgcggcgaaaatgtggtggcaggtgaaagaagacgacgctatttacccgcaagatttcacatcggagaatcgtgtggttggagtgttatggtcaacaaagagagacagtggcttatggttcgcgcctaaagagtggaaagaatgtcgccttgggatacagttattaccgttacttccggtatcagaagttctgttctcggacgtgacattcgtgaaacagctcgtgaattggacaatgcctgctttggctagagacagcgtcggagaagggtggaaaggatttgtgtatgctttggaaagtatgtacgacaaagatggagcgatgcagaagattaaaggattaaatgggtttgatgatgggaactctttaagtaatctgttgtggtgggttcatagtagaaagaatgatgatgatgattatgaagaagacgatgaaggtggttatggtggtcatgacggtggcgggaagtattgttcctttggtcattattgtcattaa

SEQ ID NO: 166578 - DNA, 1794 bp, Arabidopsis thaliana landsberg
atggatttacaaagaactttgatgttctcttgttgggttctgtctcttttgatcatcaaaacgacagcgtataacgagaaacagctgttccagccgcttgaaacggaaaacgcaaacgcgatgaccgcggttatggagcgaggattaaagacgcagcggcggccggagcacaagaacgcttatgcgacgatgatgtacatgggaacaccaagagactacgagttctacgttgcgacacgtgtcttgatcagatcgcttaagagtctccacgtggacgctgatatcgtcgttatagcctccctcgacgttcctatcaactggattcacgctctgtaagcgtctcatcatcttctttttcttcttctctctttacatcgtcaaaacgccaccgtttaattggttagaaaattctgaagtcttttttttttcttttcttctttgaatcaaggaaataacattattttgtagaatagtttttctaacctcatttggattatacaaattaatatatactatgtttttttaatttagagtaaagagaacatggaagagcagtaatgcgggaacgagcatgaaattaatttttaaatttttcaaaattttattttttggctctttagttaaagaaaaaaagacttattaaaattgagaatgtccagaacaagacagtctttggtcgcagacgtgtttccacgacctttttttggagtgtgcttgtcttttttttcgtctattgttgatataaaatatctcagccataaataaaaaaatcacaataggattttctttcgaacatagaagcttacttataaaatgatttatttcttcttttgtcagtattatttcatattcatgttacctttttcattttcatattcaaacttacatgagttaggtggaaatttggtgtttctcttttgtgtagtggaaagtgagaatttaagagattggatgtgtaaaaataaataaatatattagtgggattgcttgttgattttattataaagagaaagaaaatataatgttgttagaaagagtaatttggctgtcagataccttattatagtaactaaaaagtctcagaccttttctttgttttggtaaaaggaatgaattataattaaattttaaaaaatattttgaaagtttcagtatacataatattttattgctgcattttatacataatgcaaaaaaaatctgttttgatcttattataattcattaatgaggtatgtagggaagaagaagatggagctaaagtagcgagagtagagaatcttgagaatccatacaagaaacaaaccaacttcgacaacagattcaagcttagtctaaacaagctctacgcttggtctctttctgattatgaccgtgttgtaatgcttgacgtcgacaatctctttctcaagaacaccgacgagctcttccagtgtggccaattttgtgctgtcttcatcaacccttgcatcttccacactggtctctttgtgttgcagccatcaatggaggtctttagagacatgcttcatgagcttgaagtaaagagagataaccctgatggagctgatcaaggctttcttgtcagctacttctctgatttactcaatcagcctctctttcgtcctcctcccgataaccgcaccgcgcttaagggacattttaggcttcctttgggatatcaaatggacgcatcttattactgtaagtggctactatactctgcatttcaacaaccacaaaacattttgctaatctttttgtgtgttactatctttattagaccttaagctc

SEQ ID NO: 166579 - DNA, 1559 bp, Arabidopsis thaliana landsberg
  unsure (1)..(1559): unsure at all n locations
atgatcgtgacgaaggttggagttactctgaagctacatgcaggggagcttcggctaaatggcggaaaaaggaannnnnnnnnnnnnnnnnnnnnnnnctagtcctcatagaattgtctataagttaataataaatgtaaagggcatgggtgtaattttacatgggctgtgtcctgtgcctataaataggtgaacagtatcttcgtactgttcacgctgactaggcatttgctttcgcgtcacgcttgtacccttgctttccttcgagccgaagtacatttgtaatttgttactgttaatacagtaacacaaataagaataaattgataataatgtttaaagcgtttatgttatttttttatatcttacatatgaattcttcttcatcatttattgtgcttatgaaggtttgtccttcataaccttcgtccaaaaatcattatatccgaagggagataatgcttcaaaggacgaagaactttaacatttaacactttttatgttgccttgttnnnnnnnnnnnnnnnnnnnnaacaagtctccaacattggcgcccacctccggtgaactcacttccacttttgagtttcgaacactttcggcaagcatagaccttcgtcatgccgccaaagaaagcttcagcaacaggggttgccgctctgcagccgctggaccccaaccaggagactctctctctctgaaaggccagaagccaaaagaggaaggccaccagtccaacacttcaggaggaggagttggacaggagatcagggacctagaaattattcaccagcaggtgcaaaggaaaaaggagaagatcgcttagctggccgaccttcagaagaagatcgatgaagctactgaggaagtgcgtcatcttactcaagatgatcacgaccgaagccccaacaccgggagctttgttaagagggctcattcaacgaagatgaatggtacgatgattttaatcatggtacctttgcttttgatgatgcttctcctctggcagcagaattgcaggctatcccatggccacaatcctacaagccacctcaactccccatgtacgacggacattcagatccgaagcagttcctgatgagctacgaagcaacaatatcttcctatggtgcaatactgcagtcatggcgaagtctttcgttatggctgtcaagaacgttgcacaaacctggtactcctcccttcggccaggaacaatcacatcatggcagaagctgaaggatatgctgatcaccagtttccaagggtttcaaacgaagccggtcaccgctcaagccttatttcagtgcaccgaagatcacgaagaatatcttcagacgtatgtccgaaggttcttacgcctgagggcacaagcgccaacagtgcccaatgaaattgtcattgaggccatgattaaagggcttcggccgggaccttcagcccaatactttgccaggaaaccccctcagactctagagaaattgcttcataagatggatgaatacatccgcgctgacaatgactttcgacagagaagggaggaagcttacagattctcc

SEQ ID NO: 166580 - DNA, 1452 bp, Arabidopsis thaliana landsberg
atggctaatatagtttggtgtaacattgccatgttcttgttggtctcgttgtttctcactgacgatgctgttgttgttcttgatgccttggacaacgtttccaatatcaagaaccaaccttaccgaaccggttatcatttccagcctcccaaaaattggatgaacggtatgatgacgttataccggattcattaattcagtttcacttggttatctttttattcctttctctataatttgtgcacattgtcaaatcttttcactcattttgtttgtttgtttatgttggggcttcgtttcaatgctacaagatcctaacggtaagttattattgctctctcgtttgttttataaattacgtataagtaagcatggatataacatataagtaatatgtatgtttatgtacataaaattggacagggcctatgatatacaaaggaatctatcatctattctatcaatggaaccaaaacggcgccgtcatggacgttaacaaaaccgtatggggccatgcaacatcaacggatctaatcaactggatcacactttctccagcaatcagaccatctcgaccgtccgatattaacggatgctggtccggctccgtcacgattctccctaatggcaaacctgtaattctttacaccggcaacgaccgttataaccgccaggtccaaaacttagttaaacctaaaaacctcaccgatccatatctacggcactggaccaaatcgccggaaaatcccctcgtgacacctagccccgtcaaccacatcaactccagcgcgtttcgtgatccaaccaccgcgtggtttggccgtgacgggagttggcgcataaccaccggaagccaagaaggtcgacgtggattagcgattctacacacgagcaaagatttcgtaagatggaagcaatctccaaagcctcttcattaccacgacggtaccggaatgtgggagtgccctgattttttcccggtggctagaactgattcacggggcctagatacgtctttttcaagtgggccgatggttaaacacgtccttaaagtgagcttaacagatacgtttaatgattactacacgattggtacgtacgacgaagtgagagatgtctacgtaccggacaagggttttgttcaggacgaaacggctccgagatatgattacggcaaattttatgcgtcgaaaacattttacgactctgttaatcagcgcaggattttgtggggttgggttaacgagtcgtcaccggagaaagataacatcaagaagggttgggccggtttacaggtaactacaccggttgagagtttaacattttgcctaattacacagatttagatgtcgttaaccgattttggtgttgatttaggctattcctaggaaagtatggcttgatgaatcaagaaagagattggtgcaatgccggttaaggaaatagagaggt

SEQ ID NO: 166581 - DNA, 1206 bp, Arabidopsis thaliana landsberg; identical to SEQ ID NO: 27691

SEQ ID NO: 166582 - DNA, 381 bp, Arabidopsis thaliana landsberg
atcaagaatatcagacgcattacgtacttggccaaattattgtcgcgcaatggcgtcaacgtgcttgtatcggcgattacgccgtatagcgaaataagggaattcgcccggaatgagcttccgggttatgtgaaaatctatgtgaaatgcccgcttcaggtatgcgaatccagagatgtcaaaggattgtacgccaaagcccgcaagggcgagctgacggctttcacgggaatatccgatccgtacgaggaaccggaaaacccaggaattacactatgcacatcgactgcgtctctggaggaaaacggagcggccgtcctcgattggatggaacgccattcgcctctgccgaagtccgcggtgcgggaggaacgggtctga

SEQ ID NO: 166583 - DNA, 5045 bp, Arabidopsis thaliana landsberg
  unsure (1)..(5045): unsure at all n locations
atggctgggaataaagctaacgacgaagtcccgaggaagcagcatggtccagggaaggagaagcgggtattaagagtttccccgcggagaaaacgctctgcgacaaaggcaacggaggaactgggttagaatctctaatttaccgtttgttgtctttgggtgtatcagaattgtaaagcttgtttgattaaagggttagaatttgtcggaatttagcatatctttaggatgaaaaattgagaagtagaattggaaatctctgtttccgccaaaaatatgattttgagttataatctggaaaatgtctgtgtacgtacactacttctgtttgctcaacagtatatgacttttaattgcaggtagtccaagtgttgctccgactgaagatcttacagttgaagagttaccaccaagactctttgctctagaccggtacccttccgannnnnnnnnnnnnnnnnnnnnnaaaccggagtacatttctgacatagcaaaagtactaaaggggaaatcagagatgcagttccttctcgattctccatttggggaactttttaaaatacccaaaaacaaggcatctttcaatgctaagcttgtccttggactaatatgccgtcagttagtgacaaagaaggtgaatgagatgtggattgtattcggcggtcatccaatcagatttggattaagagaatttagtatcctaactgggctggaatgtgggaagtatcccaagaagaaagacgttgatgatgttatcagtgtgaaacctgagtgtgagagtgtttggaagactctgtttgatgagaggtttggggacacggttccaacaattgctgatttggtgagctggctgcaggaggaggaaagcatggaggggtggaagcaactggcactatctcttattattttggtagacggtgtggtagcggcccacagtaaccccaacagggctacttcgaagactgtcgagatgacgaagaacctggagttcttctgcaaatacccatggggaagggtgtcctttacccgtactttggggaggatagcaaaattccaaactccttacgatgctcaacaactaataaggggtttactggtagggtcttatgcactacatggcttcccattagctcttcatcttttagctttcgaaacaatcccatcaattgctaagctaggacctgatgatgtacctaacaggacatttgctgagaggtctatccatcgtcttgcctcactgcgggcaatccggacatctcgttttttggagtgtgaggctgctgatgaggtgtgttaaattgtgtatgtacgtacataataagtaaatgtacattatctatggttaacatacttatttgtgtaggttgaggtcaactatattgtgaaaccagctgataatgtttgtcctccatctctttcatgggatgatgaagttgatgatccaagggttgattacattgaggcactgttgatagatgggcaccagtggcaggaggatgaatgggttggaggctatgctagagtaccaaagcagtcgcgcccaccacacctagaagagacaggtaagtataagtataaaggttttttacaaatttttttggtattacacccagaagaaaaccaattaatagcagcaactggtctattgtagatgttaagaggaaacgaaatgcaccgggcccgagccctaaagaacctgctatgaaaaaacagaaatctgaaaatggactgtgataaagaagagaacgctgaggattgttttggagagcctgtgcctgagaggtttattgttgaaatgaggaggtctttcaaggagctggaagaccaaatgtatcaaatgcatgaagatatgaaagactttgtccgtgaccagatacgtgctgcccttgatccaaaaggcaaaaggacagaacaaaccataccttcccatgattcgcgggaaccacctacttctatggataaggcaccggttactacgaagaagccatcgagaaggatgtctacaaaaggaagcactggaacgagaaagtcttcaaggctgactcgtgtttctcatgatgtggacactcctgcactttctgttggctgtaattccaaagaggaagatttggatgtccctggagtacataccactgctttcggcggaagaagaaaaccttcaaagccgaagaaaaatgtttcttttgctgttgacactattgaggaacctgattccaataaggaagatatgcaaggattcattgatgaacaggtaagtcatgtacgtacattgctaaatattttataatccatatgtataactgtactgtctggttcgatacaggatggcgctaataatgaaagtgattttactgcaaatgatggattgaattcttctgccgctgaagaagagatattagacactggatttttaatagttccttatgctggatccacacaatcccatctggtatgtcgtctactaatactcttaacaatctgtttaaatggtgtacgtacatattcgcttaagaagttagttaaactatgtttcaggatagaggaaatgttgttgttggtaagactgtcttcttaggttcaatgtctgggactgtctttgtaacacaggaagagaggcctgtggaagaagctactgttgacaccgagatggaagaagttccatctaatgtgtctgcaatagtttcagaggtagatcttctggtaatcgttatatacagatttccatgactatatgcatatatattacattaatttctccacttatctaacgcttaactctatggtagcctatgtttcaggataatggaccaaaggatgttgccgaacctggcttagttggtacccatacaggggccgatgaaatagctgatgctgacatagagatggtagacaatccatcaggtttaccttcaacatctgcacacgtatgtgttagtcacttgttctttttccatatgtgtacgcccataagactttgcaaattatttttgtttcagaaagaagcaagagatgcttgtgctacgactgaagctaatggcagcgagtccgaagaaacttatgagccttctgatggagatacagctcacatacctggcacaagtgtacgtacatttttgtcactatggtctgtgtacatatatattgtttcaaacattactaaaaagttgctttcctttgataaattctacaggttgaggcggcaagagaatccaaattagtgacagggatggaagttgaaatacctgagaagacccacattgatcccccgtcaccatttcaagtagttaacaatgtaagccaactcttgctgaaaataaaatgtactattaactgttcaaatgtataaaatttatattatgcaggtcacacgagagttggataccaaagtcgttggtgatttgggtgcagctactgatgtggaggtaacaatttgtgtgtttcaattcctattctcggaatagcatacataggattatatgtgtacattatatagacttgtgtacgttaacttgcatagatagtgatggaagagctgggtattgtcgaggggtctgtaggaactgaggatcctaacccagggtcagatgaagcagacaagaccgctattcctaaaaataatgtatgtacctattttaaacatagaaaaacgtataaaactgttgttgacaatcatatttgttaacaggatgaatcagacaatgttgctgctgtcgaagcaaaagaagaaaaaaaagcatccccaaaggtcccaaaaaaagtgaagaagcaacttgtctatgaacaggatgatgcccatcctgatggttttaaggcaaaaacagttttggtgcccgatgtaccaactcaacagacagaggttgttatcagggctggaaatgtctcatacaaccccctggacatggttgacccttcaaaagtagaggaattcagcaatatcattaaaggaccctctatgtaagtacattatattaaaatggattatttaatatctcaatcatcatttttccaagtcttaaggttgttatcaaatatttttctggatttacaggattcacactctttttcgggtttcgcaaagtgcccaacgagttttttgcgaaccttctaacacctggtgaatgggtcgaaagttcggtacgttgcatttatatacgtacattccttgttataaattgtacatagatgattaaatttttcgtggaagtgtacgtacactgatatattttttgaacatttcagcatttagaaatgatggcaatgttgatgtgtcacaagaacggggaacagatgatagcaaacagatgtattgtattggacatgatgctgacgcatctacttaccaagcgggtgggcgacttcaagaagtgtattaataagaacgggttcaaatggggtaaattactgtccgacattgctaatggagttcacataaaccgtgaacccaatatgaagtggctgaaggatgtcgatgttgtgtatgatccgatgaactggaaggctgaacattgggttactttgggaatcaaccttaatgaacggctaataactgtgtatgacgctttaatatcgcacacgcgcgagtcggctgtgaaggcgagaatgactcctatttgcgaaatgatgccgtacttagtcagagcgatgtgccaggatgtattgatttctccgtactcagttgaaccttttgagtatgtgcgttgtcctaccgttgctcaaaacccaactacaggagattgcgggccttacacgatgaagttcttggagttgcttgcgtttggacaccctttttcggaattgacaaccattcgagaagcagatatggtcttctaccgtcagaaatactcggttgacatctacgagcacggcaagcgtgaggccggtactatgcaatttctttaatcgtccaagaacaatattctgattctttgcaactaattattttgaacaaacctatctttgatatatgattgcaactacatttaatttggagattgtcagaagttaatttagtttcctcgatcactctcttgtcgtacacatcgttc

SEQ ID NO: 166584 - DNA, 701 bp, Arabidopsis thaliana landsberg
ttttcggtttggatctatatttaaggtcaacaatgtgggaacgtgtatagtcaaaccgaccttacaacatacagccgaagatttctcatttacaatggcaacgaatctcgagtcagcttttcatctctcgcagctcgcgcatcctttgttgaaagcttctggttcagggagcatcgtgctcatctcctccgtatctggagttgtacatgtcaatggtgcatccatatatggagtatctaaaggtaaatctatacgtatgtatattcaaacgattaatgatgcatcacgttctgatttttacgaaatgtaagtgtattttaggagccttgaatcaactggcaagagatttggcgtgtgaatgggccagtgacaacataagggctaactctgtagctccttgggtcactgcaacttctcttgtccaaaaagtaaactaaaaatctttttttctgttcataattttttttttttcgtttttaacctaaatcttggtttgaatgtggacttaccagtatcttgaagacgagatatttgcggaagctatgttctcaagaaccccattaggacgtgcatgtgagccacgtgaggttgcgtcgctggtgacatttctctgtctccctgcagcttcttatataacaggacaaaccatttgtattgatggtggtttcactgttaatggattctcctataagccataggct

SEQ ID NO: 166585 - DNA, 3999 bp, Arabidopsis thaliana landsberg
atggtcaacattcaaatccccggtaacacagttgacgtagagggaaacccgatccctccaaaccaaacagacgttcctgaagccaccgctcctgcggtcctagcagaattgaggagcatgatggctcaacttcagaagaaagtaaaagatcaagaacaggcaaatcggtctttggcgcaacaactcgaagcagctacctcccaaggacagatcaagactactcgtttcggcgcaaggcatcttcacgatcgacgaacagcagcagatctcagtccaacatggctcctgttacacacacctggcaacacgatgaggcctatccgccgaaccgcaccggaaactggaagagatcgagccgagccggcaatcttgggaaatcgagacacgaatcgaacagaaggaaacgatccgcagctccctcctccccgagcacaaaatgtcgaggccaatcagatcggggtctcggacgatgaagattcagaagagaacgttcgatgggctgaggaatatgataggaacaagaaataaacgccatcaaactctccctaaccaaggaaaaaaccgagatgaagcttgttcgatcgcagctgcatagcgcagtctcctcggctctaaacatcgatcgcattctagaagagtcccacaacacacctttcactcgtaagatctccaacgcaataattttagacccgaggaagctcaatatcgagtacttcaatgggttgtccgacacaaaggggcatttaaagtcatttataatctctatggcccgagccaagttcaagccagaggagagggacgctggtctctatcatgtattgtcgagcacctgaaggggccggccttggattagttctcaaaacttgaagggaattctgttgacagtttccaagagctgtcaacgcttttcctcaagcaatactcagtgttgattgatccaggcacatcagacgctgacctttgatcgctatcttagcagccaaatgatccactcaaaggattcctcacgaagtttaggttcaccctagccaaggtcgagggaatcaacgacgtcgcagagctctctcccttgaagaaggcattgtggtacaagttagaatttcgaaaagaattaaatctgtcaaaaccacaaacgatccgagacgccatgcaccgagcctcggattatgtttcccatgatgaggaaatgaaactgctatcaaaaaggcacgagccgccgaagcaaatgcctcgtggcgaaaaatcccaacctagcgctccgaaccacaaaaaaggcgctcaaggcggaacgttcgtacaccatgaaggacgaaacttctgcggagcccacaattatcaagctgatacacctcgaggacgaggacaccgtcgaggtcgcagacaagaatcctacacctggaaaaaggaccaacccgcgggaaacgagcaggaatactgcaaattacataaaagcaatggccatcatacttccagatgtcgtagcctcagagcaaggttgtcagcaaaattcctagccggagagatcggtggaggtttgaccatcgaagacttagaagcggaaaaaggaaaaaccgagcaggtcaacgctgtggccaatcccgagcaggcagcccccgcggcgaattccgaaggacccaaaagaggccgaggtaatcgcgaagcagacgacgataagccagaagctgctcggggaagaatcttcacaattttaggggattcggctttctgtcaagacacggcggcatcaatcaaggcttatcaaagaaaggccgacgcgaatcataactaggcgcggccatttaatgggccaaatgacgaagtaacctttcacgaaagcgataccaacgatttagaccgtccgcacaacgatcctttagtcattacactgaccatcggtgatttcaacgtcgaacgagtcctagtcgacacgggaagcacactggacatcattttccttacaactctgcgagaaatgaagatcgacatgacgcaaatcgtgccaactccacgaccagtgctcggattctctggggaaaccactatgactctcgggaccatcaaattaccagtccaagccaaaggggtaacaaaaatcgtcgatttctctgttaccgaccagccgaccgtgtacaacgcaattatcggcacaccatggttaaatcaattccgagctttcgcctccacgtatcatctctgcctgaaatttcccacaagcgacagcgtgaaaaccatctggggaaatcagaaaaatgctcgcatctgcttcatggcagcacacaagctcaggaaccccgtcactgaatcgacggctgacgcgaatcataagaaagccaagcttggccgagctgaagagaagtcaatctccgagcagttataacagctaaggatcgaggaggctcgggaatctgcaacaccaactcccgatccggtattcttaatctgccttgacgacgaaaagcccgagcgatgcgtagaaatcggcggagatctgggagaagaactaacagctgaactcacagctttccttaaagaaaacgttagtacattcgcctggtccccagaagatctgcctggagtaagtgttgacgtcgtatcacatgagctcaacatcgatccaactttcaaacccatcaagcagaaaaggagaaaattgggtcgggagcgagcagaagccgtgaaagccgaggtagagaaattattgaggatcggatccatcaccgaggcgaaatatcccgattggattgcaaacccggtcgtagtaaaaaagaaaaacggcaaatggagagtctgcgtagatttcacagaccttaacaaagcttgcccaaaagacagcttcccattaccacacatcgatcgcctcgtggaatcaacttctggaaacaagctactgtcattcatggacgctttcgccggttacaaccagatcatcatgaaccccgaagatcaagaaaaaaccgctttttacatagaacaaggcattttttgttaccgagtgatgcctttcggactcaagaacgccagggcaacctatcaacgcttcgtcaacaaaatcttcgcattatagatcgggaagacaaatggaagtctacatcgacgacatgttagtgaaatctatggcagagaaagatcacataccccatttacgcgaatgtttcaggcagcttaacatctacaacgtcaaactcaatcttgtaaagtgccgcttcggagtaagatccggcgagttccttgggtacctagtcacgcaccacggcatcaaggcaaatccaaagcaaatcgaggcattgttgggaatggcgtcacctcagaacaagagagaagtgcagcccctaaccggaagagttgcggccttcaaccgtttcatctctcgatcgacagacaaatgcttagccttttacgatgtgcttcggggaagcaaaaagttcgagtggacaatcctatgtgaagaagcttttcagaaactcaaaaagtgcctagcaacaccgcccatcctcgccaaacccgtaatcggagagccattgtatttgtatatggccgtatcagatactgcagtcagcggagtgttagtccgagaagacaggagcgaccagaagccgattttctacgtctcacagactttcaccggcgcggagtctcgctatccgcaaatggagaaacttgctttagcggttgtaatgtcggctcggaagctacgaccctattttcaatcacattccatcgtggtaatgggatccatgccactctgcgccatcttacacagtccaaaccaatcaggacgtctagctaagtgggcaatcgagctcagcgagtacgacatcgagtatcggaacaaaacatgtgcaaaatcacaggtcctagctgattttatcgtcgagatacccaccaaggaggctcggaaaaacccgctcgacacaacttggctcctacatccagacggctcgtcatcaaaacaaggctcgaaagtaggaaaccgcctcacttcgccaacgggtgatgccc

SEQ ID NO: 166586 - DNA, 374 bp, Arabidopsis thaliana landsberg
ctgttcataggcgaagatcaaccccacctgctgctggtgggcgactacgccactttcagccgtgtaatggcgcgggccattagccgctgcggcctgcgcgtattggtctccgggtccgccgaggaaggcctggccctggccaaggaagacctgcccgactactctgtgcgcgacctgaaaaagacgtcagactccggctctggtgcttctgctccaagctgctggagctgtactcggagatgcgcttggtgttcctcaccggctactccagcatagcccccgcggtctaggccatcaagcccggcgcccccagctacctgtgctcaccggcagaaaccaacgacgtgctggccgctatgctctcgcagcacccc

SEQ ID NO: 166587 - DNA, 1162 bp, Arabidopsis thaliana landsberg
atcgatcaccaatagatcaaaagagaaacagaggaacagaaagaatagaaggagtgggaagtgtatgaggaacctgtgtccgaacatagacaaagacgatggtctggagacggtgttggaagttccgataccggaggagatgttttccggtatgggcaacaacgttgcacttaggtggcaaaatatgatgacgtggatgaaagctcaaacgtctgataaatggtcgcaaccgcttatcgccgctcgtatcaacgagctccggttccttctctacctcgttggctcgcctcttatacctctccaggttcaagtcggtcactctgttcataagcccgtcaaagattgctccattgtaagtcattcaaaatcaatccttatgaaaacataacgaagatgttgaaaatatgattcctcttttttttttttttttttttcttttatgatcaaaacccaaaaaagtcattaccctgcttcgtaagtattcaacataaagttgttaatccatgtgttgtactctgcaagtctgcattacattattcatcgtacacagagtcatcaacttcagtttcattgtttttttgcttatgaattacgattgcagcaagcttcaacggcgaaatacattgtacagcagtacatagcagcgacgggaggaccacaggcgttaaacgccgtgaacagcatgtgcgtcacgggacaagtgaagatgacggcgtcggagtttcatcaaggagatgattcgggcgttaatctaaagagcaacgacgaaatgggtggtttcgttttatggcaaaaggatccagatctttggtgtttggagctcgtcgtctccggttgcaaagtgatatgtggaagcaacggtcggctttcatggcgacattcctctaaccagcaaactccggcgtctaccggaacgccaagacctctccgccggtttttacaggtaccaatccggttattgattttttttgatgtaatgtccggttctcaaaatgttgaaccggtggtttatttattgtttgaccaggggttagatcatcgctcgacggcgaatctgtttcttgacgcaacgtgtatcggagagaagataatcaacggtggggattgctgggtcttgccactgaaaaccagccacacggtcccatagctcgtagcggtccga

SEQ ID NO: 166588 - DNA, 4327 bp, Arabidopsis thaliana landsberg
atgaataccgagtggtgctagaatcgcagctgtttatcagaggaagtcagatgatatcagtccatcgattgctttctgtaagaggaatggtcttgagagaagctcgtttagaattggtgaaccacaagatgctccggaatcatgtgtcaatctgaaatggaattctgcatcagatcttcttgcaggggttgttagttgtagagcatatgatgccattagggtgtggttctttagcaacagcctctggtacctgaaacaggagattaggtatccaagggaagctggggtaacagtcatgtgggatccaccatagccactgcagttaatatgttggactctgtcagggcaggtgtctgttcgccactttatgtgggtaacagcgatcatggaggactcaacagcctttgtcatagataactccaagatactcgtgacaccactatctttgtccttgatgccacctcctatgtatttgttcagccttagtttttcttctgctgtcagacatatagcatcttactcaaggacttctaagaattgtctggctgtgtttttgtcagatggaaacctgtcttttgttgagttccctgcacctaatacttgggaagatctcgaaggcaaagacttcagtgtggaaatttcagactgtaaaacagcactgggctcttttgtacatcttctatggttggatgtccactcacttctgtgtgtctccgcttatggttctagccacaacaagtgtctctcttcgggagggtatgacacagagcttcatggttcttatttacaagaagttgaagtagtctgtcatgaggatcatgttcctgatcaagtgacttgctctggctttaaggctagcattactttccagacacttctcgaatcaccggtcctggctcttgcctggaatcctagtaagcgtgattcagcctttgtggagtttgagggtgggaaagtgcttggatatgcgtcaaggtcagaacttatggaaactcgtagtagtgatgatagtgtatgttttccatcgacttgtccttgggtgagggtggcacaggttgatgctagtggggtgcataaacccttgatatgtgggcttgatgatatgggtagactgtccatcaacgggaagaacctatgtaataactgtagcagtttctcattttattcagagttggccaatgaagtagttacccatctgattattttgaccaaacaggattttctctttattgtcgataccaaggatgtactgaagggagatgtggcacttggaaatgtgttctttgttattgatggtagaaggcgagatgaggaaaatatgagctatgttaatatttgggaaagaggtgcaaaagtgataggagtcctcaatggagatgaagctgctgtgatattacaaactatgcgggggaatctcgaatgcatatatcccagaaagctggtcctctcttccattacgaatgcgttagctcagcaacggttcaaagatgcatttaacttggtaaggcgtcatagaatcgactttaatgttatcgtggatctatatgggtggcaggcatttctacagtcagccgtagcatttgttgagcaagtaaacaatttgaaccatgttacagaatttgtttgtgccatgaagaatgaagatgttacagaaacgctgtacaaaaagttttccttttccaaaaagggagacgaggtttttcgtgtgaaagatagttgcagtaacaaagtatcatcagttctacaggcaattaggaaggcccttgaagaacatatcccagaaagtccatcaagggaactctgtattttgaccactcttgcccgaagtgatccaccagctatcgaagaatctcttttgaggataaaatctgttcgtgaaatggagttgctaaactcttctgatgatataaggaaaaagtcttgtccatctgcagaagaagccttgaaacatcttctgtggttattggattctgaggctgtctttgaagctgccttaggtctttatgatctgaaccttgcagctattgtggcactcaattcccagcgtgatccaaaagaatttttaccttatctccaggagctggaaaaaatgcccgaatccctgatgcatttcaagattgacattaaattgcagcgttttgatagtgctcttaggaacattgtatcagcaggggttggctactttcctgattgcatgaacttaataaagaaaaaccctcaacttttcccgctgggcctcctgctaattactgatcctgagaagaaactagttgttctagaggcttgggcagatcacctcattgatgaaaaacgttttgaggatgctgctactacgtacctatgttgctgtaaactggaaaaggcttcaaaggcatatcgtgaatgtggtgactggagtggggtactccgagtgggggcgctaatgaaattaggtaaagatgagatcttgaaattggcatatgaactctgtgaagaggtcaatgctcttgggaaaccagcggaagcagcaaaaatagcgcttgagtattgcagcgatataagcggtggaattagtttgcttatcaatgcgagggaatgggaagaggctttaagggttgcatttttgcatacagcagatgatagaatctcagtggtgaaaagttctgctttggagtgtgctagtggtctagtcagtgcattcagagaatcgatagacaaggtaggatttatctccactcgctatgtaactctccgacatagggtgtcactgcttcaaccacaaattcatcgagttacgacacttggagaaaataataccacaaaactcactctcgggtcgtcaccctaaagcgtgctctcggatcgtcacccgaaaccaccgtacccctcgtactctaaagacaccatgtccctcgagttaccggtacatcaggagcataccccgctcctcatgagtcgttgggaccctcatgtccctcgagcaaacaatactaaacgcttccgaccatatctccagactctctcatggattcgagtaagacacctttttgcctcaccatccatcatatcccctcgagaacatccttatgaccaactcccggccatctcgtaaacacacctctctcttaggttgtttactcaaactttccaaaaatagacaagtcctttctaggaaactttcaatttttggaaaccgcacaacacattcttaaataagacaactcaagttaaattttagaaaaaaaaatactcatcttattaatcatcaaatgtcatgatcgttacaactccaaacgaaaatacaaatgaaagagaaataagaacaacaactcaaaagctcaaaaactcaacatcactgaaactggaaaccaaggataggcaaactcatgcagtaacctgcttctcgaaccacttctcgaaccttgccttcatcctcgcctctggctcccaagtctcctctctcacaccatcgcagtcccacaggactttgatcaaaggaatcttctttcgccgaagttccttaactctttgcaactcaatgtagttaacagtggcaacaaatttgagcagatttagtgtggttacatattgacaatgggcacaaaccattttatgtggattagggatccttcacttgttttttttctctatcatctttacgttgttaaaatattttgttatcaattttttggaggtttggttgtagtcgattaatttggtttagaatcatctttaggtggttttgtttgggtgcatatggtggtacggtgttttacgatacctctcagctctcgcaaaaaaaaaattgtcaacccttacaaataacacggaataaccttatctaaaaaacttgccaaactacctcaatagcaaaagtaaacaatactccaaaataactctgcaataaatacaaataaatgttttaccaaaatagctaagtagaaaaataaacaacatgtcaaaataactactcactagcaaaagtaaacaacactataaaatcactcactagccaaaaataattaacatgccaagaatataaattaaattaagattgagtcaataacaacacgtaaccaccttccatatatataaatatattttcattaaaatacttaaagacacaaagttccatcaaatgtgttgacttcaaaatttgtatgttattttgttgacaaaaataagattcaaacttatggatttaataagaaaaatcatgaaattctaataaatgagggtaaaaacatgggactcatttgttgttcttaaacaatataaaaagagattcatgcaaactatacatatccatccaaacaacataaatcatatttctgtttctgagaggttt

SEQ ID NO: 166589 - DNA, 957 bp, Arabidopsis thaliana landsberg
ttcctgtttttatacttttctggcattgtttgttttaaatagggaatggctacagttgcagcaagggcaacatgattaccaatatattcatcttttgccaaagaaggaaatcttagtgacatttttgcaaaaggagaagctatctctactcttttcaatgttgccgggataggtgctggtattcaacttgcgtccacaatatgttcatcaatggagggaaaggtaatgtcattctgctacatcgttactctctatttcaaaatgcagtttctatttgtttggattgcaactcgattatgaaaaggctgatatctgcagttggtggttgggtcaattctttcggatgtacatgtgtatagcgttgtagaacaaatgcgaggggtaccaatcaacacactgaatccacagcgaaccgctttgattgtggctaattttctcaaggtaattagcatcatcttttgttcaatttttctgtaaaccatcttgttgatttcttttaattacataagaggtgttgttgtatcttctcagactggtaaagtcccaagccctcctgatttaagattccaagaagacctaatgttccccgagagaccaatccaagacgcaggaaatgtaaaagtgggaagggctctccataaagctgtgaagccttctgaggtacaaagactaaaacaagtgtttgtagaagagaagtttctattgagtcatggaaagtcatggaccgatatggtcttagagcacgatgcaaccggtgaagatgcattgcgagggtggttagttgcagcatatgtcaagtcaatgacaaagatatataatgaccctgaggacgttatattgcaaaacgcgtatcacataatgaactatgtcttcaatccatttttatctcaagtgcaagataaaggatggtattctgatagatttctcaatggcccgggcacaagatttgtttggtag

SEQ ID NO: 166590 - DNA, 502 bp, Arabidopsis thaliana landsberg
agatcaagggagtcgcggcaattgtcaccggcggtgcatcggggcttggcggcgcgaccgccgcacgtctggccaaggcaggcgccaaggtcacgatctttgacatgaacgccgagctgggcaagcagaaagcggccgagatcggcgggcatttcgttgccgtcaacgtcaccgatgaggctgcggtcgaagcggcgctcgatgaagccgaaggcgtccacggcaaggcgcgcatccttgtcagctgcgccggcatcggtccgccgggcaaggtcatcagccgggacggcaaggcgctgccgctggccgatttctcgcgcatcgtcacgatcaacctgctcggcagcttcaatgtgctgtcgaagttcgccgcccgtatccacgacgccgaactggtggacgacgagcgcggcatcatcatcaacaccgcgagcgtcgcggcctatagggccagatcggtcagccggcgtacgcggcgtcgaaggccgggaggtcggcttta

SEQ ID NO: 166591 - DNA, 2217 bp, Arabidopsis thaliana landsberg
  unsure (1)..(2217): unsure at all n locations
atgtcaacccctcaaagttcctattcagttcgagatgtccttgagaaggacaaattgaatgaatcaaaccctcctgaatacttggaagatctggagaagaagaaaacattcaagatttcttcttcgggtatctatgttatagaagtaaatgttactaaatctggttctactccttgggtattggatactggttgtggtgctcacatttgtgtaaatgtgcatggcctaaacaacagtagaactttggaggaaggacaagtgaacctacgtgtgtctaatggagcaaaagtctctgcattggccgtgggaacatatccgttgtctttaccttcaggcatggttttggagcttaagaactgctactatgttcctgctataaataagaatatcatctctgtttcatgtttggacatggaaggttttcacttttcgatcaagaacaaatgttgttcatttgatcgagatgatatgttttatggtagcgctccattagagaatgggctctatgttctaaaccaaagcatgccaatctataacattcgtaccaaaagatttaagtctaatgacttgaatccgacttttctctggcattgtcgtttgggccatataaacgagaaacgcattcaaaagcttcatagtgatggacttttgaactcatttgattatgaatcttatgagacatgtgaatcttgtttgttgggaaaaatgactaaagccccgtttactggacacagtgagagagctagtgacttattgggcctaatacatacagatgagtacaagtgctagaggaaactatcagtacttcattacatttactgatgacttcagtagatatggttatgtttatctaatgaaacataaatcggaatcctttgaaaagttcaaggagttccagaatgaagtacaaaatcaacttggcaaatcgatcaaagctctgcgatcagatcgtggaggagaatatttgagccaagtttttagtgattatctcagagagtgtggaattgtttcacagctcactcctccggaaacaccacagtggaatggtgtatctgaaaggaaatcgaactttattggatatggttcgatcaatgatgagtcacacagatcttccaccatccttttggggatatgctctagaaacgtctgcgtttatgctcaacagatgtccatcaaaatcagttgagaagacaccatatgagatatggactggaaaggttcctaatttgtcttttctgaaaatttggggttgtgaagcttatgtcaaacgattgattactgataagcttggacccaaatctgataagtgctacttcgcaggttatccgaaagagaccaaaggttaatacttttaccaccctactgacaacaaagtgtttgttgctcgaaatggtgcctttttggaaagagagtttctttcaaaaggaactagtgggagtaaagtattactcgaagaagttcgagaaccacatggtgacgttccaacttctcaggaagaacatagattggatctacgaagagtcgtagaacctatacatgtggaacctgaggtacgtaggtccgaaaggagccgtcacgaacccgatagattcggagattgggtgatggacgatcatgctctatttatgatagagagtgatgaacctacgtcatacgaagaagcgttgatgggccctgattccgataagtgattagaggccgcgaaatccgaaatggaatccatgtcacaaaataaagtatggactttggttgatttacctgatggtgtaaaatccatagagtgtaaatggatattcaagaagaaaattgacaaggatggtaatatacagatatacaaagctagactggttgcgaaaggttacaatcaagttcatggtattgactattatgaaacctattctccagtcgcaatgcttaagtccattcggattctcctagcaactgctgctcattatgattatgagatttgacaaatggatgtgaaaacagctttccttaatggaaatctcgaagaggatgtgtacatgacacaacctgaagnnnnnnnnnnnnnnnnnnnnnnnnnnnnnnnnnnnnngcttcatcgttctatttatggattgaagcaagcatctcggagttggaatcttcgttttaatgaggcaataaagagtttgatttcattagaacgaagaagattttgtgtttacaagagactagtggagcatagtccatttt

SEQ ID NO: 166592 - DNA, 764 bp, Arabidopsis thaliana landsberg
atgtgtgttaaaattaagatggtggaatgtttgactatgaagttgtcttggtgtttgatctaatggataattccatgggtttaatctatggaaactgatgtaggttttcagtgggaccggtattggttagttgttaactataaaggaagagcatacactcaaagagttgagccaacccttgctcttgttgaatcggagttgcctaaggaagccttcttggaagattgggagccaacaaatgactcattgttgggtaaatttctggcttaactatgagaattgtctctgaatcgagacttcaatttacgttcttgattattcattttgcagtgataagagctcctggtatgagtccgttaaagataccgttgactaggccaagctcggtagcagaaggtgtgtcgatgtgggaatggtctggctctgcttttgatgaaggagaagaagctgcgaaatggttttcagattatcttggaaaacaaagccgtttggttcggtttaataaaggtttcagtttactttcttttgaatcttttgatttgcaacaaatcttaatgcaccgagttgatcaagttatttgtctacagatactgaaactagaccttcacctcctgagtttgcagcgggttactctacaacattcatggatatgtttccgtttttggttgcatctcaggtgagccaatatctatatttccgatatcggttaatgtgaataggcatttccgcatttgatcttctttttgttttgggtggtaggggtc

SEQ ID NO: 166593 - DNA, 756 bp, Arabidopsis thaliana landsberg
aaagatttggtcccataagcacttggagagacatgaagtacctcttaaggttgaggtatgtccctgaccattatcatagatttacaaaaacgttttagaaaattatctcagggaacaaggaccgtagatgagtactttgaggagtttgacaagctcatgaacgtcttggagctagaggaatccaacgaagctctcatggctaaattcatagacggattacaaaggaagattcaacgaaaggtagagagagctcaatataatggactccatgagttgctacacctagcggtacaagtcgagcagcaaataaggcataagacatccttaaacaccccgatccagaacaacacgccttggaatgcaagcaacaaccgagccatggaaaaaggcaaggccgtagagagtgatcctaggttcaagaactagtcgaataaggcacctaaaaccccttggcccgaaccaggtaagttccctagtactaatcaatctcgttctcatgacattacttctttcaaatgttaaggtaggggacacatggcgagagaatgtccgaaccaaagggtgatgatcctcactcctagtggtgactatgagtcacaagatgagtaagaggattctgatgagcatgaggacgttgagtatccagatgtaggagaactccttgtgattcacaggacattgagtgtgtttgttaaccccgaagagaaggtgcaacgagcaaacatcttccacactagatgcaccataaagaacaag

SEQ ID NO: 166594 - DNA, 856 bp, Arabidopsis thaliana landsberg
  unsure (1)..(856): unsure at all n locations
atggttgagtctcgtcctcttccttcaattctcgatttcactaagttattgaatgttattgccaaaatgaagaagtttgatgttgtgatcaatctctgcgaccatctgcagataatgggagtttcacatgatctctatacttgcaatcttttgatgaattgtttctgccaatcgtcacaaccttatcttgcttcttcttttcttgggaagatgatgaaacttggttttgagcctgatattgtcacgtttacttctctgatcaatgggttctgtctcgggaatagaattgaggaggctatgtctatggtgaatcagatggtggagatggggattaaacctgatgttgtaatgtatacaacaatcattgatagtctttgcaaaaacgggcatgtgaattacgcgttgagccttttcgatcaaatggaaaactacgggattagaccggatgttgttatgtacacctctctcgtgaacggtctttgtaactctggtagatggagagatgctgattcattgctgaggggtatgatgaagaggaaaatcaaacctgatgtaatcactttcaatgcattgatcgatgcgtttgtgaaagaaggaaagtttttggatgctgaagaattgtacaatgagatgattcgtatgtctatagctcctaatattttcacctatacttcattgatcaatgggttttgcatggaaggttgtgtagatgaggccagacaaatgttttatttgatggaaaccaagggttgttttccagatgtagtggcttatncttctctcataaacaaatttgaaagtgtaagaaggtagatgatgcgatgaaaatcttctacgagatgtcccaaaaaggatt

SEQ ID NO: 166595 - DNA, 1209 bp, Arabidopsis thaliana landsberg
cgattcgtcagatgaaggtgcaagttcatctacgagaggctgtggtagtctctagaatatactgcaaatagtagtccatttggttcagattgttgcatcattaatagttttaactctggcaaaagatgaacatcaacaagcacttttgttaacatgggtcatcggttacacttgtggctgtattaccattacgctccttattctcctctcgtgtgtccgcaaatacaaccgaattggtgtttactcaaaaacgaggtataataaacaacacttgtttcacttaacattaagagtttaattagctaaatcaaaccgaaccgttgttggtggcagaacggatagggtaatggatgctttgaagatggggaatgaatgtttctttgttgtgtggttagttatggggattctatggatttgttatggacactcatcttcttctgatactcctaagctctacaggtttgactcacaatcatgtcacagtagagatttagttaaaccctaactaatcagtactaacttttgtcttcttgattatgttttggcaggttatgtgtagtcttcattgctttcagttgcattagatttgcatatgcattactattatgcgcaggtatttttttcgattaatgttcactagagtttggaacatttttttctcatatctatgatgtggataagttgaaatcaaatgatgtagattctgtaagggaaggtataggaggtagatttgttttcaagaaaccgagccatgatgatgtgagtaataatttcatatcacattaattactctgttttaaatagcattttttttttgttgttgttgtttaattttcatggtttgatggtgtgtgcagagttgttgcatatgcttggggaaatatggagaggaaaaaggagtaggactaaggaaacttgaatgctcacacgtatttcattcgcaatgtatagacaaatggctgaaaatcaaatccacatgccctctctgtgaatcacaagttaggtggtgatgagatgaggttgatttttttttttttttttttcgctcaagagtaattgtacacattcaataaacaaaagtggtgggaaactgaaagatacgatcctttcttcttgtgttgtctgccttaaaacagaaaataaaaattattcacttatcaactaaaaacataacttcaatacactattattattatattattgtcataa

SEQ ID NO: 166596 - DNA, 975 bp, Arabidopsis thaliana landsberg
aaaaaagtgatcaacaaccatggaatatggagaaagcccccctattaaagaactagaagaagttttctaatgcttcctgatgatttggtattaaactgcttagctcgcatctcaagattacattatccaactctctcattagtctccaaaacatttcgctctcttcttgcttcaacggagctttaccaaacccgaatcctcttaggccgaaccgagagttgtctttacgcgtgcttaacgcagattacatatgacgcttctaacccacaattaatttggttcactctttgccgcaacccaaatagctcaaaaaagattttaatcccaatttcatatcctaaatctgcatcatggtcggatagtgtagtggctgttggtcctaatatctacgctattgggggattcagtaataatagaactaaaccttcgtctagcgtcatggtcatggattgtcgtactcacacatggtgtgaggcccctagcatgcaggtttcccgtgtgttccaatctacttgcgtccttgatgggaaaatatatgtaacaggaggccgcggaactctcgattcaacgaaatggatggaggtttttgatacgaaaacccaaacttgggagtttttgcaattcccgagtgaggagaagatatgcacaggctataagtgtgagagcatagtgtatgaaggaactgtctatgtaaggtcgtattttcataatgtgacttacaagctgcataaaggtagatggatagcggcagacttagcgatgaataatggatggcgttgctcatcatctttttgtgtgataaagaacgtgttctactgttgcaatagaagtgataacggtatgatcgattggtatgactcggaaaaaggatcatggacaactatgaaggggttggaaagattgcctaaagtttatggtaatgttaaattggcatattatggtggaaaaatggtggtggtgtacgtggagtgctaa

SEQ ID NO: 166597 - DNA, 622 bp, Arabidopsis thaliana landsberg
tgctagcatttaagcatgtttcgtatcgtatcaccactacgagcacttgccatcccaaagcaaccgagtgggttactgaggatctacaattccatcgtcgcttccgcagtgaaacacttaaccacagcaatgttgtctatgccaaacgtcgcttctattgccttgacggtcaaggaagcttatattactttgatccgtcttctcgaagatgggattttagttacacctatttactgccatgtccttatatctcggatagatttagttaccagtatgagcggaagaagaagagaattttcttggctgtgcggaaaggagtgttctttaagatatttacatgtgatggtgagaagccgatagtgcataagttagaagatatcaattgggaggagatcaatagtactacgattgatggattgacaatctttacgggtctttattcctctgaggtgagacttaatctaccatggatgaggaatagtgtttactttcctagacttcgttttaatgtcaagcgttgtgtatcatattcgcttgatgaagagaggtattatccgcggaagcagtggcaagaacaggaggatttatgtcctattgagaatctttggattaggccaccgaa

SEQ ID NO: 166598 - DNA, 612 bp, Arabidopsis thaliana landsberg
ttgcaacagtacagaggttgttttggatgctgcaataaaccaccgcttatagttgcagtggatgagccgtctaaagggttaaggattcaaggtcgtttagtgaagaagccaagcgtatcagaggacttctggagcacaagcacctgcgagatggataatagtacacttcagtcacagagaagcatgtcttctattagcttcactaacaatacttctacttctgcaagtacaagcaaccccacagaatttgtaaaccacggtgagttgtaatttccacacattgttgattgttgttgatcctttcttgcattttagttacttgacttgttttctaataagtgaaagatcattccaagctaatgtggttttatttattcaactctgaaagtatctacttatgatgttagcttactcatttggatggtcaacccgcttttaatatatgtagacgggtgttggcttacattattgtttatatttatttcttctcaatcactggaagatctctaattcatgactgactatggataaaatacatttgggggcacatttttttagaatctactatgtattttgtttgtcaacatgaaaatatttcgtctcatgacacgt

SEQ ID NO: 166599 - DNA, 1863 bp, Arabidopsis thaliana landsberg
atggggtatgagaaattcacttgggtgattaagaatttctcatctttgcaatctgagtacattaaatctgatatattcgtgatcggtggctgcaaatggtaagaagaagacaactgttatatttggtgccttttcgtttaattttaggttgaaagaacattctccattgttttaatggttttttaaatgcttgcaggtgtcttttggcctatcccaatggaaaacagaatgctagttatttgtctctgtatctggatggtcctactttaaaaactttgccttgtggatgtcgaaggcgcgtaagattactcctaactgttgtcaatcaactctacctacacctttcctgattagggggataggaatatttatgcttttggacaaaggaaagttcgtattttgtttgtgtttgagttacatcagttttgtctttttatggtctacagaaggaaaacgatggtttgataaaaagcttcctctgtgtgggtatgaagaagtgcttctacttaccgaacttaatgccaaagatggtggatttttggtaaatggacaagtcatgattgttgctgaagtagaatttcttgaagttattggcacactagatgtttctaaggaatctcaagaggtaattaaacctcggaaaaggatgaggctatatggtgatggtggtgcggtgtctagtcatttgcacaaggaaacttcatcagtagatgtcatgggtttcaagttcttccttcacaggtaacatgttaataaagattcaaactttttagatatgtttcgttagagaggaactgatttggataaatactcataactattggcttcaaactcatgagacttaccatttaattctttgttgttgctgattttggattagaggtggtgcttttttgaatttatcagtcgaacactaaaacaattagggaaaaaaatggtatctttattatcaaccattcagtatgtggatatgtatacaactagacgtatgagtttatactttgttcatccttttttacaactataggcggaatctgtgaagcgtatattcgaaagacatccatacatggcattagagttccgagcaaagaaccaacagttgaggacatcatgtataaatgtcctcctcagcctaatcaagacgttgtgccagtcactgcaagatatttccattgatgacctgggccaaacagagcaagtactaacattcctgcaaaattctggatttaaggtggattggctggagcgtaaactggaggaagtaaaggaaaagaagatccaagagcacattggtaagtctcggatgcaaggattagaggaagacctgaaggtcttcaagaagaagtgctctgacatagaagctctactggagaaagagaaggaagaactcaagggattgaagcaaaagtgctcagacacagaagctctgctggagaaagagaagggaaaggtgttggctgctgctgccagaactcctctaacgtttgacgatattctctgatgacttaggttctgtaggtgttatgttcgtttgtatctagttttcgaaattaaagtcctaacttaggaagctagatgctagagagaattctgtcggaattgtaaagagctaatctttttgtaaagatgactcactaggactaggattttgttagttgtctctttcgtgactatgtaaaagtattaataatactgtattatcgctggcaaaggtaaagctactaagtgtacttttcagggatcagctataatcttagcttattaagcaagtcaaaagcttaacttttggtcttaaaccaggttagatcgcatgaatattctcattgggtatcgagaaatgatttcccttaccaaacttaatgc

SEQ ID NO: 166600 - DNA, 740 bp, Arabidopsis thaliana landsberg
tatcaaaaaatcggagctttgcgaataagaacatcgacaaagcagcggtatcaggggaaaaagagtttctgatgatcacacaatttaatgttttttgggtcggcgtcaatctccatagaagtcagaacaacagctttgatctatctattcagcttaaggctaaaattgttagcagagacaaaaaagatgatttattccaaaaatctcaagtcattcactgcaacggtgtatttttatgcgtacgggaaaaaatgcttgtggttttgaacccgtattggggacaaacaaaacggatcatgccaagacctcctttcgggtgcttcgacaggtatgctctcggatacgacaaatccagcggtagccacaaaatcctgaggcttttcggtgtcaaccaaaataacctcaatatctacgatttgagctctagttcatggatgattcctgatggcactcttgaacgagatatggagtatatgaaacaaggcgtgtctttgaatggagatacttactggtatgctaaagataaggaatcaatagactggtacttattatgttttgattttacaagagagagatttggaacacctctgcctctgccctttagtaatgaaggttatactctacacaaaggttataagtctttatctgctcttaaagaagagaagcttgcggtgttactatgggatacaatggttatttgggttacgaacaagattgagcctgatgcggtgacaaggagc

SEQ ID NO: 166601 - DNA, 1590 bp, Arabidopsis thaliana landsberg
atgtcggaggagaaagtcgtcgctgtgatcatggttggtggtccgaccaaaggtataacattctcttttggatctcaaattctattttcaaaacatgaatttttgattttggttttgggtttttgctaatgtggattggtttaagaactcgatttcgcccgttatcgttcaatacaccgaaaccattgattcctttggctggtcaacctatgattcatcatcctatctctgcttgtaaaaaggtttcttctttttactatttcttgcttttgatccctgagaaaagtttggtattgcttgagtcgtgaaagttgtcaactttgaaatgtggattgctcataacttgttttgatttgacatggatcgtttgtctttatgtgggtttgttccattttagtactctacactttggaatattttcttgttgttgcatgatttgtagtgtcaaagttttgaacttttcatagtttcttcaggctcaaaggatgggaaagttctcaactttgtaatgatgattgatcatattatatttgttttgtatttggcatggacagatatcaaatctggctcagatttttctgattggattttacgaggaacgagaatttgctttgtatgtgtcttcaatatctaacgagctgaaaattccagtgcggtaagttgtagtagcatttgtgtttttggtttttggtgtgtaatgtgaaatcgagaattgaacgatgttcttgttatatagatacttgaaagaagataaaccccatggttcagctggtgctctttattactttcgtgatagaattatggaagagaaaccggtttgatttctgatgaaattcccaactttagttcctgcctcatcagtcatttgttttcctgattgatcttccatttcttgtctctttgaacagtcacatgttttcctcctcaactgtgatgtttgctgttctttccctcttcaaggcatacttggtaatctccctttgaaatcgctaatctgcttcatcgttttcattttcttactttgatgtacttcactacttttcgtagacgcacatcgaagatatggtggtattggaactatgctagtaatcaaggttcgttatcctgatgttattttagatgtcactaaggaaacaaacataaagatcaaacataaacatgaatatcgctttttcacttcaggtttctgcagaagcagctagccaatttggtgaattgatagctgatcctgatactaaagaactcctgcattatacagagaagcccgagactttcgtaattatctgctaaacaatcctgttttcttaattccttcacaggctctgaaatttgtttagcttaaattatctactcaatgcaggtcagtgacttgataaactgtggtgtctatgtgtttacttcagatatcttcaatgcattgaaaagttataccaatatttacacatgtgagtattcattattggcctctctcagagacttgcaatattatcaattagagacctgcttcatcattttcatgattcttttggtcttttcataagttattcattggataatctctttaaactttggcagctagcaactaccaat

SEQ ID NO: 166602 - DNA, 737 bp, Arabidopsis thaliana landsberg
actataaattcgctttttatatcatttcatttcatcatcactgggcaccgggacgagagatcaaagcaattatacattttgagaaatggctgctacattcgcataccttaaagacgtgaggccttacaaaaacgcatggagagtccaggtcaagattcttcactcttggaagcagtacacaagcaacacctgtgaaaccattgagttggtcatctctgatgaatatgtaagaactactgttatctatgcaaaatttacgtttacatatacacaagtgctaatatagatttctgttgtctttgtcataagggaaaaaaatgcatgctaccatgaagaaggagttggtttctaagtttgttcacaagcttattgttggcgaatgggtcttcattgagatttttggtcttacctatgcgtctagccagtttcgcccaaccaaccatctatacaagatggcgttccaggttagaactgaagtcatgggttgtgcttctgtctctgactccaacttcttgactttggcgccattttcaaaaatccagagtggtgagcttaaccctcacatgttggttggtgagttttccgattctatattatatttttgctttattccattcacttgctatcattagattatgaacacagtcatgtttcactgcagatgctattggccaaatcattactgttggtgagttggaggaactcgaggctaacaataagcctacaacaaagattga

SEQ ID NO: 166603 - DNA, 554 bp, Arabidopsis thaliana landsberg
tatttgggctggagtaactttagaatagtgaccttccaaaaaatgattgtcgaaactatgcgagtgaagagaaagcatgaagaaagatcatctgatgatttgtagggtcggtaaacaactctttaaaatatttcgaatgtaacaacgtaccatcggacatgggtgggtccatgggtccgagagaagatgtagggcccactagtatgggcggttagggcgttacaagttatatcggagccaaattcatacgtgtatgaagtcaagaaagctcacatcattggggtgacggtcttggtttgcaacgaagacgttatgatttgttagtcagggtgaaatataacaccttagtttcaaaaatatggtggtgcatgcggttaggttcaaaagaattaaattggacacctatatcaccaaatagcatttatcttttcggtcaaacatgctgagagaactccacagttaagtgtgcttggctaaagtaattttaggatggatgatcttccgaaaagagattgttcaaaccataccattgaggacaaagtatgaagatcgat

SEQ ID NO: 166604 - DNA, 986 bp, Arabidopsis thaliana landsberg
cgaaacgaaacttttattttggtcttaatcgaaagagagatgagggtactttttctcttcgtcttagttcttcagctttcttctaaatatgaatcgaaacttgtatcgacagagccgtttaagataactactcgaagaaacattttgtccccgacgaaagtctctgtgcttggtttttttaaaccgtcctccacttcgcattggtatctcggcgtatggcaccataggtttcctcaggaagtggtatgggttgcgaatagaggcaacccactctccgagcccattggaaccctaaaaatcatggataacaacctcgttctccttgatcaacacggtacccgtgtctggtggaccaatgtgaccagcacaaatctgatgaaagggctagtgactggagagcttctagacaccggaaactttgtattgagatacttcaacaacgacgacttatcagctgggctttggttttccgacagatgctttagtttccggtatgaaatttggctgggatgccaaatcaaacataaatagagttttgaaatcttggagaagctttgatgatccttctcccggggaatacacatatggagtggaacgtcatgagctcgcgcaaagtttcattcggaagaaaggtgtgccaacattccggagtgacccatggaagacaaaaaatgacgtagaatatgaagaaaaaaaaaactactcaatatgttgcatgacttatgggtttagactcagcattggtcaaaatggtagcagtagcaatccaattttgtcgtctttggaagtattagacatcgtccattttgatatttttctattgtccaacacttctctttgcacaccgcattgccattttttttcttacaaatgtcatgtggtgctgacctgcttcgtattctctcacaataagcttttactccttatttagcatatccatgttgtattcctgataaaataagaagtatgtacatcaactaattgat

SEQ ID NO: 166605 - DNA, 380 bp, Arabidopsis thaliana landsberg
atgaagaagaaactgtttgccctggccgccctcgtggcagccctcggatcgaccgccggcacggccagcgcgcaagacgtgctgaccggcgacacgcgcctggcctgcgaggcgatcctgtgcctgtcgtcgggcacgcgcccgagcgaatgcacgccgtcgctgtcgcggtacttcaacatcacgaagcgcaagctgtcggacacgatccgcgcccgcctgaacttcctccagctttgcccggtggcgagccagacgccggaaatgcagtcgctcgtgtcggcgatctcgcgcggcgctggccgttgcgacgcgcagtcgctgaactcgacgttggtgatgtggacgggcggctacgacgatgggcgcacgtacatcag

SEQ ID NO: 166606 - DNA, 1405 bp, Arabidopsis thaliana landsberg
ttatcatgaacattaagaatagtggaaaaaatactataaattttgaatatttaaggtcatgtcattttcatataaaatagtttaataatataatcaatttaatttgggtgaaaatttagatcattaatcttcaccaaaaaatttgtgaatgttatatttacaactaacattttctagattattttgaattccatcatctggacaaaatttgtactaccgacaagattttaattttatttttgacatcactactaacaagaatttttgatcggtaaaacttttttttgtgatcggtaaaactttagtataaatattaatttatcctaaataatgagattatgagaacatccaaatctttaactttgctctggttttcaataacaacttcttcatgtgcaaccacaaaaatcaccttatcagatttgacaaacttctctaatacaatctcgatctagcaaagagagaactcaccttgtaaaagaaaaacctttataatcgttgtttaactcttcaatcattatatgtcaggcattaaaactatgttcttttctttcccaagcactgtaatcgagaaccaaacctcaaccatgcctttcgacgccggcaaagctccggtttgtcggtgtcgggatatctcgatctcttttagtaaccttctattaagcttttttcttggattcgatctggaaccttttccgaaacttctctcaaaatttttcaaacttttctcgagcttttcagtttttcttctttgtttctgttgtcaaaggcattccaaagtcttgtgacaaaggatggatgcagtttttaatgaacctccttctatttcaatgggaaaaatgtcgtttaatatgcgaactttcaaaaactggccatttaatacgtgaaatacgtatgtgactatttaatacatataaaaaccattgaccggccattttacacagagttaatcgttgacaggccaaaatccacatgacgttatctgaccgtcgattatagtgaaacgatgtcactattcatctaattataggaacaatccacatgtgaccacacgacgttattaaatgacattttcattgtttcgattatagtgaaacgacgttgtgtagattcctatgttttcatgttttagattcttgtaatcttgaaaaagatcattgttcatgtgttgatgaagctaaggaacaatgatcacattttcaaatgggttgatgaagctttgatcaatgagatagagacattgacagcaaagcatggtgaaatcgagaaggagctgaaagagcttagaacagagaggttggagtttgagaagatggtttccgagaaggtggaaatgaacatggagaaggagttgaatgagaaagttgaagaagctttgtctgaagcgaaaacaagcaataagaag

SEQ ID NO: 166607 - DNA, 1485 bp, Arabidopsis thaliana landsberg; identical to SEQ ID NO: 4380

SEQ ID NO: 166608 - DNA, 891 bp, Arabidopsis thaliana landsberg
ccattcagaaaaaaaaaataaagtggaaaaactcgagaagtgttctttatcaagagatgattagtagtgtcatggctgaagaaatttaaaagaagaaagtcatccaagaaaagctagatgatcctgattcattcactctgccatgctccctaggaccattgacattcaataggtgcctttgtgatttgggagcatttgttagccttatacctctctctacagctaaaaggctaggagtgatagagggattgtattcaagagtgatgaagctgaaagattaactttgggattttgaataaagagttaataagtatttaatgggaattgatctagagaagatggaaactacactagctatcaaagaggacaatgatttcacaacagaatggtttgcaccaaaagatcagaaaggagttcatttagaggaaagaagcttatagagtaagttgttgagtgaggaggaaatccctatttctgacttattctccatgagtgcttaaacagcccaataaaccctctactgaagaagaacacttgatttttgattatgttgctggagaacttttggagctcaggatatagtataaagctcaagagaatataattgggaagttaactcataagatggaagagttaaatagcaccattctggaacttaaagaaatggtcaaggactaccccaatttcgaatttgaggattggtcaaaggagtctggttcagaagaagaagactactctgctgattagaaagaagcttattttgaagaaaaatcaaatgagtactcatcctaccatatctcaagagaggatgcagagtatgattcaagcactgaaaattcaaccactgaagatgagaatttctctgttcctctcttcaacctcttttctgac

SEQ ID NO: 166609 - DNA, 1165 bp, Arabidopsis thaliana landsberg
  unsure (1)..(1165): unsure at all n locations
aatggcgcgacacatcttcacataccgccaaatcctaaaacccaaacgtctcaccaaaaccctcccttttggtctcttctaaaacaggaatctacaccagcaaattcccttccctacacctcccgttcgacccaaatctcgacgccgtctccgctcttttctcacacaaacaccacggcgatacagcgctcatcgattccttaaccgggttctcaatatctcacactgagctacagattatggttcaatcaatggcggctgggatctatcacgttttaggtgttcgtcaaggtgacgttgtatcactcgtcttgcctaattccgtctattttccgatgattttcctctctttgatctcgcttggtgctattgttactaccatgaatccttcgagtagtttaggagagattaagaagcaagttagtgagtgtagtgttggattagcttttacttctactgaaaacgttgagaagctgagttctttgggggttagtgtgattagtgtacctgaaagttacgattttgattcgattcgtatcgaaaacccgaagttttactccattatgaaagaaagttttgggtttgtaccaaaaccgttgattaagcaagacgatgtagctgcaattatgtattcatctggaacaactggagctagtaaaggagttttgttaactcataggaatttgatagcatcaatggagctttttgtgaggtttgaagcttctcagtacgaatatccgggatcgagtaatgtttatctagcagctttgcctttgtgccatatctacgggttatcactnnnnnnnnnnnnnnnnnnnnnnnnnnnnnnnnnnnnngttgttatgaagaggtttgatgcttctgatgttgttaatgtaattgaaaggtttaagatcactcatttcccggttgttccacctatgttgatggcattgacaaagaaggcaaaaggagtttgtggtgaagtgtttaaaagtttgaagcaagtttcttctggagcagctcctttgagtaggaagttcattgaagatttccttcagactcttcctcatgtcgatttgattcaggtctctgaattttacttttggatgtcgtattagaaaactgaattaaatgttattcattcataaactcaataagaagtagaatctacattttttaaaaa

SEQ ID NO: 166610 - DNA, 826 bp, Arabidopsis thaliana landsberg
agtattagttgaggcgggaagatctaataagtcctaaaactttgggctcagaaggagatatctaaagcccatctatttatgtttataaaaattgaaaggaataaaaagcaaaccctaaattcaaacagtaacgagagagctcagagcagagcaagtcacagtaacaatggcggaatctccaacactcgatccagaatctccctattatctcgatccaaattatcaatccaacgagaatcttcccatgtggattgttagcgggtccccagatatatacttcatgtggaagattgattttgtcatcttccctccaagccacagcaacatcggtttcatcgacggaaccatcgcgaaacctgaaccttcctaaacgcgctatcgcccatgggaaacatgtaacgcgagagtcaaatcttggatgatgagttcgttaagccaagagcttcgaagctatgtaacgttctcggagacagcacataaagcttgggaagatctccgagttgaatttgtaccaagtgttgattttaagatctatgagcttcgtcaaagacttgcggtgttgaggcaagatggtgactctgtaggtagatattttgcgaagtttatgagagcttgggtggagttgttggagtatgatcctgtgctgccggagtgttgtgattgcgagattgcgaaacgagctaaagaggcgagagagaaggatcagcgttatgcgtttttgatggggttggataatggactaagtaatgtgagaacgcagattatgcttatgaatcctcttccgtctcttcatcaagcttttgttatgttagatcaagcggaatcg

SEQ ID NO: 166611 - DNA, 1250 bp, Arabidopsis thaliana landsberg
gaaatgtatgatgcagaaaaaccaagatgccttctgtctcatccagctgactctcctcataacctgtccgttggatgcgatcccaaacttccgcttggctgctttacgtgcggcggaaaaacaactgtgcggcggcaagattatctccacttccactgcaccacctgcgacgtaaagttccacgaaggttgtcaaacgcgtccgagaaggataacacatccttatcacctccaacaccctctcactctcttctatcgaaaccctgaaaccggaattatatccaacatcatcccctactctagcccttacgaatccgacacatctgatccagaatccaactcatctggtgaagggaagtctgaacttgttgatattattccgtccaaatccgatatcattttcgacaagtgcacttggtgtggaaaagatttcaaaggtgatgtttggttctaccgttgtttgatatgtggcttttgtttggatctctcttgtgccttaactcttccacctcttactattgcaaatccgaaaagccatcaccactcactcctcttcttacctcggcctttattagttccatgtgatgcttgtgggttggtcaacgcgttggaaccaagatatgcttgtttccaatgtaattacatgatccatcagaattgcatagatctacctcgagtcataaagatcacgcgtcaccatcacagtctttcttttactcctttcgggccacctctgatttctttatgccgggtttgctacaaagaggttgatatcaagtatggacaatattcttgccagcacagaagattgttcttatgtagctcattctaaatgtgcaacacataaaaatgtttggtatgggacggaactcgagtgggaaacagaagagtccgatgaaaatgaagatattgcgccattcaaggtggtcggtgaagatttgataaagcatttttgtcataaacatcacctacggctcaagaagcacgatggttttcgagaagcagagaagcaatgtagagcgtgtgtatttccaatcgtctctcatcaattctatcattgcaagatatgcgattactctctccacgaggtatgtgctggtcttcctcgaaaacttgatcatgcattgcacaaacaccgtcttgtcctagacccatctccgctacatgactacagaaacatgcattgttcaactagttcgcgagcgttcacgggtttcagatacaaatgctcagaaaagagttgaaagaccg

SEQ ID NO: 166612 - DNA, 1669 bp, Arabidopsis thaliana landsberg
tggaagcttaatctcgaaaaatgtgtctttggagtaccagcaggaaagttgctcgggtttattatcagccaccggggaattgaagccaatccagaaaagatcgaggctatcatgaagatggaagctcctcggtcacagaagaaggttcagcgactcactggatgtatggcagccctgagcagattcatatccagactgggagaaaaaggtctgccattttataaattactgaaaaaggtggataagtttcaatggacttcagaggcacaagaagctctagacgcactgaagaaattcctgacaacaccgccagtattgaaaccgccccggcgactacccgactcagccggctgaagatttgctgctatatatctcttgcacgactcacgtggtgagcaccgcgttggtagtcaagcgagcagaagaaggacatgcatacccagtacagcatccagtctatttcatcagtgaagtctgggtccctcgaagaagaaatatcctcaagttcaaaaattattgtatgcaatacttctaactgcacgcaagcttcgtcactactttgacgatcacaaagtcatagtagtcactagatttccaataggggatattcttcacaacaaagaaaccatcagaagaatagccaagtgggcctgtgagctgggagctcacgacattgagtttcgacctcgcactgcaatcaagactcaagcactagttgacttcgtattagaatggaccgagcaacaagtgcccgataacccggaagctgcagaagtatggcgaatgtattttgatggctcgttgaagctgcagggagcaggtgcagggatcctctttattgcacctggaggtgaacaactcaaatatgctcttcaattgttattcccagtgtccaacaatgcagcagagtacgaagctttgattcatggactgaacattgccatatcactggacatcaagagaccccccgtatatggggattctctggtagtcatcagtcagataaacaaggaatgggattgttcgaatgattcaatggggagatactgcgctgccgtccgaaagctagaagataaattcgaaggtctggagtttcatcatatagaaagagatcggaacgcggcggctgatatactgtcgaagctcggatctggtcgagctcaagtcccgcccggggtcttcgtgcaagaaatccttcagccgagcatctcgatggatcaaagggaagagtgcaacatcatagaccaacccgagtcagactctgatgactggaggcaaccgattattaagtatataaagaatgaagaagagccagatgacaagaactcggcagagcgcattgccagacaattagctcactatacactcattggggaggtattatacaggaggggcgcgtcaggcgtcctcatgaagtgcgttctcccgtccaccgggaagcaacttctggaggaagtccatgcagggcagtgtggaatacacgcagcatccagaacattagtcgggaaggttttcaggtcatgattctattggccgacgcgaagaatgatgcagccgagttagttcagagatgcgacgttccgcaatacctgtcaaagcgacagcacatgccagcacaacagctacaaaccataccagtaacttggcctttcgcatgctggggattgga

SEQ ID NO: 166613 - DNA, 1353 bp, Arabidopsis thaliana landsberg
cactttatgctgccaaagacattgtcccgttttacttagaagaatctcctaaaatattctatgggtaaagaaagaagaagtcatagttattttttatgaaaattctaaagtatacatgattgatatatattttagggtctaaaatatagaaactcacaataatgaatttgtatgtttcgtttaacgaaaaggattaaatgatatgtaaaaggaacgtaataacttaaggtttagtccttaaaaatcaagttgtcattagatgtggagatgataagtgaattacttattaaatattataattctttgtttcctgaaaaaatgtagatcgaaatggtgggatccgtctgctttatgggcactgtttcgtccaaagtacaacggagagtatctgcatacacgattgggagagattcttggagagacaaaacttgaccagacactcacaaacgttgtcatacctaccttcgacatcaagaaacttcaacccaccatcttctcctcataccatgttcttctccaccccgctgttcttaaaccataattaacgtagcattttaaccactctaacatactaacacgctctgtattcttttgttacgtgttcttgaaggcatcagttgaccctagtttgaacgccaagttatcagacatatgcattggcacatccgctgctccattttacttacctccttataaatttcccgaaaacgataagatgagaacgtttaacctcatagacggtggtgttaccgctaatgacccggtaatacacaatcttcgtaccattttctcattactcttcttgtatgatcatcaactaattgtcttgtatgttttgtgtttggttgttcatagactctggtaggcatgacagctatgtctagaaagtctataatcaaacatcctgatatggatgggttcaagccgttagaatacgaaaagtatatcgtgatatcgatagggacaggatcggcgaaaagggaggagtactacagcgcagtagaggctgcaaaatggggattcgaaaattgggcgtacaactggaagcataaaacaactccgatattagacattatctttgaatcgagccgggacatggttcagtatcacacctcggttctgtttcaagccctagagtccgaggataactacctaagaatcgacgtaagaagctatacttaaaacattttaatgtgttatcaatcattaactagatgagattgttgatatgtgcaaagcttatctcaggcagatacattgaaaaaagatgaagtctttatggatgactccacgacgttgaacttaaagaatttaaagaatattggagagaaattcctgggcacccatgtcacg

SEQ ID NO: 166614 - DNA, 856 bp, Arabidopsis thaliana landsberg
gtttatggacagatttgtggagtttaagttcaggtcacgcctgctaaagttcatgataacgtatttcgaacacattggttatttagatcgattaatggggttgatcggtacactggttgatcgtggaattcaacatttgtatgtttatatgcatacttgtaacagagttgatttcatacgtcaaaacatttacaagagtaagacattggtctctttgaagctttataacgtagagttaaagaatccagagtttgttgtttctctaccttgtctcaagatcttgaaactggagaatatttttcacggtgaggatggtcctttggtcgtggagaagctcatctcaggatgtcctgttcttgaagatcttgagctgattaagccttttgatgttttgactcgatgagttttgctgcgtctgcgtgtgagctctcagactctgaaaagccttggtttatattttgcgattaatagtacaggtgctacagatatttcagttgagattgataccccaagactcaagtatatgaaatgttatgagagtctatttcatagaattatggtaaagaacctgagttctttgtttactatcgacattaatacgaaggataatgttggctatggcagtcttacggcaccaaagtatttaaggaatagagatatcatcggtgattttttaaccgtgatatcgagtgtaagacatatgatcatctgttactcgacttcaaaggtataaatatatacactctgtgatgcgtatataactatttagttctctgtaaacaaatctcacatgtgtccttttcattcctcttgcagatgctttattcttactccaaacaactgagacctggtctga

SEQ ID NO: 166615 - DNA, 340 bp, Arabidopsis thaliana landsberg
ttgcttcagagagtcctcgagctgctgcatgcgaagaaggtgttggatatctcttcgatggtgagagagctctgttccggatccttgacaagagcgtgcacttgtttgtcattgagaacaagaatgggagagactcaaaaccaaaattcagtaggttaggagattgaatgatggagataacaaatgaatattgcaatgtttttgataagaaggggaagtgaaggaaagagagcgagttataagaatttgcgaatcttttggtatgggaggtggagatatgagaatgataagttcgggaattcaaatgggggggcgaaccaaagtgattataggggacagt

SEQ ID NO: 166616 - DNA, 342 bp, Arabidopsis thaliana landsberg
  unsure (1)..(342): unsure at all n locations
atggttaagaaggtcctggagctgctgcatgcgaagaaagtgttgggtactctttgatggggagagagctttgttccgaatctttgacaaaagcgagcgcctgttcatcgtcaagaacaaaggttggagaaattcaaaaccanaattcagtagattaggagattgaatgatggaagaaacaaataaatttgtgaaaagtttctgataagaacgggaagtgaaggagataaagagaggattgtagggattcgagatgaggatgctttggtatgggagatggagagatgaggttgttgagttagggaattgcaattgggggacanagtgggtatgggggggggg

SEQ ID NO: 166617 - DNA, 664 bp, Arabidopsis thaliana landsberg
tcttactgttactatataccatcgaagatcaaaagaggtgttcatcgattactctcggttcttcctgtctgtgttctgtttcttgttcttcctttgtttttcgtctttacgattttctcttccaccactgcgttttgcctctctatacttgctaattttaagctcattctatttgccttcgacaaaggtcctcttctaccacttcccactaatctcttccgattcatatgctttacttgcttgcccatcaagcttcaaaaaaaacctaactctcaaaatcatttacctaaatgggttttcttttgtaaagctgcaatttttggggtgttgttaaacgtccataactataaaagttcgttgcctccaattcttctaatatgtctctatccattgcatctataccttgtgcttgacgttcttttaaccatcgtcaacgctttgcttacaatcattcttggatgcgacctggagccacatttcaacgaaccatacttagccacgtctcttcaagacttttggggtcgccgttggaaccttatggtcccggccattttccggccaggcgtctaccatcccatgcgttcggtatgccaaccccaaatgaggtctgattgggcaaggttcatggggtgttggaccacattcttcgtctctggattgattc

SEQ ID NO: 166618 - DNA, 782 bp, Arabidopsis thaliana landsberg
atgagtcctgtggcttcaacgaggtggtgtccgacgccggagcaactgatgatcttggaagagatgtaccggagtggtatacggactccgaatgcggtgcagatacaacagatcacagctcacttggcgttctatggaagaatcgagggcaaaaacgtcttttactggttccagaaccataaggctagagatagacagaagctgaggaagaaactagccaagcaacttcaccagcaacaacatcaacttcaactccaacttcagcagatcaaaccaaaaccaatatcatcgatgatttctcaaccagttaataagaatatcatcgatcatcacaatccttatcatcatcaccatcataatcatcatcataatcatcatcgtccatatgatcatatgtcctttgattgctgctctcatccttctcccatgtgtcttcctcatcaggtatgtaattaagaagagtctacttttctctctttttgttaaacatttttctttcataagatttttttaatgcaatgtttatcatcaaaatagctaggttacatatggatataaccaaaacatttgtatacctacaaaaagaagaagaaaaacataattgaagaactaatctcaaaccttaaaattatttatgataatttttttaattaccggaaacactaatttcaaaccttaaaaataccaaatgtttttggctattataccctgtttacatggctagatgggaaagctgcaagtgagaatactttttttgggtctagaataaaaaatattttttt

SEQ ID NO: 166619 - DNA, 584 bp, Arabidopsis thaliana landsberg
atctgttctctctgctacagttttaagctcctgtgattcattggcctcggaattacaggaggttatgtcgcggaaagtattggtagatgacgggttaaggcaagtggtggaagttgaacaagcagctttgtggagatttctctggtggtcaggaacaatctcagttcatgtcttggtggatcaggatcgggcagatcactctgtaagacctctacgattataacaaaagtctcaagtttcttgaatggttcgtgaaaggggatttaaatgggtgttgcagatgaaattcaagcaagtgaaaagtggattcatgaagagattcgaaggaagctggcaagtaaagcctttgtttgtggatgaacatatgtgcgatcgtttgaaaccgaaaacgctggaggagtataacaggtgcactggaggtaaagggaggatcggatctaaggtaacgctggaccagctaatacagccagcgattgttccacctccgcccatttcttggtatctcagaggaatcacggctaagacgacagagatgcttatccatgacttgttggctgagaccgccaggatccgtgcagctggag

SEQ ID NO: 166620 - DNA, 1943 bp, Arabidopsis thaliana landsberg
atgttggacaaggcatgggttcatctatgcaggtaaggaattacagtatataggttaggttcattaatgggttttggatacttaagaggtttctatttcggtttacttattcattgaagagctgatcccaattatgagagaggagctcggagttttgtacgggatgtggctgcggctctagacgacattgatatgattatatgtccctgcaaagactgtcgtaacatgtaccgccactcaagcagtgatgtggtggtccatctggtaaccaaagggatggatgaggcatacaagttgcaaagcgaatggtatcatcatggagactctgtggcttcagctgaaggcgtaagtacaacaaatcagaggaatgatgaaattcttgagctatacaaggctgctgaatattttgatgaagagctggctagcaagcgggacttagtagacactccattgggtgacttagctgagatagcagaagacgaggacaggagagaagatgaattcctagccaaactagcagatgctgaaacccctttatacccgacttgtttaaaccacagcaagctctcggcgattgtgtctctgtttaggattaaaacacgtaatggatggtctgacaagagcttcaatgagctgcttgagacattgccaaatatgttgcctaaagataatgtgctgcacacatcattgtatgatgtcaagaaatttttgaagagcttcgacatgggatatgaaaagatccatgcttgtgtgaatgactgctgcctattcagaaagaagtacaaaaagctggacaattgtcccaaatgcaaagcttctcggtggaagattaatactcacagtggtgtagtaaagaaaggtgtcccacagaaggttctgcggtactttccgattatcccgcgacttaagagaatgttcaagacagctgaaatggccaaggacttaaggtggcatttcactaacaagagtagtgatggaaaactccgtcatcctgtggattctgtgacttgggataagatgaatgataagtatccaacatttgcagctgaagcaaggaacatgcaacttggactgtctacagatggcttcaatccgttcaatatgaagaatacacagtacagttgttggctggctcttttagttaactataacttgcctcctgtaatccttacactgctcattcctggtccacaacagcctggtaatagcatcgatgtgtacttagaacctcttattgatgatttgaatcatttgtggaagaagggagaggtcacttatgacgcttacagtaaaagcacattcacgctaaaggcaatgcttctctggactataagtgaccttccggcttatggaaacttagctggttgcaaggtaaagggtaaaatgggctgtcctatttgtggtaaaaacacagatagtatgtggttgaagtttagcaggaagcatgtgtatatgagtcatagaaaaggattggggccaactcaatagttatagggataagaaggcttggtttgatggaaaatcagaacatgggagaaagggcagaattttgactggtcatgaagtttctcaaaacctgagaaacgattttggaaatgtgaaaggatctgggaggaagacaaaaaggactgttctattatctgatagtgatgattcataaagtgaatccgaagaagaagaagaagtagaagttgacgaggatgagttatcaagatggaagaaacgatttatcttattcaagctgccttattgggaggtatgtatagcttaatataatttcagaattgataaacggatatttgtttaatgtgaaaccttataattgtatttgtattctctataggatctcctggtaaggcataacttggatgtaatgcatgtagagaaaaatatggcttcaagcattgtctctacattgttacattgtagaaaatcaaaagcgg

SEQ ID NO: 166621 - DNA, 4119 bp, Arabidopsis thaliana landsberg
atccatggggtcgggcagcatatgaagcccttgtcgtttctataaagttgctgaggcctattggcaagacgtacaccgtcagtggtctggttttcgtgttgcaggcttgggcgtatgagtcaatcatcaccatcgccgagcgttttgggaacgctgttaacgcggatgagattccgttgcttagatggggtggcagccgtacccgttcaactatagaataggtcattgctgaagatatcaaagcgaatggtggtgaggtacggtttcggctctgttatgttctgttttttatcaaatatgtatgttacggctgagttaatgttttatttttctctgtgaaggctgagttatgttcttttttttttggcaaatatgttatgttacgactgaattatgttctataatggctgagttatattaagtgacgactgagttatattaagtgatggttgagttaaacatactgatgggttttattatctctcctgttgtagctgcgtgttcgtacaatggttgaaaaggctgagttaagcgagatggttcatttttggccagaccaattagaagacccagcacttgataacttgatccaagacttacacgaggttaagcttgttaaaggttattgggatgtgaagacgagtgagaagaagaagaaactcttaaaagataaagaagcggaggtgtctgaatctcccgctaagaaacagaaggtctctcacagtgagcatgttgattctcttgagaaagatgcagaaaagaagaagaagaagaagaagaagaagaagaagaagaaggaagtagctgtcgaatctgatgaggacgaggatgttcgttctcgtgagcaggatggtcagggagaccagcagtcgctcgtggatgtggtgtccaacttgatctctcccttaaactctcgatttgacaccgttgatactagcataaaagaaatgtcctcccgtctggatgtgattggagatcaagtagaagagaggattgatgcaaagtttgaaagaaggtttggatctattgagaatgaggtcaaacagatgaaagagcatctgaaggtcattggggtaagcctaattggccaaactggcatagcatactcaacattaaactctagagtggttattagagaaatgttttcaacccaagaggagcaaggccaccctaaaccccaaactcaacagacaccaaaagttccacggaaacctacaaataaccaatatgttaatagtcctcctctggtaagctaatggctgagttattactttttatttagttatggctgagttatcttcatattataaggctgagttataacttttatttagttacggctgagttatcttcatattatacggctgagttataactttttatttagttacggttgagttatatttatacataggcttgagttttcgttatttaatgcatgagttttctttacgtttatgcaatagaaagaagttgtagattcggtggtagagaaggatgttgatattgttgaggttgaggttagtaggaatcttgatagcgaattgctaagaccactgatggaaacaatgctgatattgatttcattgagaagtctcctagttcccgccgtttacgctcaacgacgccggcgaggagaaataccaaagcgaagacatcaccaaagaagaaagctaaagttaaggagaaaatcttaaaagagctaattgtgaaagagctagccgcctcaaataaaagaggaagaaaggctgctacaaaggagcctacaaaggtgcctccaaaggtgccaaaggttacaataaaaaacccaagatgaggaggaaaccgagaggctgcagagagtaaaagatgcgaggagaaaaactgttaagctggccccggatgggaggtcattgattaaacccgatctaatgaccactaacacttttccagtaattggagataacgggctgagctgcatgaggaagggttgtctgccttcacaagcaatcatgatcctctggcacaggttgatccggccaaagtgcagaagcttaaggctaatttgtcaagtccgactggtatgaccctttataccttaataagttgttaaatacgacatgcttacagtatttgtgcatattaactttctttactatatgttagcaaaaaatcgttggaaagtgggatagacgaggtggatttctactctgttatcatggccgaaagaaagaactggccagacgagaaacatggatggatgggtgatgatgtaagttattgttatgttctgtctgagtttggctaatgttatggctgagttatcgtgtcgttatgtctgagttacagtagataatggctgatttatttaggtgttaaggctgagttttacttggttacgtctgagttaatgttgtgttttgtcttggttttattttttgtccagcacattgctgcgtatgtgaaagtcctcaccacgaggctcctgcgagatcctaccccatactacagcgaacgcgtcatgattctagacccgtggttcacgtcaatgtggactagggattacggacagtggaagatgaagccgaagaggttttctttcagagataccccgtatgaaggttggatgaacggtacggctggagaagacccgacaaataagaagtgaataacagatgtggatcacttgtttcttgtccaccaaaccggaggtaatcattgggtgacccttcacgtgaacttgcctaggtctcacatcgattgctatgattgcatcgtcggagagcatactccgattagcgatggaaaaatcctggaagcttgtaggccgttcacgaggatgattccacagatgatgagtgaaattcttcctcccgaagtttgtatcccgcaatacgaccaattttcattccggcggaggcacatgacaaaggtcccgcaaaatattatcaccggggactgcggcgtttacacgttaaagattcttgactgtttattgcttggtgtttgttttgatggcattactgattcaaatatccagggtctacgggttaagatggcagcagagatcttcgatgaactacctgtaagaatgccccttcagtttcttgagcagtgatttgctttttcgaacatgtctgtatcttttaggaattttagcatgtgattgtactaagtatttacactttaggattgatatccagaattatgtccgtatgaatctattattatgttaattataacaaaaaccaatgttatggctgacttatcatcgctcgattcgttttacggctgatatatgctaacgtgaaggctgacttatcatcgctcaaatcgtgctacacggctgagttattgttgtttaatttgatgtttagctgagttattataacgcggtggctgacttgtcatcagacaaatcgtttgttggctgagtttgtataacgtggtggttgacttgtcaaacccaaacttccctcccatcaaataaaccagatgtgactttaggactatacatacaccggtttacgacacccgaatagtcaataacccaaacgtcgttataggaccaaacgtcgttacattagagaaccaaacgtcgttaggttagaggaccaaacgtcgttagaggactatatatacactggtttcctcttgtcttttcacttgtctattcttagcaactacaactcttcattcttctcttgtcctttctctgagaaacaaaaccattccgagatcatggatgcatcagattcaggttcaggttcaaacaagcggtggtgtgtggatgacggtcccaacaagtggtcgtatgtggatgacagccccaccctaaagctgtataaacaggagaagcgtttcaaatccgtcatctcttacatcgggagcaacataagggagacggcggaagcacacttgctcgatctcaaactacatgagaaggaagcgaaacttaaggtcttaaggagagtgcagaggatgggggacggatttaacgtgggggaggagatcgagaaagtgctggagcaggttggcaaggcctacagagcgcagcgtgaacgcccggtgagtaatattgattgggagaaactggggtatggatccaccgggcgtccaatttcggagtcagatgaagaa

SEQ ID NO: 166622 - DNA, 249 bp, Arabidopsis thaliana landsberg
agatgggtggagagagtttacgatgatatgagtgagtttgtggcgaagtctccgagaggagcttatataaatctgagagatcttgatttggggatgtatgttggagttaagaggagtaagtacgaggaagggaagagttggggagtgaagtattttaagaataattttgagagattggtgagagttaagacaagtgttgatccttctgatttcttctgtgatgaacagagtattcctccttttacgttt

SEQ ID NO: 166623 - DNA, 515 bp, Arabidopsis thaliana landsberg
ttaaaatggatctgctgatacttgagggttttttttaaaatgatttaccaatggtttgaagactttataagatcatagagtttgatctcattcttgcaatggatgaacaaaacaaacgtagaacaaatagtaatttatttaactttatagaggaattgtgtggttagatctgattagttatggagaattgtagtgaatatgagtttgaatgtttgatgtttgcagaggatatattgaaggcttacaatgtatagaaagcgagagggaatttcccgcctgatgcagataagagggtaccgtcggtgtttgtttgcaggactttggaactctatttagttgatagattttcattgacttttcaggttaagctaatgtgttcttattgcaagaaacacaatgacaagtttgttcatgatccatattatggtggagctcaaagttttgagaaggtaatttccattaagagactggagaagctgaatgcggatattaatttctggtttataacattagag

SEQ ID NO: 166624 - DNA, 1071 bp, Arabidopsis thaliana landsberg
  unsure (1)..(1071): unsure at all n locations
ggacaacggtctaatgggtctactgctattcggagttcacagtcctctcctcattcgactacaagagcatgtcctcagacaactaaaccggtgcaacgcagcccatctctttcgccacataacactccggttcatgagacagatcnnnnnnnnnnnnnnnnnnnnnnnnnnnatgaaggtcaagctcattatcaaatgggggagttgtcacttgagaagcttcttatcagtccaggacagtctgggcatacaaaactagaccctaaacgccctccaagaaaacattggtaactcctttaattgaataatgtttatttttcaatccaatgacatcattatgttactaacgtctgttgtcttcgatatgtttgaggttgataatgaagttgggaaggtggtctctaactacatcaaaggacactttactgaacctcacgctaacatctcacaggcacctaaggagattgttgacacttggtttcacatgtttgcggtaattgattagacttttgtttttgatttgtagaagtagctttgcagcattaattgcttttatttccttgatcacaacaacaatataacttggacaactcaattaaagaattggttaagaggcaatttgcaattaaggtaggaatccgcttgtgtgatattgttagcaagtggaaaagtaagtggaaggaaatagatgataaaacaatgcagatgtggatggatcctaaggtatggaagggccttgaagttttttggcttgatccatagtctgaaaataaaagtggtaagtgttcaaaatctcgcaacacgagtgtggccagtcatggtccgagtagacacacctcaggtcaaaagacttatgctaaacgagcattagaaagtgtaagtaatttatgcttttcactttttctcattttcctagtttcatgatgatgattactattttaactttcatgttaggctgagaagaatggaggtcaactccctccaattgtccagaccatggagcagactcacaagagaaataatggagaattcattgatggttttgtaaagcaaatttgcaaggaagtttca

SEQ ID NO: 166625 - DNA, 2958 bp, Arabidopsis thaliana landsberg
gtcatttaccgcagggcatccagcaccgcatcgccgaagacgtcagggtaaggccgccaccggtttctagtggggtcggccaaaacctggctgcagcggcaatacttcttcgcgcgatgtcggagccatctaccaccgaggggcggcgtatccagagagagctcagaaatctcctggaggatgctgcggtccgacgggccgaaagctctgcctcccgaaggcaggggtacccctctgaacatcgcgccgcgacttcccaattcatgcgggaagcctcggtccacaccgagcgcacgcgcaacacagcgcctgcggccccgggttgcctcggcaacgagcaccatcaccgcaaccgtcgagcccacctcgacgagaaggtgcgccgaggctaccaccccaggcgtgggggacgctgcgacagcgggaaggatcggagtccctcgcccgaaccacacggtccgcaggctttcagtcgagcgatacgacgggcgccgttcccgacccggttccgaaccccgactactatcacaaagtactcgggggagacgagacgggaactgtggctcgcggactaccggctagcttgccaactgggtggaacggacgatgacaacctcatcatccgcaacctccccctgttcctctccgacaccgctcgagcctggctagagcacctgcctccggggcagatctccaactgggacgacctggtccaagccttcaccgacaacttccagggcacgtacgtttgcactgggaactcctgggatctccgaagctgccgctagcagccgggagagtctctttgggactacatccgacgattctcgaagcaggggactgagctgcccaacatcaccgattcagatgtcatcggcgcgttcctcgccggcaccacttgctgtgacctggtcagcaagctgggtcgcaaaacccccaccagggcgagcgagctgatggacatcgccaccaagttcgcctctggccaggaggcggttgaggctatcttccggaaggacaagcagccccagggccgcccaccggaagacgcccccgaggcgtcaactcagcgcggcgccaagaagaaaggcaagaagaagtcgcaagcgaaacgcgacgccgccgacgcggaccttgtcgccgccgccgagtacaagaaccctcggaaacccaccggaggtgccaacctcttcgacagagatgctcaaggagccgtgcccctatcatcaggggctccgtcaagcacacccttgaggagtgcgtcatgcttcggcaccacttccacagggccgggccacccgtggagggtggcagggcccgcgacgacgacaagaaggaagatcaccaagcaggagagttccccgaggttcgcgactgcttcatgatctacggtgggcatgcggcgaatgcctcggctcggcatcgcaagcaagagcgccgggaggtctgctcggtgaaggtggcggcgccagtctacctagactggtccgacgagcccatcaccttcgaccaagctgaccaccccgaccacgtgccgagcccggggaaatacccgctcgtcgttgaccccgtcgtcggcgacgtcaggctcaccaaggtccttatggacgggggcagcagcctcaacatcatctacgccgagaccctcaggctcctgcgctgacgatctgtcctccgtccgaacaggcgttgcgcccttccacgggatcatacctgggaagcgcgtccagcccctcggacgactcgaccttcccgtctgcttcgggacgccctccaacttccgaagggagaccctgacgttcgaggtggtcgggttccgaggaacctaccacgccgtgctagggaggccatgctacgcgaagttcatggccgtccccaactacacctacctgaagctcaagatgccgggccccaacggggtcatcaccgtcggccccacgtacaaacacgcgttcgaatgcgacgtggagtgcgtggagtacgccgaggccctcgccgagtccgaggccctcatcgccgacctggagaacctctccaaggaggtgccagacgtgaagcgccatgacggcaactttgagccagcagagacggttaagtctgtcccttttgaccccagtggcgacaccaccaagcagatccggatcggttccgggctcgaccccaaataggaagcagtgctcgtcgactttctccacgcaaacgccgacgtctttgcgtggagtccctcggacatgcccggcataccgagggatgtcgccgagcactcgctggatattcgggccggagcccgacccgtcaggcagtctctgcgccgattcgacgaggagaagcgcagagtgattggcgaagagatccacaagctaatggcagcagggttcatcaaagaggtattccatcccgaatggcttgccaaccctgtgcttgtgagaaagaaaggggggaaatggcggatgtgtgtagactacactggtctcaacaaagcatgtccgaaggttccctaccctctgcctcgcatcgaccaaatcgtggattccaccgctgggtgcgaaaccctgtccttcctcgatgcctactcagggtatcaccagatcaggatgaaagagtccgaccagctcgcgacttctttcatcacgcccttcagcatgtactgctatgtcaccatgccgttcggcttgaggaatgccggtgcgacgtaccagcggtgcatgaaccatgtgttcggcgaacacattagccggacggtcgaggcctacgtcgatgacatcgtagtcaagacgaggaaagcctctgacctcctttccgaccttgaagtgacattccgatgtctcaaggcgaaaggcgtgaagctcaatcccgaaaagtgcgtcttcggggtaccccggggcatgctcttgggattcatcgtctccaagtggggcatcgaagccaacccggagaagatcgcagccatccccatca

SEQ ID NO: 166626 - DNA, 598 bp, Arabidopsis thaliana landsberg
gcacctggacaatatccatatccagatccttactacagaagcatatttgcaccgcctgcacaaccgtatcccggggtatggtgtattacttagtccactacgacaattgttttaatcgggatgaatgtaacaaaacatgttacaaatcatttcaggtacatctacagttgatgggaatgcagcaacaaggcgttcctttaccatctgacgcagtcgaggaacctgtttttgttaacgcatagcaataccacggtatactaagacgcagacaatctagagcaagacttgagtctcagaataaagtcatcaagtcacgtaaggtaataatactttttttacatcgcgttttttgttatgatatcttacttcgtttgtgtaaatcttgagagtgtattggtagccgtatttgcatgaatctcggcatttgcatgcgataagacgaccaagaggatgtggcgggcggtttctaaatgccaagaaggacgatgatgagcatcaggaagacagtagtcatgaagaaaaatccaaccttagctctggtaaatccgccatggctgcttctagtggtacatcttgagaaggtcctacaagtagcttt

SEQ ID NO: 166627 - DNA, 582 bp, Arabidopsis thaliana landsberg
aacaaagaaagataaagaaagaaaatcagatgaagtggacgttgcactttgctgaaactctgggaagagtcagcacattagctcgcaagaactcactgttgttgttgttttctgcgtgaacaccaactttcacggtttcaagacattccaacttgcccaagaaatgtctcatctgtttcagctcttgaaaataacctccatactctgaaatctgtagcaccttcacttgacatgtccgcagacaacataatgcctcttctttctgtacaatcttcctctgcttcttaggtatgcaagcgcatgcatctccacatctactagttactctgtggacaagaccctgaaaccagagaccaatttgacatgaataaattaatatcaagagaaaataatcgcagtaaggacattattgatacctttaagactaaagtatgtaggtttggacaactcttgaggagaagtggcattacttgccaacctttatccttggcgtgagaggaatgatagaaaacacggagagtcatcatcgagaacagagaaacttgtcaagctgattgatagaaatatcaggaaccacttgag

SEQ ID NO: 166628 - DNA, 1195 bp, Arabidopsis thaliana landsberg
ttgaatcttcccgcagggatgaaccagacttcgttgcgtttagaaacgttttcgagctcatttcgtgggatttcgagtttatcctcgccgtcaaaatcgacttgcagcgacagattcataccgtgcagatcttcttcgagactccacgctttcgatctgcaggataaggaaccgactaccccggttaaagagggagggaatgaagcctattctagacttttgaaatctgagcttttcggatctgattttgcttctccttgtttgtctcctgcaggtggtcaaggatctgcttcttctccgatgagtccatgtactaacatgttgagattcaagacggatcgttccaattcaagtcctagttcgccgttttctccttccattctcggaaatgataatggtcactccagtgactcgtctccgcctccgaagccccctcgcaaggttcctaaaacacctcataaggtattatatcgtttagatccaacctgtttatgtgatgttattacagattcatgagaagtagaaatgatagattgttttgtttttgatgtggtctcaggtcttggatgctccttctttacaagatgacttctacttgaatgttgtggactggagttcacagaatgttcttgccgttgggcttggtacttgtgtttatctttggacggcttccaatagcaaagtgagtgttttgatatacttgactagttcttaagatttgcacaatgtttttagttgtggtgtattcatttaacagtgaatttgttggttaggtgacgaagttatgtgacctagggcctaatgacagtgtgtgctcggttcagtggacacgggaaggttcatatatatctattggtacaagtcatggtcaggttcaggtgtgttgtttgttaccttccaatctgtggttgtggaaagttttgttatgatgcaatgaagttactaccggtttaatttttggcaggtttgggacggaacacagtgcaagagagtccgaaccatgggaggtcatcaaacaagaactggtgtcttggcatggaactcaaggatcttatcatcagggagcagagacagaaacatccttcagcatgatatccgagtccagagcgattttgtcagcaaactcgtgggccacaaatctgaagtctgcggtctgaaatggtctcatgatgatagagagcctgcgtctggaggc

SEQ ID NO: 166629 - DNA, 1720 bp, Arabidopsis thaliana landsberg
  unsure (1)..(1720): unsure at all n locations
nnnnnnnnnnnnnattttaacgccgatgaactcctcactttcgtcgcctataggttatgttttgtacttctgtctctctagactccatatataactcgcaaatactcttttgaattttgttttgagaagttgtgttgttttaatcccacttgcttgtaacagtgtgctgattctaggtctgaattaaatttgttgtccttcatgtcttagaccatgttttttgtaaactatttttcagatcaagtattctgaaacgccttggacgtatgatgtgtcatgccgttgatctcagccaaggtggcttgctagagattaacattgaacacttcgtgagcgattctctcctcagttacatcgtcgataggttctctctctctcttagttaaactaagttattatgtcttttttcttttaccagacctcaggatctgctaagaatgaactttagatattcattgattgaaagtttagtttcatgtactactacgtttgcggttggatatgcacagatatgatggctaatttttcatgccttaaatagagttttagagttaatgttttcgattcttttcatgccttaatagtgttttagagtaaatgccttattattgttttagatatcaaggctaatttccatcctatgacgctgttataaatttagaatagtcctttgttctcacaatattgtttctagtcctgtttcgtttcatagttcacaacgttattactctatcatcatatacaactttacttgtaattgttgaaaaaccccagtagttaggttattagcatatataagaatgtcattagcttataaaactcatatgatagctttgattcaagcatatcattacagtttgattttttaagccatggactttggatattcatttacttttggtcatttacacgagaatatgtgcatagatatgattagatatgcatatatatatgaaggcaaattttcatgccttgataatattttagagtaaatgttctcaaattttcttttcaagtaattgttgctagctatgacgctgttatatatttataatggtcctttgttctcacattgttctagtcttgttttgtttgacactattactctcatcatacttaattaattacatatattttgtcatggttaaagaaaacaagtagttaggttattggcatatataagaatatcattatcttatagcactctcgtcaagacttgcttaaagcatacagtttgattttttttaagccatatgtactcaaaggcattggtctgtgacatgttatgctttgttcttcatattttacatgcttctgagttgattagtagttagtactataagaatttataattgtgttgttcctttttttttcaataacaaattgttgttactcttcttaatgatttaactcttcacgtaattatttgcagatcaagtaatctgaaaagtcttggaatttcaatctatgaaccaatgacgaacaaaggagtaatgaacggaatcgagaaacttccattgcttgaaactctcgtgatcttccactcctcgtttaaactggatttaaaagcaataggtcacgcttgcccacacctgaagacattgaagctaaactccttaggctcagggctggcccatgacataagccaggtaggctacattccccttctcgaatgtgatgatgatgctctagcaatcgctgaaaacatgcccaaactacg

SEQ ID NO: 166630 - DNA, 301 bp, Arabidopsis thaliana landsberg
tctactttggttgggatccttgagacaaccgtagacctaaaatcttcgacagaaaagtttcatgacatgtttgttgggaggccacacaatatctccgatgtatctccatccaactttcaaggctgtgagctgcatgaaggcgaaatgggacaagttggtgctatcctcttttggaattacgttcatggcaagtcaaattcatttttctctatttatataaatttttataagattcatcgattttcaaatcaaaataaataggaaacgggtggattgactcatatgttttatatattacttt

SEQ ID NO: 166631 - DNA, 526 bp, Arabidopsis thaliana landsberg
atatgtcctgtatgtagcaaaagggtgcagatgcatatggtggttgatataacatcccatcatagagatgtcttgaagatatcctttgttgtttcttttcagaaccttgtcaagtgaaatttcggtcgctataatgaatgtgatttatttgaaattccgtgaccgataattttacagtgagcggaaggaaatgtcttacagggaagatcgatattgatttgataaatatcaacatcctcatcgcgatgagttgcccccatgtatgaatcatcatcagcatccctctaaacatgtttccgatcaatttttatcgttcatcaacaattctgcattaccaaatcagaccaagcttgtgctgcctgattcaagtgtagaagacaagaatccgattaaggattcgtcagcagcaaaagagggtacatcgtcgtgtcctttatcggatagtgataaattggagaaggcaaagaagtgtgagtttgtacagggactgttgtcatcagccatgtttgatgatgaatgtgactct

SEQ ID NO: 166632 - DNA, 397 bp, Arabidopsis thaliana landsberg
tatgttaaacagggctggtgagttatctgctgctgagattgataacctcatgacaatcgttgcaaacccacgtcagttcaagatcccagactggttcttgaacaggcagaaggattacaaagatggcaagtattctcaagttgtctccaatgctcttgacatgaagctgagagatgatcttgaacgtctcaagaagatcaggtaaatacaaaaaccaacagataattcttatctttgttcacaattgcataaaacatggtgataatgtttctttcatgtttgacaaatggatagaaaccaccgtggtttgaggcattactggggtctccgtgtcagaggacaccccaccaccactactggtcgcagaggaaagaatgatggtgactcaaagaagcgt

SEQ ID NO: 166633 - DNA, 376 bp, Arabidopsis thaliana landsberg
  unsure (1)..(376): unsure at all n locations
atcaagtttcctgaagagaacactatccttcacagacacaacagctattcccaaaagctacttagctgtctcggtggggaaggaggagaaaagatacaagataccaacagagtaccttagccaccaagctttccatgtgctgttgcgtgaagcagaagaagagtttgggtttgaacaagctggtatcttgaggattccttgtgaagttgctgtgttcgagagcattttgaagataatggaggacaacaagannnnnnnnnnnnnnnnnnnnnnagagtgcagattcaatgccacaagtgaggaagtgatgagttatcgctcatcttcggattgcccgaggacaccatctcaccaacctcacagcccaatgtgcaga

SEQ ID NO: 166634 - DNA, 557 bp, Arabidopsis thaliana landsberg
atgtcaaagctcattctcatcctcaccgcacaaatcctcctcctcaccgcaaccgccttagccggaaaaaacggtgaagacttcgcaagaacaataaaccgaaaacacctcggcctcggcaaaaaagagaaactcacacatctccgtgtctattggcacgacattgtaactggtcgaaacccaagttccatcaggatccaagggccggttgcaaaatactcaagttccttatacttcggatcaatcaccatgatagacaacgctttaacattagatgtgcccattaactcgactgtggtgggtcaagcccaagggatgtacgttggagcagcccaaaaggagatagggttgttgatggcgatgaacttggcttttaagactgggaagtacaacgggagtaccataacgattcttggtcggaacacggtgatgtccaaggttagggaaatgccggtggttggaggcagtggaatgttccggtttgctagaggttatgtcgaagcacggaccaagttgttcgatatgaagactggtgatgctactgttgagtataacat

SEQ ID NO: 166635 - DNA, 2639 bp, Arabidopsis thaliana landsberg
aagtttggacggtgtgatcggctcgatttactaacacgtggactttccaccgtccgattcaattcccgttgaccacaatttaaagatctttggtttgcttgcttatatgagctttgatttaaattaacacgaaattcatgttataataccaagattttcctaagacaaattagactcaataaacaaatcttttgtgaagaattttcttaaatcaaaagatggtcaactatgcatatatatatataggtggtttcaacgtcaaatgtatataccaacacatcgcaaatacgatacaaaatatacacggggcccaaaactattaactaaaggctatatagaggcccagtttggaaaaagaacggagcaaagcgtttatgatctccagagagaccgttgtgttacagacaaaagccgttagtttcgttatgtgatgggagaacatgttgttacagttccgagcaaagacttttttcaacaacattgctcaagattctctggttactcttatcaccaaacgagttggattgggttacaggtttttgtcttcgttatgccaaccaaagaacacggctttagattccgaaggttacaagatactttttcagacagctgcaaaatcaggctccgtggtactgggaaagctcgctcatggacacatgatcaagtcctccttgaacccgtgtctgtacttgctcaacaatcttctgaacatgtattgcaagtgccgggaattgggttttgcacgccagttgttcgacagaatgcctgaacgaaacattatttcttttaattctttgatttctgggtacactcagatgggattttatgaacaggccatggaattgtttcttgaagctagagaagctaatttgaagctcgataagttcacgtatgccggtgcattgggcttttgtggagaaaggtgtgatcttgatttaggggaattgttgcacgggttggttgttgtgaatggtctatctcagcaagtgtttttgatcaatgtgttgattgacatgtatagtaagtgtggaaagcttgaccaagctatgtctttatttgatagatgcgatgaaagggatcaagtttcatggaattctttgatttccggttatgttcgggttggcgcagcggaagaaccgctaaatctgttggctaaaatgcatagagacggcctaaatctgactacgtatgctctggggagtgtgctaaaggcttgttgtattaacctgaacgaaggatttatagaaaaaggtatggcaattcactgttatacagcaaaactaggaatggagtttgatatagttgtccgtactgcattgcttgacatgtatgccaaaaacggaagtttgaaagaggcgataaagcttttcagtttgatgccttcgaagaatgtggttacgtataacgcaatgatatctgggtttctccaaatggatgaaataaccgatgaagcttctagtgaagcctttaagctcttcatggatatgcaaagacggggtttggaaccctcgccatcgacattttcagttgtgctcaaagcttgtagtgcagcgaaaaccttggaatatggaaggcagattcacgctctcatctgtaagaacaattttcagtctgatgagtttattgggagcgctctaatcgagctgtatgcgttaatgggttcaactgaagatggaatgcaatgctttgcttcaacatcaaagcaagatatcgcctcatggacatcgatgatagattgccatgtccaaaacgagcagcttgaaagcgcatttgatctgttccgacaacttttttcatcccatataagaccagaagagtatacagtttcccttatgatgagtgcttgtgctgattttgctgcattaagctcaggagagcagattcagggttatgccatacagagcggaattgatgctttcaccagtgttaagacgtcaagcatttctatgtatgcaaagtcaggtaacatgccgcttgctaatcaagtatttatcgaggtccaaaacccagacgttgcaacatactctgatatgatctcaagccttgctcaacacggttctgctaacgaagccttaaacatctctgaatcgatgaaaacccacggtattaaaccgaaccagcaagcctttctcggtgttctaatagcttgttgccacggaggattagtcacacatggactaaagtatttccaatgcatgaagaacgattacaggattaacccaaacgagaaacatttcacttgcctcgtcgatcttttaggtcgcacgggaagattatcagatgctgagaatctgattttgagctctggttttcaagaccatccagtgacgtggagagcattactgagttcttgtagagtttacaaagacagcgtaattgggaaacgcgttgcggagagactgatggaacttgaacccgaggcctctggctcatacgtattgctccacaacatttacaacgattctggagtcaattcttcagcagaggaggtgagagaactgatgagagatcgaggggttaagaaagaaccagccttgagctggatcgtaatcggtaaccaaactcattccttcgccgtcgctgatttgtctcacccttcgagccagatgatctacacaatgttagagaccatggacaat

SEQ ID NO: 166636 - DNA, 1891 bp, Arabidopsis thaliana landsberg
ctgtccgttcaacgtcagccccccacgtacgcgactatccaccgcctgtacaactcttccagaactccaccactcaacctcagggtggtggtgctccgcctcgatctaaagaggtccacttcaatccaccgccggaagagcctgctcagcaagatcctgagtcgccggaagagccagctaacagcaacccttcgtctcaagggaacaactttcaagaggaagttcctacgacgttgccggagcttcaagaagactcggcggtggctctgcaagatattatgtcagtgccaaacagggagcagtggacttgtgtattgtctccaattcctaggccaaaaaccgtgtggtaagtctatcttcctttaatttgttttcgtgttatctgcctttgtagtgtaagtagacttgtgaatcctggaagatagttgtgaatgatgggttttgttggatgtttgttatgtgttgtgtaacatagtagccttgtgaatactcgtgtgtgctcttgtgaatactcgtgtgtgttcttgtgaatacttgtgaatacttgtctttgcttcgatttgaatactcgtgtgtgctcttgtgaatacttatgaatactcgtgtgtgctcttgtgaatacttgtgaatactcatgtgtactcttgtgaatactcgtgtgtccttgttcagttctatacttgtgaatcgtgttctcttgttaatcgagtctcttgttaatcgtgttctcttgatgttctattgtggaagttgactttgttctcttgttaattgtgttctgttgctactcatgctcttgttatgttctatagtatgtcttgcattcttaattgtgttctgttgcaactcatgatctattgttgaacatagttgacttttgaacttagttgtgttctattctgttgtgtgcttttgacttttgaactcacactcattctcttcttaattgtgttctatattgttgtgtgctcttgttcagttctatagtgtgtgttatgttgtgaatctccctcagttctgcctgtgtaacatagtagacttgtgaatctgcctcagttctatagtctgttctcatagctgttgttgtgttttgattatttaacatgtttacttctttcattgttgcatgtgcttggaggtttactcgcgacagagggtctaaactggttcgaaagatcacaaggatctttactcaaaagttcaatgctccttactataattggtcatgtgttccattggctaaaagagagagactgtttttagagttcgcggtaagcttcctgactctttgctttgttcagtctttgttttattgtctgctcaagttcagttcactaacttcttcctttttttgtagaaaactcaccactaggatcccttaatcacatggactgtccaatattacttcaatgagatcgtcaagaggcgcttgaaggacatggttagcacctcaaggagaactcgggagcagcctccatggattggagaaactctgtggggaacaatgtgtgcttactgggacacagaagaagcctaaaaaggagtcagaactattctaaagctcggctctctgaccgtaacggtctcggtccacacatccactactctaggccaaagtcttatcaagaaatccaagatgaattggtaagtgtttcagcatcctttcatgtcttttagagtcgttcaaatcataagttagagttttattgtctgtcttgttcagttcaagctgtcttcgacttgtgatattgatctgtgtttgcaggaagagaaactgggaagaccagtccatctaggtgaggtgttcatccagacacacactaagtcggatggcacttataaaaatcggaaggcgaagatgattgctcaaacttatgaacggaatgtgaga

SEQ ID NO: 166637 - DNA, 1088 bp, Arabidopsis thaliana landsberg
  unsure (1)..(1088): unsure at all n locations
cgacaccacctaggtgtcgctcgacaccaaagaggatatagagctgcaactattgcagatggacgtgctattcaacttgatgactataacacgccagatatgttctatgctagtcattccaggtattctactcaccaagcccaccctccacccacttctacgaatatgatggaatacatgctataatagattctcaggagccaagtgataacgaatgaaaggattgatggtctgtatgatgatatacaagacttgaatgctcgattcaacaaagaggatgttattgtagttcagtcaaggagtgaaattcagcaccagacctctgagaaaccccacacgactacttgcgacactgatttacagaaccactcaacaccaagtctcagtgttgaccgacacgaccttggtgtcaatcgacactcatcaggaacagaccatgattcaacgtttgaaggagcgaaatcgagcaagcttaacaccaaagcgtcaacaacagatgatagtgtcaatgaacaatagattgatgttgagatagctgatgttcatggtacaagcaagcaaccatcagacgcagnnnnnnnnnnnnnnnnnnnnnnnnnnnnnnagcaatggtgttgatcgacaccaccacctgtgtcgatcgacacctcacacaggctaagccggagttctttgttagagctagctttcaggttgagttcagtgctgatactccacgcactacagtcacgtctcccactgcacctctactctttgctccacctccgaaacggcaaatgtactcatctcctcctcctaaacctcaaaatttcatcaataagagtttcaaatctccaaaaactgttttacggttaagcaagccacgagtttttcgtcgactgcttgttctttcttttgatgattgtgtaggaaagcggagtagaccacccatacttctgtcctgccctgctgacattcctcacttccttggtagagcacagacaccaactgcgcatacgccaccatggatgatgcggggttttactaggaagtatttccttcctccatttgatccacctgatccccaaactccatcaaagtcaagctat

SEQ ID NO: 166638 - DNA, 1670 bp, Arabidopsis thaliana landsberg
cttgttagaaggtgcaaataatccatcgtacgatgattgtcgtgaagagcagtcgcagttatccttagcatctcgactcatgcacaacaaggcatagtataatatgagtgaaaagttggtggactccatttgcgaaatgtttacagattttttaccagaaggaaaccaggctacaacttcacattaccagatcgagaagttgatgcgtaatttaggacttccatatcatacgattgatgtttgtcagaacaattgtatgctattttggaaagaagacgaaaaagaagatcaatgtcgattttgtggcgcacaaagatggaagcctaaggacgaccgtcgaagaaccaaagtaccatatagtcgtatgtggtatctacctattggagaccggttgaagagaatgtatcagagccataagacagctgcggtaatgcgatggcatgttgagcaccaatcaaaggagggagaaatgaataatcctttagatgcagtggagtggagatatttccaagagttacatccctggtttgccgaagaaccccgtaacgtttatctcgggttgtgtactgatgggttcaatccatttggcatgtctcgtaatcattcgttgtggcctgtgatcctgaatccatataatttaccccctagtatgtgcatgaatacaaagtacttatttcttacaattgtgaatgttgagccaaatcatcctcgagctagtcttgatgtcttcctccaacctcttattgaggagctaaaagagttgtggtctactggagtcgatgcgtacgatgtatcattgagtcagaattttaatctaataacagtgctactgcggacgataagcgattttccggcgtatagcatgttatcaggatggattactcatggtaaattgacttgtccaatttgtatggaaagtacaaagtctttttatctacccaatggacggaagacatgctggtttgattgtcaccgtagatttcttcctcatggtcatccatcccgtaggaacaaaaaagactttctgaaaggaagagatgcttctagcgaatatccacctgagtctttgacaggggagcaagtttattacgagaggttggctagtgtaaatccaccaaaaacgaaggatgttggtgggaacggtcatgaaaagaagatgcgaggctatgggaaggaacataattggcacaaggaaagcatcttgtgggagttgtcttactggaaagacctcaatcttcgacataatattgatgtgatgcatacagagaagaattttcttgacaacatcatgaacactctcatgagttaagggtaaatcaaaagataatatcatgtcaagattggatattgagaaattttgttcacgcccaggcttacatattgatagtagtggcaaagctccatttccagcgtatacattgacagaagaagccaaacagagtttattacaatgtgtgaaatatgatattagatttccagatggttattcttcagatttggctagttgtgtagatctggataatggaaagttttcaggcatgaaaagtcatgattgtcatgtatttatggagcgactacttccatttatctttgctgaactgcatgaccggaatgtccaccttgcactatcaggtacaatatatactaactatattttgttccaacgtttc

SEQ ID NO: 166639 - DNA, 1719 bp, Arabidopsis thaliana landsberg
gtaggaccttgctagtggacgacagcagcgccgagggggcaagatccgctgaacgtcatggtggccgttcgcctcgaaaaaacaatctcctcgtcgcggctctccttgtcctctccctgaggtggattgagtagcgaaccagtcgctgacttaattcgcaaaaagagagacagaccagcccgaggtagctcttctccaaggagagagaaatcaaaggctcgaactgatcgttctcctaggtcatctcctccacctcgattgatgggtcctcctccccctgtggtcacatctccccctcctcaacttagtggcgagaagactaaccgaggtgtaactcctcgacaggaagatgctgagtctcgggatgctcccctgaaatcaaaaatcgttcttgtgcctcaaaccaaatcactctcaggtttgataaatggccctcttcttcttctttctttacttttgcattgttcgtactctaaataacacatttttatcccctcttcttttatagcaatggaaacagagggtaatgttttttggtgcttcaaaacccgaaaagacgctatcttgccaacttttgatagatggcgtcctgcaatccgtgaacgcttcctacttcatgtttatcactcgtctcgggttagtattgcttctttcatgctttttaattttgctattccttcatgagctgacttgcttaaagtcaggcaaacagcgaactcaacgacatggttgagcattacgatgggttgctgcttagtagagaacaggacatcaacgcatagaagggcaagttttctacccttgaagccgaaatccactcccctctagttctaagcaaaagctagaggatcaagtcaaccatctctcttccaaactcatgaagtcaaactgcgaactgcaagataaatacagcagacacgagaaacttcaaaaggaactctcggttgcccaaggcaggctttccgaatctgaatcagccgcttatgctttgaacaaccaattcactgaacttgaggcaaagtataaagcaattgtcaagcttcgagatgccaagttggctaagtcagcgtcaaaagccataaaggaggtgaaatgtcgcggaacggagttgattcagggggctatccttttcattcagaccgagaagacaagatcggagctggaatcggacatcaaggatcacgaaagcaacttgctcttactggaccaaacccacgaggaggatttctccgaggagcaggaaaggtccgaactgaaagctgttttatctgagaaacgaagtcgccttgctgctcttcccgcttcatccttcaaccctcaaccctcaacaccgagtcaccccctttgagtgaatctagttttgattgggctggtaaattcccttattagagctctttacctataggttttacttatacttttttcctatgttttgattgacttgagctgttttcaccaagctcgagtgggtcggttgatattgctgcaaccgaggtgtctaccataccgatagggattgctcaacctgatcatgttttgcccgaagctcctctggtcgtgaacaatgagacggtgatcatcccggatgatgaatgtgatgtcgggcatgagccggatgctccttccgagcaagtccctaccactgaaccgaatgaaaccgagccgactgacgttaagctagagatggttatggatccctagtcgctgcgtccactttga

SEQ ID NO: 166640 - DNA, 326 bp, Arabidopsis thaliana landsberg
atgtataccccgatgcgccgggcgtaaagaaagtcttcatcaacgcacatattgaagaactcgatggtgaggaatggggatataatgaaggatgcctgagtattcccaggatcagggaagatgtgtacaggccgtctgcggttactatccgttacgtggatgaacagtttgttgcgcatacggaaaccttccatggtattacggcgcgcatcatacaacatgaatatgatcatattgaaggcaagctgttcatcgactacctgaaacccctgcgccgcaagatgctgcagggcaagctgaatgatatcagcaaaggaaaagtgaaa

SEQ ID NO: 166641 - DNA, 967 bp, Arabidopsis thaliana landsberg; identical to SEQ ID NO: 14850

SEQ ID NO: 166642 - DNA, 465 bp, Arabidopsis thaliana landsberg
gactttctccgggaatgaggaatcctacaacattctttgccggtactcttgtaagtctgttgcggaattgattcaacatgtagcaaattggttgaaccaaatctacatggatctttacaagaaatttctccagagtgtttattgtggtggtttgattactcttccacttcaggtttatatgcttttctttatatttgatttgagtctttgttagaatgtgaatccggtgactaaaccaaagggtcctcattttaacaaacattcggcttgtgattgtgtttctccttagagaattcttcatgtttgctattggaactgcagtggtatgaagagacagcccaagagagaaaacaaatgtgatggctacacaagttttaagttttggttctaaaattttcacctatgtgatggctacaaccacaagctttgttcctctacattagcaatcgctactacacctaacat

SEQ ID NO: 166643 - DNA, 1130 bp, Arabidopsis thaliana landsberg
actatgtgtagcatgtgtactccacttctttcccctctggcaaagagtgtctcaactccgatcatatgctcgtctctacgtagccgccacaccatcagcattcccagccctgctgaggagaaattaggtttctttctattgggcatgtggtcaactttaggcccattatccaagtcccggcccattcttaaaagcaaaggcccaaaccctaaaaaagagtggcccaggtctgttctcccaattttcttgtcgacgccttactatttgctgcatcgtttctctgctctctttggccatggactccaatcgagacgtgaattgattatcctaaggtatggtttttgtcaccttaaaacctggtcgctatattcatctctggatttgctttgtgagagtttattattgttgccttttgctcgacgttatgactttgggcatcgatctttgttggccaaatccgtttatgatttagttctgtcaacctgaatcttcgttgcccctcttattcctgctttggctggtcgaagtttccacgctagcagtgtattggtaccgttagtgtggtttgatagatatcgttgtcgccatcagatggaatggttatttcggattctcaccgaggctcccactcccaaccattaccaattgcccccaaagagtgaagaagtatggcattatgaccccgtctccacggagcggtggttaccatagcttctttcactttctctacccacacccgctaattatcgagctcttccaagtgatcattgaatatatggataatttgcaacgctgtgagagtttggacaagatcagcattatgaccgcatcttcaagaggtggttaccgcatccgctccgatcctctatatccggcagcctcccccgtggagcatcttcctaaaagctcgtttgcgttatccgcgcaagccgtctatgaccacttgttggtcgaggatttcgcgaagcccgtcttcatggtcgaatccgctaagatctcaaaagatctttcaaatgttgtaaacttttctcaaagtgaacatctttttggaaaactcatgaagtctctatttctatttcatgtatttcttctttgctttagtatgtatgaattgccctcgtttgaggttt

SEQ ID NO: 166644 - DNA, 443 bp, Arabidopsis thaliana landsberg
acatacttaatcgcttgcatcctaggctacatagtaaaatttattatgtagccagaacgaacggagcatgggctaagaattggtcagtgacttctatccctatcccattaactcgaatgagatttataaagttcatctccccatcttcggaaaaaatatcagttctactatttcctgatccgagacccgatcgttatgacttcaccttccaaacccaacactggaactcagagattcaagagaatgatcctatcgaatggaatcctttccacgaccagtctcttaatcaggtgaaagatcgacttcagttatctccacaaagtcccacaactctagcctttatcggcactaaaactgatcgcgagagagtgcacaactacaataccggtgttctcgctggtagcgtttcttacattgacggagtttggcttgaggttcgcgct

SEQ ID NO: 166645 - DNA, 367 bp, Arabidopsis thaliana landsberg
tgccgtttagaaagacatgtttatgcgcaattcgacaacacaaggccaaggaggcacgaggggcgccaatcaacccgcaccccggaaaagaccagagaccaacggccacgccggcaaagaggggaggggggaagacacccacagcccggagcgggcggacacacacaccaagagacaaggcagaccgagggcagcccaaaccgaccgaaggggaagagagaaaaccacccgcaagccgaaaaagaaaaaaggggagcaaaacacacagcgcagcaagccaggcccaccaaggcgcaaagaggacaaacaaagagagccgcacaagaaccaggaagacgggccaaagaccagacaggagccacaggac

SEQ ID NO: 166646 - DNA, 427 bp, Arabidopsis thaliana landsberg
tattcatacaggtataccggtcgataggttcatccggggcgaatcgaagctgtctacctggttataccgcatcgcgcttacccgcgcactggatgctgaacggataaagaaggcgcagaaaagaatggcctggctaaggccatgggcagggcaggggagcagggaagaggagcctgcacatttttaccatccgggtgtgcagtatgataataaagaaaaagcggccatcctgttcaaggcattgaagaaactgccggatgcgcagcgtgcggcttttatactgatcaggacagaaggattgagttatgaagaaacggcggcaatcatgcgcaccactgtaaaagctgtggaagcactgatgcaccgggccaaggacaatctcaggaaacaattgaccacctattatttcagcgaatgaacaaaagga

SEQ ID NO: 166647 - DNA, 822 bp, Arabidopsis thaliana landsberg
tctctcccatcacttagagaacttgatctcttctgtgttgtgtacaaagacgaagcttctcatgttaagcttctatcaagttgtcccgttctcaagcatctaaaggtgactctaaatagacgtgtgcaagataatgtgagaacgtttagggttgaagtgccttctttattgagattagactacaaagcaggtatgatgtttcgagaagacagtggtatgtctgatccgtttttggttacagacactccgaatttattgtctcttcacatctttgatactgtgggatactctctctcagtttggtacatgccccatcttgtcacagtagttactgatgagctgttccctagtgaaaaatttatgaggcctctctcttcggtcaagtatcttgcgctatctccgttcgatacaatggttccgtggtgtgacgcagttaataactactctcgacttgttgaatgtatgatacatctatctgagtatgacttgttggaatcacttttggttttgctctctaagtgttctaagcttaaagtttttctggtcgactccgacattccgagatggaatcatgacccagctttatggaatcaaccgagttctattccaagatgtttgtcgtcgcatctcgagatctttgagtgggacggatatgttggaagagaagatgagaaaaaaatcataaggtacattctagaaaactccaaatatttaaaaacagcgggaatctcaccgaattcaaccttcagtggtgaagagaaacagaagatggaggagttagaatcaatgcataggactccaacgtctgtgcttctgtcctct

SEQ ID NO: 166648 - DNA, 234 bp, Arabidopsis thaliana landsberg
tgggaagtcgctttcggcgatgagttcgatggggagttcgaggcattgccccaaacggtccaagacgagctgttggcctccgcgaaacttctcggtgcgtttggtcctcagttggggcgaccgcacgcagacactctgaacgattcgtcattcgcgaacatgaaagaactgcgcttcgatgccgacaacggagtgtggcgggtggcgttcgcgttcgacccaaagcggcaggct

SEQ ID NO: 166649 - DNA, 424 bp, Arabidopsis thaliana landsberg
ttgtcttttccagcatgccgaggcgatctacgcgaccatggcgctggatgcgggcttgcgcttcttcgtctccaagaacgccacgccggaggaattgctggacgccgtggaccgggtcctggcggtcgatacggcggtggagaaggccatcgtccgcgacatggggttgcgcgacgtgctggacgactcctatgtgcgcccgctgagccagcgctgacctgcagatcctgcgcctgctggccgacggcaataccctggcggacatcgccgaaaatctgggggtcgcctacaagaccgttgtcaacacgctgagccggatcaaggaaatgctgggcgtggaccagacctccgacctgatccgcatcgcggtcacccgcgggctggccgacctgggctgatccgccgacggcgaggctttactggg

SEQ ID NO: 166650 - DNA, 640 bp, Arabidopsis thaliana landsberg; identical to SEQ ID NO: 72287

SEQ ID NO: 166651 - DNA, 1118 bp, Arabidopsis thaliana landsberg
atggttcggacgtggcgttcgtctacgcaaagccacggttgctacccgatgatgatgattgaccacatccttaaggtcggagattcttcagatggtcgcgtagagagaggggacgaatcattaggtgaaaaagaggtctggattacagacccgaaactagctgaagttgttcgtagttcaatgaatatcatattaaaccaaaggggacaagatattcacatggtggaaaagacagagtatacactccccaagtttattgataatgttcatctctacatggaacacatatcatctcgaaacataaccgagaatttttactttccacctcttcctaaaggttctcaaatccaaaacatagcgatgtcctcttgtcctgacataaacaatgaagattgggttatggctgtcaagttttcaggatctaagttgaagctttatagacataacaaagactttcggtggatcgatatcgaaaccacgcatgagtgtataaaccctttatctagccttatgtactcgaagagagatcaaaggttttatttgcctgctcctggaggcaattacttgtgctcttgggatctcaacttcgataacgatcctaagttcaatgagttggtgtttcttaatctccctgagttgccacagtccgagtgggagctgttgaattcttgtttcaaggaggaccattgggtggagtcaccttccggccaaagtttcttagtcaaatggtaacgtgcgagtctaacatgtagacagaaatcttggtcaatgctaatttgggtcttatatgcgtgtgcaggtactctcacatcccttctcaacgatacaaagatccgatattgatggtgcttagagaggatgaagaaacagaagagggaacaagaaatatgtgttacaccgaggacattggagatctttgtatcttcctttcaaagagtgatcctttctgtgttgtggcaagctcttgccctggtctcaaacccaactccatctacttgatgggccgttgctttgctgtttatgatctcaccacccgaaccgcccgtcacttcaaagcccccaaaggtggaccagaaagagttcctttcctcccttattggcttcctccattttctatc

SEQ ID NO: 166652 - DNA, 2055 bp, Arabidopsis thaliana landsberg
attcaacattctaacatgccgctgcgatgaatgatgatttagggaggagacagaatcaggggattcagggttcgagttttgtagcgaggagtggagatgggaaggatgttcttcgtctgaagaagggtttgatcatcaagaacctctcgatcgcctcggttactcttacttgcagtatttcgagagatgtacaccttactctagagtccctctcatggataaggtttgttccccattcttggagtttgattccagaagcactttctttcattgttttatgattccataagtctctgtctactttcagatcaaagagttgggagaaagatacgtagggttgaggtcattgaggagtgttgatctgtctcctgcgagttggatggctgttgcttggtctgccttttcttctttttcttgtttcagaaaacaaagttaaggttaatgtagtaaaatggtgacgatgtttgattgtatgtgtaggtatccaatctatcacattcccatgaatagaagcataaaagacttgtctacttgcttcctcacttaccacacgctttcttcatctttccaaggtgcattttcactttcctcttggaagtgtgtattaatgtattagtacattcattccccatttctaaagtcccttggcattggaacagatgtaaaaagggaagaggagaaggagaggataagtgtgagtgcatttgggatggccacttacaagatgcaagggaggctatgggataatgatagattgctatgctatttgagcgcagcagattcttggctaaagcagctaagggtccaccaccatgacttcacctacttcaccactactcctcattatctttgatatatgtagtgttttagatcattacttggttaacagtctatttagctttgttgtttaagagtagcacatatcaataatgttggattgttgttacttgggactctttgggaaggataggtactgactttttcttcacaagacttttatatcataaatttagtttggggtcagattgatgatgatgggctcaatacatttattcttttctaatgttttgtggctttctgtttgtacaaacgcacgttctcttgattttggtatccttctctttttaacaattttctaaatttcataacaaaaaagaagaagatatatacagagatatatattgatttacataaaagattattacaaaaatctctagaactttcgacatgatatttagatatatttatgttacaattatctcaaatttagtttcttagcctctagaataatattctgatattatgtacttactaggaattatttatggtgttttagattgtttctgaagatacctcttaaaattggatcatgttttaggcttctttcgacttttgtccaaatttaataaattggatcattggcccaaaataaagttggttcgtcttttttatgctcacccctaactaaaattacaccaaaaaaactatactgtttctaaacattatcacattatagtattatacacaacaatattaactcataaaataaaaagaataaatgtgtgccttaatattcacgaattttcttaagaataatactcttatagagattttagtagattttcttctgcacccatcttcttttttgccactagaaaaagttacataaaaactgtaagttgataaataaataaaactgtaaattccaacaattagtttggattttccacctgaaatctttatagactatgtttattcctcacaataaatagaagatatgaagaataacatcacgcatagtcgatatgcacgtgagataatatgttgagatttagttaccaaaaaagaatgattttgtctgagaaatgaaattcctctagttgtgaatttttcaaacttggtcggtcttgtgagttgagtatctttttgaggggaggtgggaataataataagcaaaaatatcttaaaaaaaagcgaaagctgagtttgaccaatcaccgacccggaagattgaaactataattagtactacgtttggttgtcatcaaaatggtc

SEQ ID NO: 166653 - DNA, 1373 bp, Arabidopsis thaliana landsberg
tgatattcatcactctatattttgccaagttgtcaacactgataaggagtactgttttcgatattggttaacgaagaatgaattgttacagaaacacatcgctggtttgatcaggaaatgtggggttggggtttcctatatatgcttccccttaccaaacttcatgacgaaaaggaagggtttctagttaatggagaactcatgattgttgctgaggtagatgctcttggattcattgaccccttaaatgagtcagaggaatctgaagatccaacccaacctctgaaaaagattaagcttaatgatgatggtgcggtgtctagtgatttgcttgaggaagcttcacccagaaaggaaagcatggaggtcaacggatttcaagttcttccttcacaggtaagaaatttaagaatgctgcaaacttcttgttactttacaagagacgagatcatgtcttcgtctatttccaaatatctaaataaatgttatcttatatgcattgtaaaattatgttttctctcttttgcaggtagaatctgtgagacttatatttgaaagacaccctgacattgcatcagaattccgtgcaaagaaccaatatctgaggaaagcatgcatggatttccttctcagccttgttgagacgctgtgccagtcactgcaagagttctccaatgaagatcttgtggaagcagacatcgcgctgacatacttgaaagatgcggggttcaaggtggactggttggagaaaaagttggaccaagtaagagataagaaggagaaagagcggtcttgtttggccaagctccaagaaacagaggaaactttactgaaattgaagcaaaagtgtacagagctagatgctctaatggatactgaaaaggcagagttgtcagctataagaactcctctatcatttgaagatgttgtttgatgcattgagttcttaggcatttggtgttctgatatcttagtttctcccttggtttcaaaataagatttgctcttgtaaggtaattgaacttatgtttgaagtttccacctttgtacgctatgatttatcaagcaagtttcagctaccacatttgatttagcacttagtttcttgacgacatatttattttcttgcgtctgaagcaaagatttgttctttggaagttcttcagcactcggttcattggcatgttttgaaatgaatcctcttatgtggaaagttttcatatttttgtgaaggaatgttatacaattgtgacactaatcttgaagataaaagaaaaaaagtaatctctttgggctataaacagaggtgtggcacttgaaaagtcatggctcgtggctcgacgtagacttctttaatattcattgatattgtc

SEQ ID NO: 166654 - DNA, 985 bp, Arabidopsis thaliana landsberg
  unsure (1)..(985): unsure at all n locations
actttgctcttagacttgctatagatgcactattgaatgcaacacaagaaaaaccattgacttggtccatttgtagtgacaaaaccgacgctgagcacatgttattgaacgacaaatgccttcaccgtcatnnnnnnnnnnnnnnnnnnnnncaagtgaaagtgaagcttcgtagcggaatagtgcccccgtgccttgaagatggatgcaagtctgagctcactcttgaaagttgtagcatggttttgacaccaaagctgattgagatgtggaaacgtaaaatggaggaggacttaattcccgatgctgagaaaatctactgcccatatcgaagctgctcaatgttgatgtccaaaaccgagctttcaagagaagccgaacaatccaatgtccgagcatgtatcaaatgctctgaactcttctgcattgactgcaaagtaccatggcattctgatttgtcctgtgctgattacaagagaattcactctgaacgtctggttaatgacatgatgcttaaggttctggcaaacgaccaaatgtggcgtcaatgttccgagtgtaagcacatgattgaactgactgagggttgcaatcacataacttgcaggtaaatatattgaatccgacaaagctacttcatatggatagttttatttcataatgtcttcttacattcattgtgtagatgtggatatgagttttgctacagatgtgggcacaaatggactaagtatcatgcttaccgttgccaacttatggataatgatgaagatgaagaggattataatcttcatgttgatgctgaggtcaacaatgatgatgatggtgatgacgatgaagattatgtatttgatgaagattatgaggaggatgacgatgatgacgacgatgatgatggcacaacatacagcttagaagactttcgaagagagatttcgtgaatcatcgagaccaatatatgttaatccaaagagattaaattatg

SEQ ID NO: 166655 - DNA, 1326 bp, Arabidopsis thaliana landsberg
aatcatgaaagatggataggccatatcttaagtgtgtataaggctgactctggggcatttgcaggtagatctttagtggattcagttgaaaaaggtgaaccggatgatgaaagggcagatgagacagctgagtctgttgatgcaacatcactagagtctacctctgttcattctaatcctggattgagttcggatgttgatatagctgcagccggagaaagtaaaggctcagaaaccatcttgaagcaattagaagtcgataacacaatcgttatcgtaggaaatgttacagaaagcaaagacaacgtgcctatgaagcaaagtgagataaataataacacagttccagggaatgattcagagaccactggttcaaagcttgatcagctatctcgtgctgttccgcttggccttgatgagttcaagagcagagcgtccaattctagagacaaatctttgtcaggccaagtaactggcgttattcataggatggagcctggtgggaaagagtacaattatgcagctgcttcaaaaggtgcaaaggtcttatcttctaacaaggaagcaaaaggagcttcaagcatcatatgccgggacaaagacaagtatctccgaaacccgtgttctactgaagggaagttcgttgtcataaaactttcatatgaaacgttggtgaacacaatcaagattgcaaatttacagcattactcttccaatctgaaggattttgagattttggggaccttggtttacccgactgatacgtgggttcatctagggaattttacggctttaaacatgaagcacgagcagaactttacatttgcagatcccaaatgggtgagatatctaaagctaaacttgctaagccattacggttcagaattctactgcaccttgagtttactagaagtctatggagtggacgctgtggagcgaatgctggaggatttgatatcaatccaagacaagaacatattgaaactccaagaaggagacactgagcagaaagagaagaagacaatgcaagcaaaagagtccttcgaaagcgatgaagacaagagtaaacagaaggagaaggaacaagaagcctcaccagagaatgcggttgtgaaagatgaagtatcacttgagaaaagaaagctgccagatccggtggaagagataaaacatcaaccaggaagcagaatgccgggggacactgtcttgaagatactgatgcagaagataagatcgctggacgtgagtttatcagttcttgagagttacttggaggagcggagctcgaatatgggatgatatttaggagatggacctgaggcgagc

SEQ ID NO: 166656 - DNA, 1485 bp, Arabidopsis thaliana landsberg
gagatgcagagaaatgcaatgaccgtaaaggatatagcggttgcgacggtcttgtatgaccgagatgctccgccatattttgacgatcaagggaaggaaggtaaaaaaaaaattcaacttgctaaatatattgttagatagctacaactgttgttatcgtcaggaaagcaagaagttaaaagtatatctatatattatcatacatatagaagagtatgtgtttatcgttagcgacagataacaacattaataaaagaaaactttatcttcaactttctatatctcgctagtaataatattatcgaattcattaacatatcgttaacgcctgattcgttgattgacttgcagatgcccttcagcgagccctgaaggatgctgattacgagggggatgacatttacatcagccgcatttttaagaataaagaggattgttcaactaagctcgctattcatgcgatccggaggaagttctatttcatttacgcaaagtccgggccaaatgttgtggcggctgtgtgcgtcacgcatacatgtccatggtgggtttaccaactaagctgccagatagggatatgttcgaggttaggagcacgacttcaacacacacgtgtagcgtggatgctagaggggacttccacaagcaagcatcaacgactgtgattgggaagttgatgggaactaaatacataggagtgggccgtggacctcgacctaatgagcttagaagaatattacgccaagagtttaacctcaacgtctcttattggaaggtttgaaggacaagagaaatagcgatggacaatgcaatggggtctgctatggggagttacgctctaatccaaccatactttaagctgcttttggagacaaatcccaactcacttgtggcaatggaaactgaaaaggatgcttcaggggtagagagattcaagtacttgttttttgcccttcatgcctgtgttctaggttatccttacatgaggaagatgatagttatcgacggtacacacctacgtggacgatatgggggatgttatttgcagctagtgcgcaagacgccaatttccaaatattccccattgcatttggaatagtaaacagcgagaacgatgaggcgtggacttggttcatgactaagctgacggaagctattccagatgatcccgagttggtgtttatgtcagataggcagtcctctatttatgccagcatccgcaaggtatggaattaatctctatgttatccgataatgtggggtttaccatcaggctttttatgtttacataagcctttttgtactgtaacaggtttaccccatgtcatcacatgctgcttgcatcgtccacctcaagagaaacattgaggcatactttaaagtcgaacagttaagtgccttggtatcaagtgcagctagagcttatcggctaactgacttcaacaagatttttgctgaaattaaggctacgcatggaccgtgcgc

SEQ ID NO: 166657 - DNA, 4626 bp, Arabidopsis thaliana landsberg
  unsure (1)..(4626): unsure at all n locations
gatgatgatggatacaatgtcgtaatagcggacaattgtcagcgtatttttgtttacggactcaaactattatggaacatagaaaacagagatgctgttttgtcttttgctggtgggatgtccaaggcatttcaaccacccaagccttctccatcacgtcagtatgctcagagaaagttacttgagggcaaccagaagcattctgaatcagaagtttctcaagatgaaccaactaaacagccttccacaggcagtggaaatctcgcttcccaatctaaggagcctgcggaagttctttcaccttcatcagaaccaattaaaacagagaactttgcatctttccctcttggtaagtctatatcttaaacctttggtagttaaatcttaattcgtttcttatttgcatcatatgttccatcttattttccttacatacatgtatgattcaccatatttatctatctcgatgcaggagccacaaagactggcgattcaaatgatccagaggaagaaggaacccggcattttatggtgaacgttgttgagccacaattcaatctccattcagaagacataaatgtaagcatagatcaaacttgagtctttactacattacttctgtatgccattcaagtttagaagaatgcatgataacttgaaaatttgtctttattggcgttatttagtaaagcattatcaccttgtagttacattatgttactctgaatgttgtcctgtacgattctttcaattcctggacagtttcttccatatcttgaaactagataaaactgtaaatactaactcttcaagtgattctgataaagtaagtagaatacttacagttggccaggtataccaaatctatgatatgagtttattgatccaagctttagagttgaattttgtatccgtaaatgttttcagataccttgcagtgttttttaattgtcatcactatttacattctctcttcatctaccagggtagatttttgctcgctgctgctagtggccgtgttttagcacgatcatttcattcagttgttcatgttgcgtatgacatgattgagaaggcagctcaaaatgaaaatgatcataatcctgaaaatggcactgacatgacatggacacgcatggaagtgtccatgatgttggagcatgtacaagctcatgtggcaccaacagatgtcgatccaggagctggggtgcaatggctcccaaagattagaagaagctccccgaaggcaaagcgtactggcgcactgcttgaaagggtttttatgccgtgtgacatgtactttcaatataccaggcacaaaggtgtgactcccgacctgaaggtaaaacctttttttagtgaaagcacgatatttgtagtcttttcttcttttgggatgatttatatgcatcagcataaaggcattaagttcaacagagcctctgtagtcgaccaaaaagttattcttttgttctcattatacacaaaagtactactgaagagcatttctacaattgttcatacactaatgtgtaatgttactctcacatatatttcacactatgcacttctcttgcactcggagttatctgtgtatcactcttttgtaacattgtttgaatgcaagacttatattattatatgctgcangtgaagccactgaaagagcttactttcaattctcggaatattacagcatcgatgacatcacgtcagtttcaagtgatgacagatgttttgtccaatcttttgtttgcaaggttaccaaagtaagtgtagctgtgtgcaagttattgtcacttcctgaattttatgctttatataaaaaaaaattattgttaaaatgtagcacctgactatatcgtattacaaatgcatatgaaattcagggctcataacgacagtttaaaactttctggtgaagaagatgatgaagttgaagaggaaattgatgaggtagttcctgatggcattgaggaagtggaacttgcgaaaattgaacttgaagcgaaagaaagggataggatgatgcttcttgatgacatcagaaaattgacgcagaacgaaagtaactcaggaaacataaatctcgaaaaggaaagcgatttctggatgatcagcggtgggaggccagtattggtgagaaaagagttctataagaagtaaacaaaaacaattctacagcagatgatatatggtgaactaagtgtctcatatgtaggtggaacgactgaggaaagcgtatctcagtgtgcaacagtctaggaagacagcatatacagcactgcggacttctgtgaagaatgctgcggagctaaggctgttggaaaaagataagaacaaaagaccatcctctgccatgcgcatatccttacaaatcaacaaagtcatctggtctatggttttagatggaaaaacattcgctgaggttgaaatagacaatatggtaagcgatcgaatataatagattaatataccttggcggatggctggtcgagcgttttgtgtattcgttatttctctggatctttagtaacaactaatcattgaacataacttttcttcagtttactgctgttacttgctagccttgggtgttcaatttagaccaactctgttttataaatttttggcaagaaaatccctaaaatgtttcacactgcttgcagatatatgattttaaccgggactacagagatattgggattgcccaattcacaacgagatatgttgtcctgcggaactgtctgcctaatgccaaatgtgatactgttctatcagcttggaatcctcctccggaatggggcaagtgagttcctttcttttaaaactagcacaagtaattttgatcaaatttatctcctacattcatcccttcatagagtatttttcaatcttggctctcgttttccatattcagctagaactagttatgcagttttcattttacacatctttgaagacttgtagataattcgtgaatggttgtgtgcttgtaatcggtagatgctctttccgcactactatttttcatttttgttagtcgtagaaactcactgtggaaaccaaactggtttacagcatcaggtctggaaattctaaagtgttatatttattgaatgcaggaaagttatgttacaggtagatgcaagacaaggagccccaaaagatggacaggctccgtatgaacttttccaggcaagtcgttctttaccatacatgttctaatgacactaataatataagactgaagtttatactctatttactaaaatggagtttttttgtgttcgcttgacaggttgaaatatatcctctaaaaatccatttgacagaaacaatgtatacaatgatgtgggagtatatctttccaggagaggagcaacattcacagagaagggaggtttgttgtttatccattttacttctctagctgatgggatttagcttgctgctaaggagttatgacacgtgcttgtattttgtatcccaggaagtttggaaagtgtcaacaacctcaggatcaaggcgcaggaaaggttcattcgctcaagaagcggcagcattgctcgctgcatctgatctaggccaggtcaaattttttagcagctgctacctaactcttttattcttacattcatatcatctatagaagtcttcatacctattttcctaaaatgatttcaggggtcaaagaatcaaagcctgaagtcaagcacgatccgtggatcagggcgagaactgagaagaacatcctctttttacagatcatgggaggagactgtggcagagtctgtagctactgagcttgttctatcttctatggagcatcaaggtgaatcctcaaaaggcaagctgaaggattcaaacacttccaaggctggtggccgttcagttcatgaagaaaaaaagggggaaaagtcattagaagacaagaaatctaggcctcaaaagataatgcaattccaaaccatcaagattagtcaggtatgtcagttgattacctcatctaagcaaaagttcaagaagttttccaagcataataaacttaactgtcgtaatatggttctgagctaggtggaattgttgatcacttacgagggctcaagatttgttgtgaacgatatgaagctttgtatggacacatttcatcgtgttgaattcagcggaacatggaggagactcttctctcgagtaaagaagcacataatatggggagtcctcaagtcggtaaccggaatgcaagtaagaccatttacaccagcaatcgatgcatatgttttacgtctccctgattaaagaaaactcatgtttcatttggtggtatttgtagatgaagaaattcaaagacaaagcccatgttccaaaagatgatattggtttgagagacaaagacgagtcagggagaacagatcaggagtcaggggcatgggtgaaacgtcctggtgacaatgcaggtgatggatttgtcacatcgattagaggtattttcaatacacaaaggcgaaaggccaagaaattcgtgcttgagaactatgagaggggaagcggagaatgacttccacggggactggagtgacagtgatgtgaattctctccttttgctcggcaataaactattcttta

SEQ ID NO: 166658 - DNA, 1680 bp, Arabidopsis thaliana landsberg
gaacgaacctcgaaaattctcggtggtgagagctggagctaagagaatactatacggtaaagatagcagagagaaattaaaagccggaatcgataagttagctgatgctgtttccatcaccttaggccctagaggttagtgaattagatttcgattttggctacgatttgaagtttttttccgggcagaatctgattatgagcaaaccaacccttctctgggatttcgaattgattttttttcaatgtggaaaccacgacgcagggcgtaatgtagtgcttgctgaaaaagatacaatcaaagtgattaacgatggtgtcaccattgctaaatctattgagcttcctgacactattgagaacgctggagcaacattaatccaagaggttattcatattcatggtggctaaatgattccccttcttttccccattgttagttcattctttgagctctaaatggtatcaattagttatctgaaccttgcgagtttctatcttgtgtaggttgcgattaaaatgaacgaatcagcgggtgacgggacaaccactgcaatcattttggctagagaaatgatcaaagctggttctttggctattgcttttggagctaatgctgtttctgtgaagaatggaatgaataagactgttaaagagttggtcagggtgttgcagatgaaaagtattcctgttcaagggaagaatgatattaaaggttactttatacttattactaaataattatgatccaactcctgtcttaattttgaaataatagggattttttgtgttctgtagctgtggcttcaatctctgctggtaacgatgaatttgtggggaatttgattgctgagattgtggaaaagattggccctgatggtgtcatctccattgaatcatcttccacttcagaaacgtctgttatagttgaggaaggaatgaaggttagtttcaaacttaagttggatgttttaaaggcttcacaatggcagtttcacacttaccattgttaacattatcaaaccattgagtttctgtgattcatgagcaaatttcttttgtacagtttgacaacggctatatgtcgcctcatttcatcacaagcaggagaaatctacggcggcaattcgttttattttaaattcttgtgacggatcaaaaaatcaggtgagccaaagaattagttccgctactggggaaaacctcacaactgagtgcaccgctccttataattgcagaagatatctctgcggaagtgcttgacatactgatggtgaacaagaagcaaggactgatcaatgtcacacatgagaaatgtccaggaatgttggatgggaaaaaggctttactacaagacattgcactcatgacaggtttttatcaatcatttgtactttccaagtaaattcttactgaaaattttcaggtgataacatgacaaatcatatacacaggagctgattatctttccggagatttaggcatgtcgctcatgggtgcaacttcagatcagctgggtgtttctcgtagagtagtaattacagctaattcaacaactatagtcgcagacgcttctactaaaccagagattcaggcaagaattgctcagatgaagaaggttctagctgagacagataattcatatctttcaaaaaaaacaccagagagaattgctaagctc

SEQ ID NO: 166659 - DNA, 1027 bp, Arabidopsis thaliana landsberg
taaggtttttggaacattgtttggtgttggtggagctcttgtctttatattctatagaggaatagagatccgcctatggtcaactcacgttaacctagtgaaccaaccacgtgactcctcacgtgatgcatccactcaccatatttccatccttggggctcttctagtttttgggggaaacatttccatctcactttggttttaaatgcaggcaagttttttgtttgtttttcagatttcttatttttgtgtttgttttgtgtcctaaggcattaggcatgtacgtgtttttttttgtttttgttttgttcataggttaagataagcaaacaatttggagggccttattggaacgcgactctaatgaacatgatgggaggcgtagtggctatgcttgtcgctctttgctgggaacacgatttagatgaatggagattaggatggaatatcagactattaaccattgcttatgcggtaaatatcaatccatccattattaagtatatatatatgtcttgttgtctaattacaaattcatacaagtctatacatgtgtgaagattcatttaggttggccttgaatatatgtgctttatgttgtccattgtaggcaattctgatttccgggatggtggtagcagtcaacgcatggtgcattgagtctagaggaccgttatttgtatcggtatttagccctgtaggacttgtgatcgtagctcttgttggatcatttttgctagatgaaacacttcatttggggaggtacaaactcatgtatattgtattgttttgtggaaatggatttgatatacgtatgtatatataatatggtttatttttacttgaaaacattacagcataattggtacagtgattatcgttggagcattatacattgtgctatgggctaaaaacaaggaaatgaagagtatgcttacgacatcggatcataatgaaacaaataagactagcaaagatatctcagtcaacaatctcccaacattaagtacaaatgtcccttgatcaa

SEQ ID NO: 166660 - DNA, 525 bp, Arabidopsis thaliana landsberg
ctggccaatcgttcgtatctgatcgcgcccgatggcgagatccgcgcacgctacgacaagatccacatgttcgacgtcgatctcggcaatggcgatgtctacagcgagagcgtcaactatcaggcggggtcgagcgctgtcgttgcggaccttccctggggcaagctcggtctgacgatctgctatgacctgcggtttccggcgctgcatcgcgctcttgcgaaggcaggtgccgcattcctcgcgggaccagcggcttttacgcgggtcacgggggaagcccattggcatacgctgcttagagcccgcgccatcgagacgggcaccttcgtcctcgcggcggcgcagggcggccggcatgagaacggccgagagacgttcgggcacagtctcatcgttgcaccgtggggcgaagttcttgccgaaggcgggaccgagccgggtgtcgtcatcgccgaggttgatccgcatcggattgatgcggcgcgcagcaaaattccctctctgacgcatgaccgcgcgttc

SEQ ID NO: 166661 - DNA, 1337 bp, Arabidopsis thaliana landsberg
tatgattttgttttttgttttcctcgtaaaacccatgagtgacccctttggttcctctttgctttaatcttcaagaaagaaagaaaaaaatgccttcttttgcttttggatctcatcaccatttggcgaatcctacagactcgccgccgtactccgtcgaaattagcatcgacggtgactcctccgacttggattctttgtctcaggtcgatttagagtccggcggtgtaccggcgccggagaaacagctacattccggtggtaagaagaggagaactaggaggagaaagaggaggaagaagaagaagaagaagaaaggtggaagagattgcaggatctgtcatcttcctttagagactaacaaagaagctgaagatgaagatgaagaagaagaagatgattctgatgatgatgaagatgaagaagatgaagaagaagaagaagaagaagaagaatattatggtttgcctttgcaattaggttgctcttgtaaaggtgatttgggtgttgctcatagtaagtgtgctgagacttggttcaagatcaaaggaaacatgtaagtttctcttcaagactacttttgttttttttctgcaaaattctacagattctgtgagaaccaaagtagtaaagaatgaaactttataaggaaaaaatgtatttcctttttatgtactttgagtcttttttcttgtctgaattctagagatccatatcattacttcttagaaagattgtctgctgaagctggaatctacagtttttgttttgtggccatcaattgttgtctacttgtgtctcatgttcttatgttcctgcacatttttggatatttattgtttgtagtctcaattaaagccagtttctgtgatttgcctcaaaacattcagtttcaaaggcttgattttgcagctgcattgagagaatcttgcagtcccttttgctgagaaagtttgatttttaccaatcaagattgtactcatagctctgtttagcttctgtttctgtgtctttgcattttcctagcttcttatatgtttacaagatgaagcaagtcccctaagatttttactgactagcatttatcatattgttgtatgaatctgagcaggacatgtgagatatgcggcgcaatggctctaaacgtggctggtgaacaatctaatccggagagcactgcttctacacattcacaagcagctgcgggacaatctctaactcagacagagccacgaggaatctggcatggtcgccctgttatgaacttcttacttgctgctatggtcttcgccttcgttgtttcttggctttttcacttcaaagtcctcaagtgaaac

SEQ ID NO: 166662 - DNA, 2818 bp, Arabidopsis thaliana landsberg
aaccaataaagctttgtggcatatgcgactaggccatccatcttcgaaagttttatcttctgttttcccatctttagaggattttgatagttgtagttctgatttaaagacaatgacgtttgtgtgacgtttgtgttcgagccaaacaaactcgtgcaagtttttctgaaagtttcaataaagtcgaagagtgtttttctttgattcactgtgatgtttggggaccatacaaacatgcttcctcttgcagagctcattactttctaaatattgttgatgatcactctagagcggtttggatacatctcatgcttgctaagagtgaggttgcctctctccttcaacagttcattgcaatggcatcccgacaattcaacaaacaagttaaaacagtaagaagcgacaatggcactgaatttatgagtctcaaatcatattttgctgaacgaggaattgttcatcaaacctcttgtgtctatacacctcagcaaaatggacgtgtcgagcgtaagcatagacacatcttgaatgtagcacgttcactcttatttcaaggagaacttcccattagcttctggggagaaagtgttcttacagccgcctacctcataaatcgaactcctactccaattctagatggcaaaaccccatatgagattctctactcacaaccaccgtcttatgcttcacttcgtgtctttggcagcctctgttttgcaagaaaacacactggtcgtttggataaatttcaagagagaggacgaaaatgcatattcgttggctatccccatggacaaaaaggttggcgtatttatgatattgaatcacaaattttttttgtcttcgcgatgtggtctttcaggaagatattttcccatttgctgacaaaaagaataaagatacattctcttcacctgctgccgtcattccatctccaattttgccctatgatgatgaattcctcgacatataccaaattggtgactttcccgctacgaatcctctcccggctattattgatgtcaacgactcacctccaagctctcctataattactgcaacaccggctgctgcatcacctcctcctcttcgtcgcggtttacgtcaaagacaagaaaatgtgcgcctaaaagactatcaagcttattcggctcaatgtgagtcaactcaaactctgtccgacaacattggtacgtgtatctaccccatggccaactatgtatcgtgtgaaatattctctccaagtcatcaacacttcttagctgccattagtatggttgatcctcctcagacttataatcaagccattcgagagaaagaatggcgtaatgcagtttcttttgaaatcgatgctcttgaagatcaaggaacttgggatattacccaacttccgcaaggagttaaagctattggatcaaagtgggtatttcgtatcaagtataactctgatggtaccgtcgaacgttacaaagcgcgtcttgtggctttaggcaatcatcaaaaggaagatattgatttcaaaaagacatttgctccagttgtcaaaatgcaaacagtgagacttttattggatgttgcggcagcaaaggactggaaacttcatcaaatggacgttcataacgcctttcttcatggtgatttaaaagaagacatcaatatgaaaccacctccgggttttaaaacaacagatccatctcttgtatgcaagctcaagaaatctatctatggtttgaaacaagctcctcgttgctggttcgaaaagttgtctacatctctactcaagtttggttttactcagtctaagaaagattattctcttctcacatcaattcggggatccaaagttcttcatgtcattgtctacgtcgatgatctagtcatttgcggaaatgatgcctcagttatagctaagttcaaagcttatctcaataaatttttcaaaatgaaggatcttggtcatttgaaatattttctaggtattgaggtagctagaagtcctgaaggtatatttttatctcaaagaaaatattgtcttgacgttattgaagaatgtggtctttctggttcaaagcctgcagagacaccattggaacagaatcataaactagcttcatcgacaagtccaaaatttcaggaaccggaaaaatatcgttgtctagttggacgactggtctatctgactcatacaaagccggagatatcttatgcagtaaacatgctagctcagttcatgcaaacaccgctctctgatcattgggatgctgctattcgacttgttcgttacttaaaaggctgtccgggacaaggtatcctcctctcctccaaatctaacttgcagctaacgacatttagtgactctgatcacgcgacatgtccgatcacaagaagatctctgactggttatttggttaaactcagcaactctcccgtctcttggaaaacaaagaaacaagacaaggtttctcggtcttccgctgaagccaaatatcgagccatggctatggcatgtcaagaactcatgtgggtaaaagaagtacttctctcgctgggtatcgctcacgatcaacctatgcatctagtttgtgatagtcaatcggctctccatattgcttccaatcccgtgtttcacgaacgtacgaaacatatcgaaaccgattgtcacttcatacgagacgagttcacttcaggcaatttaacgttctctcacatctctaccactgaacaaccggctgacatttttactaaggctcttggtggtcaacaatttcgatttctacgagacaagttgggcgtttataatctgcacgctccaacttga

SEQ ID NO: 166663 - DNA, 1706 bp, Arabidopsis thaliana landsberg
  unsure (1)..(1706): unsure at all n locations
atgaattccgaaattttaagacctgaatccccttcttttgacgacgtcggctctagtaatgacctctgcacctggccgaacgacatcgccggtccccactatcaatccacatgcaccctccaatctcttaatcgattgggagagttctgtcggattccggccaaagtaatgagggatttccagatgccggagccaaccgaatcaccggaggagcaccgacccgggttcttttgcgtgtatgagatttacttcaaagggtgtggcttgacttttcctctccccgaagccctcgtgcgttacttatcggccctcaaaatcgccttaccccagctaacccccaacctcctccggactattctaggaattatcaccattgcggcggaggcggantacgtcatcggggttcccgaactgaacgaacttctcagtgtgaggagttcttcgaagaaagtcgggtacttctctgcttatccgaacgccaatagaaatctcatctcgcatcttccaaataaggacgagaactggcatcacccgtggttcctagttaaaaagagccctccctcgatcaggaacatcccggacttcctccccacaaagtggaccaccaagcccggtagttattaggtcatgcatatgagcttcattttacttcttgccttatttgaccaattctattttccacttcgcagcttttattgcaccaacccttcctactgctgagttcggcgaattcttcaatatcgtcatcgaaggggaaaccctttggaattccttcactcttgaccggttcatagaagctaatcacaagcttaggatgatcccccctgttcatctcctccagctgcctctgccccctcttttacctaaagggacttctgctcgagccatcgcagctcgtcgcaagacgatgtccaagtcgattgtggaggcttgcgaggtgaacaaatcattcctccaatccacagtcgacaagaaggtatatagcagaaccctgctagtcgatgatggcagcgccgaaggggcaagatttgccggtgcttacagacccactcctcaccgcgaaggtcatagcggccggtcatcccacaaggagcgatcacctcgacgtgactcaccccggcccacttcccgaactggactcagcagcgagccaattgctgacctgattcagaagaagagagacagaccatcccgcagcagctcctcccccaaaacagacaagacgagggcccgaactgaccgctctcctcgaccgtcgtcgccaccccgatctatgggtcctcctcctccagtcaccgtatctccttcgtccggatcaggaggtgaaaaggcagagcggagtgctaaccctcggcgggatgaaactaaggtccgagatgccggaactaaagctgttttggttcctcagaccaagtcgctcacgggttagaaatttcctcccattttttgttatcacatttttaccatttcgccttattgactcagcgttcttcgaccggtttgacgttttttaacagcgatggaaacggagggaaacgtctttcgatgtttcaaaacccgaaaagacaccatcctaccagccttcgatagatggcgtcctgcaattcgcatgcaattcctactccacgcccatcactcatctcgggttagttcctttttcccacaatagatcttttaatcttttgctcctttactctatcgctaac

SEQ ID NO: 166664 - DNA, 1473 bp, Arabidopsis thaliana landsberg
ggaataatggctacagctacgtatccgcctcctccaccatattacagactctacaaggattactcagaaaaccctaattctgctcctgaacctcctcctccgattgaaggcacctacgtctgttttggaggcaactatactgtgagtctcctccacatttccccctctttaaaatcttcatctttatgtgttttagtagttttcagtttttttggttcgtagactgaagatgttcttccaagcttagaagaacaaggagtgcctcaactttatcccaaagattctaatcttggtatgtcattgttttagctttgtgaatcaaactcaaaacccaattgttatttgctttctagagtacggtttttggttcttcccttaattggaatcaaacttattacatgagttcatttgcctctttgtttcgttgaagaaagtttcaaatatctttgtgtgtagattacaagaaggaactcaggtcactgaatagagaactacagttacatatattggagcttgctgatgttcttgttgacagaccttctcaatatgcgaagagaattggtgaaatttcttcaatcttcaagaacttgcatcaccttctcaattccttgaggcctcaccaagtaaagaagctctcatctttcgattaattacaacatggtttcaacggtttttgttttttcatcgttttgatctttctcttgttgtataggcgagagcaacgcttattcacattatggaacttcaaattcaacagaggaaacaagctgtggaagacattaagaggtttgtgtatgctacttaagttttctgtctttagggtgtgttaataatttaatatcaatctatcaagattcttcggaagctttgttggtagttcttatgggtccgtttgatgttttggttgtgtgcaggaggagagaagaagcacaaggactccttaaggatgctttcgtcactttagatggtcaataaagtatactatttttttttaatcccattttgtgtaaattagcgctaataacctatgccctcgaaacttttttttattttgtttttttataatgtatttacctttgtttgtttttgtctttgcatcttaaaagtaagtaagctcagtaatcatcacctgccttgatcatgtatgatatgtctttctctggatgttagaaaaaaacagtagtaaggtggatccaaagctattacaatgcaacctttgttttctaattttaacaaaaatggatccaaagctatctttgaaggtgatttcaaacaagtcattgagttggtcaacgggaagagtcttaattttggattcgggaagcaaaagcctggcaacatcggtttgaagatatccagtttgtttggactccaagatcaaacaatcatccagcagatcaaacaataatctttttttaccatcatttttatgctccacaatttattattgatgctctacattaccaagtacta

SEQ ID NO: 166665 - DNA, 266 bp, Arabidopsis thaliana landsberg; identical to SEQ ID NO: 78028

SEQ ID NO: 166666 - DNA, 1171 bp, Arabidopsis thaliana landsberg
  unsure (1)..(1171): unsure at all n locations
tattctctgtattgattatgaaaatgattgtgtgttgatgatgtttaagagtaataatggcagatacgattccacgctcagaaatactttctcaaagttcagaagagtggtgctaacgaacatcttccacctcctcgacctaagaggaaagcgagtcatccttatcctataaaggctcctaaaaatggtgacttttgatcatcttcttactctgttttcttctttgctttaatcattttctaatgatttgctatgctgctgcagttgcttatacctctctcccgtcttcgagtacattaccgttgcttgagcctggttatttgtatagctctgattcgaagtcattgatgggaaaccaggctgtttgtgcatctacctcttcttcgtggaatcatgaatcnnnnnnnnnnnnnnnnnnnnnnnntgaaggtaggttttactagtggttatgctttcagttgatgagattttgagttagttgtatttgtgaatcgtgttaacaatggggtgtaatgaatttgtgatagtagaggaaccgggagtctcggccacggctcctctcccaaataatcgctgcagacaggaagatacagagagggtacgagcagtgacaaagccaaataacgaagaaagttgtgaaaagccacatagaggtaagacttgttatcttgttacattatgtgtttttctagtagacatctttgagatttacgctgacaatggagctgttttaatgcagtgatgccgaattttgctgaagtttacagcttcattggaagtgtcttcgatcccaacacatcaggccacctccagagattaaagcagatggatccaataaatatggaaacggtatgagacacgtttaatcagactcagtccctactctgagcctttgttgaaaaattcaatcctgatgataataaagaagcttctttgatattgtttctttttgatacatcaggttcttttactgatgcaaaacctgtctgtaaatctgacaagtcccgagtttgcagagcaagtaagtagtaatctcattcccactctcaatgaaatactgaaagattaatactttcttggtggatatcaagtaatttcgtaattattaatttggtgctttgatatgtagaggaggttgatatcatcatacagcgctaaagctttgaaatag

SEQ ID NO: 166667 - DNA, 2980 bp, Arabidopsis thaliana landsberg
atggctggagctcctgcgaacgtgaacacgaacccgatcccgaacccgacagtggaggtgagaagaacaatttcaccctacgatctgacctccgctaataatccttgtgcagtaatctcacatccattgttgactggaagtaaatatgatgaatgggcttgtagcatgaagacggcgatgtgttctcgcaagaaatttggattcctcgacgggacaatctcaaaacccgtagaaggatctctagatttggaggattcgtggacaattcaagcacttatcttggattaagatgagtatcgatccggtggtgaaaaagaatgtttctcatcgtgatgtggcgaaggatctctgggatcatttgaagaaaaggttctctgtgatgaatgggccaaagcttcaacaactgaaatctgagttagcgtgttgtaagcaaagagggcttacaattgagacatattatgggaagctaacgaagatttgggatagtatggctagctttcaaaccggtgcgcatctgcaagtgtggtggttgtgtgtgcgatcttggtgctcttcaagagaaagatgctttgtttttgtctggtcttgatgatgctttgtttcgaacggtcagatcgagtcttgtgtcacgtattcctgtgcaacctttagaagaggtatacaacatagtgcgacaagaggaggatttgctcaggaatggggcaaatgttttggatgatcaacatgaagtcaatgcatttgcagctcaaatgagaccgaagctttatcaaggaagaggtgatgaaaaagataagagtatggtgtgtaaacattgtaatcgcagtggtcatgcatccgaaagctgttatgccgtcattggctatccggagtggtggggagataggccacggagcagatcattgcaaactcgaggtcgtggaggaaccaattcgagcggagggcgtggacgtggtgcagctgcctatgccaatcgtgtgacggttccaaaccacgacacatatgagcaagctaactatgctctcactgacgaagaccgtgatggtgtgaatggtctcaccgacagtcagtggagaaccatcaaaagcattctcaactccgggaaagatgctgcaactgaaaagctaaccggtaagtttacttcaccctcttggataatggacactggagcctctcttcatttgacgggaaaatttgatatattgatgaatgttagagatatggacccaattttgatagttctagctgatggtagggaacgaatttcggttaaagaaggaacagttcgacttgggtcaaatttggttatgatatctgtattttatgttgaagaatttcagtccgatttaatctcaattggacaattgatggatgagaatcgatgtgttttgcaaatgtctgatcgcttccttgtcgtgcaggaccgcacttcgaggatggtgatgggagctggtaggcgtgttgggggaacgtttcactttcgcagtacggagatcgcagcatctgtcacggttaaagaggagaagaattatgagctgtggcataatcggatgggtcacccagctgcgagagttgttagtttgatacccgagagttctatttctgtttcttctacacatttgaataaggcatgtgatgtttgtcatcgtgctaagcaaacaagaaattcttttcctttgagtatcaataaaactttgcgaatttttgagttaattcactgtgatttgtgggggccttatcgcacaccgtcacataccagtgctcgttattttctaactatagttgatgattactcaagaggggtttggttgtacttgttgaacgataagagtgaggcgccatgtcacttgaagaatttctttgcaatgacagacagacagttcaatgtcaagataaagacggtgagaagcgacaacggaacagaatttctgtgtttgactaaatttttccaggaacaaggagttattcatgagcgatcttgtgtggctactccagagtgaaatggcagagttgagagaaaacatagacatttacttaatgttgcaagggcgttgaggtttcaagccaatctaccaattcagttttggggagagtgtgtgttgactgcagcatatcttattaatcgtactccaagctcggtgttaaataacagcacaccatatgaacgtttgcataagaaacagcctcgatttgatcatttgcgtgtttttggaagcttgtgctatgcacactatcgtaatcgtggtggtgataaatttgcagaaaggagtcgacgttgtgtctttgttgggtaccctcatggtcaaaaaggatggagattgtttaatcttgaacaaaatgaattttttgtgtcgagagacgtggttttctcagaactagaatttctatttcgaatttctcacgaacagaacgtaattgaagaagaagaagctttatgggctccaatagctgatgggcttattgaagaagaagttcacttgggccaaaacgcaggcccaacacctccaatttgtgtttcttctccgattagcccttctgcaactagttcacgatctgaacactcgacgtcttctccgttagacactgaagttgttccgacgcctgcaacttcaacgatattggcttcgtcaccctcctcgccgacgaacctgcaatttttgcccctgtctcgagctaagccaacgaccgctcaagcggtcgcaccaccggcggtccctcctccacgacgtcaaagtacaagaaacaaagcaccgcgctgtgactcgttaaggattttgttgtcaacacaacagtctgtcaagagtcgccatctaaacttaattcgattctctatccattgcaaaaacgggatgatactcgacgtttctctgcctctcatactgcttatgttgctgcaattacatctgcgattgaaccacgatcgtataaacaagcaatgatggataaaagatggatttaagcaatgggtttgagattgatgctc

SEQ ID NO: 166668 - DNA, 1527 bp, Arabidopsis thaliana landsberg
aaacgaacacaaaggatgtgttctcatgaagtccttgtatggttttaaacatgcaccacgatagtggtacaaaagatttagcaagtttatgacagatgagaagtttcagagaagtgatcatgatcagtgtgtatatgtgaagacagtgaacaatgaagaacttgtttatcttctgttatacgttgatgacatgttgattgcagcgaagaatatgtcagaggttaacaaggttaagaagagactcagtagtgagtttgagatgaaagacatgggagctgcaagcaagattcttggtattgaaatcaaaagagatagagtgaatggagttttgtgtttatctcaagcaggatacttgaaaaaggtgctcaagagattcaatatgagtaattgtaagtcagctattactcctattggtacacattttaaacttgcatctgtacaagatgattcagaatgcatagatacagtaaaaactccatgctcaagtgctattggaagtgtaatgtacgctatgatcagcacaagaccggacctagcctatgcaataggactagtcagtcgtttcatgagtaaaccaggattagttcactgggaaggaatcaagtggctgttaaggtacagaaaaggatcacatgatctgagttccatgtatacctaagaaaaagatctcagtgtcattggttactgtactcagatcatggtggagacttgatagaaaaaggtttactagtggatatgttttcacagttggtggtaacactgtgagatggaaatcaagtttacagcatgttgtagctttgtcttctacacaggctgagtttattgcccttacggaagctgtaaaggaagcaatttggattagagggttactagaagacatgggattgcagccaaaacctgcaaccgtgtggtgtgactcgcagtcagctatttgtttgtcaaagaacaatgccttccatgatagaacgaagcatgtggaagtcaagttctacttcatcagagacatcatagaagctggtgaggtaaaggtcaggaaaattcacacgtctgtgaatcctgcagatatgctcacaaagtgcataccagtaaagaagtttgagaaagctttagacgttctaatgctactcaggtaagactcttaagtcttgttgccgaaggttaaattcatgaagtgcagttcactaggagatgatgaaaagtagaatcaaggtggagtgttatggtatttggtttaatgcttggttatgaggattgaagaccggtttacagaagtcgattgaatcacattgcaagctggttaaatgaaagactcttttcgcgagagagggtttcattatgttgactctttataaagtcttcttcttcttcattgtgttcgtgtgtgtgagtttgttattctgttgtaatagaaagctgagagactccattgttgtgagctcgagcttgagacttgttcatctcttgattttagtggattgccgaattgattcggccccagacgtagacgtgatctcatcgatccgttga

SEQ ID NO: 166669 - DNA, 2808 bp, Arabidopsis thaliana landsberg
tagatcttttttcttttcctgttttcctcctttggtcaaccttgtaggatggtgctaaacccctttcctctgattcataggtacactgttgccattttgatgcttatactcttgaacaaaagagttatactgcttcctccaaagattgggtcactaaagttcggcgattacctaaaatcaggtatgtagacactggtttctcccttatgggacttatggatgtaagcactgtattgatatttctaggttttaaacttgacttgaattatagggggatttgttcttggaaggactctttctgtgctcgtgaccatgactgttgccacatcaatggcggctcgtcagggagttttcgcaatggcagcacatcagatatgcatgcaagtgtggttggcggtatctctgcttactgatgcactagcttcatctggacaggtattagattctcagcttggttttcatacctagagattttggctatagctttcttcatctctttggtattaaatagaatgtaattaagcctcgtgtgtcttgttgagcaggccttgatcgcgagctctgcatccaaaagagactttgaaggtgtgaaagaggttactacttttgttctgaaggtctgagcctacttcccttttcgcagttcatattcactttttggggatgctacttgatctcttgttatatatatatatatagagagagatgtaacgtgtttggtgttgtacagataggagtggtgactgggatcgcactggctattgtgttggggatgtctttcagttcaatagctggtttgttttccaaagaccctgaagttctgcggattgtgagaaagggtgtattggtgagtgatgtaattacatagagtgggccgagcttttcctgttatattcacgtaacatgcattcagtttgtagcggcgactcaaccaataacagcgcttgcgtttatctttgatgggctgcactatgggatgtctgacttcccctacgcggcttgctcgatggtaaggaagagagagagagagagaagtcctctttgttaaaagaaaagataagatatagggtgattgattgatttgtgtgtgtgtggcagatggtggtgggaggaatatcatcagcgttcatgctgtatgcaccggcagggttggggctaagtggagtgtgggtggggctgagcatgttcatgggattgcggatggtggctggattcagcaggtaaagaaagagctacctgtatctatctataaataaatacaaggtgaaccaaaagtgtaatttttgtggtaataataaagctctcaaatgtgtgtgtgtatggtagattaatgtggaggaagggtccatggtggttcatgcataccagtgacaaggtgagagagcctcttctacgcttcttcttatagtttttattctattttttggggacctgcaattgcaaagcttttcttgttaactctgtttcctgtggattatatggcagcgtcttgcttaaaactgtgaaagagagatagagaaggagagagtgacgtgcccagtcatcttcttcatcaccttttcacatatacaacaaccacagatccaaaaaactgtcttttataattcgatttgatagattttacttattagctagctttgtttgtcactcatttttcgatcatcaatatataaaatatgtcgacttgtgaatttacgacaaagaagaaaacttaatgtaggcaaaagccaaaaccgatgcttgattgcagtgctgtgtatcaaaaacacatatttgccgtatttagctacattttgacaattgtgtagtgcagcaatatccacgaagaatggtgaataaatattccttattacagtatttaaaaaaatatcggattagaaggaaattagtgactgtaaatgttaagctttgactaaaagataagggataaaagagataagaatgcagccagtcaaaaccttagaaattactgatatgagattttcgataaaaattaggaattagaagaaattagtgaatacgaccgtataaatatcaaacctcagatagatagagtaaatgaaatgtatagagaggtaaagtgggaattttgacattggtgggtttaggggaaaaacagagagaaagagatggattcgtcgtcagtagggaacaccaacaggtactgggtcctccgccacggcaagagcattcccaacgagagaggcctcgtcgtctcttccatggtttggtcctcttttcttcttcatcatctattcgtctccttaatcgcctatacataaaattctctgctgctggcaattgtaggaaaatggtgtcctccccgagtaccagttagcccctgatggtgtcgctcaggctcgtctcgccggcgaatcgttcctccaggtttggtttgctttcatctctttatttgcctaccctaccccccaaatagaaaaaaaacactcaaccttttcatgatcaacattcagcaactcaaggaaagtaacatagaactggacaaggttcgcatttgctactcccccttctccagaaccactcacaccgctagggttgttgctgaggtcctcaatctcccctttgatgctcctcaatgcaaggtagacatacgtgtccctaaaggatgctcttttatgcatcccacatatttctacatttgctcaaacctatgtttatccgtaattcaaaggttgtttcttgctgagcagatgatggaagatctgcgcgaacgctattttggacctacatttgaactcaagtcccatgacaaggcactttctcattaacttacctatgacggaaacg

SEQ ID NO: 166670 - DNA, 1041 bp, Arabidopsis thaliana landsberg
tcacactcgaaaaagggtttactatagtaactgggatctcttcaccgctatgaaagcgagttggagagataccatgtgtgcctatatggccccggatcctcccacatcggaggacttgcccgaggtttgtgggtaaggtttccatatatatatgagcttaattatttatagctaataacatttttagaaaggtttttaaaaaatattttgtattatttttaaaaaagtgaattatagatttttttaagtaaatccatttgtatttttcatgaatctgaattgatgttttgatatgtggcagggagattatgatggagtatgcaaaggaaataatgaatttaggtgaattgatctttgagcttctatcagaggctctagggttgaataattctaatcacctcaaagacatggattgcagcaagtctttggtcttgttcggccagtactatccaccttgtccgcagcctgaccatactttaggcttaagcaagcacaccgatttttcttttctcaccattgttcttcaggggaatctcggtgggcttcaagttctccatgataaacaatattggatcgatattcctcccgtccctggggctcttgtcgttaacctcggagatcttctccaggttaaagaagtgactttttagctttgtaacattttagctctatctttgttaggaatatcatatatgaaataatatggaatttaaagtagtaagtaaaagatataggctagttatgatttgaatggagatgtgagttgattttttatttgaatttgtgcagcttataagcaatggcatgttcataagcgtggagcacagggtgatagcaaatagaccgtctgaaccgcggatttcagtgccatgtttcttcagcaccgtgatgagggagagccatcgagtatatggacccataaaagagcttctgtcagaacaaaaccctcccaagtatagggacaccaccatctccgagttcgcaagcatgtacgcgtctaaggagatcaatacctctgcgttactccgtttagagatctga

SEQ ID NO: 166671 - DNA, 1137 bp, Arabidopsis thaliana landsberg
atgcctgagagagatacagttgtttggaatgcattgatttgtgggtattcacgaaatggttatgagtgtgatgcgtggaagctttttatcgtaatgcttcagcaagggttttctccatctgctactacacttgtgaatttgttacctttttgtggacaatgtggttttgtatctcaagggagatctgttcatggtgttgctgcaaagcctggccttgagttggattctcaggtgaagaatgcgttgatttcgttttactctcgcgtttttagttgggttcatcagaagtcttgtttagagaatatgagacgataaatagcacagtttcttggaagtacaatgattggtgcctatagtcagaggggtttacaggaagaagccatcactgttttaaagaatgtgtgtgagaagaatgtggaaattagtccaggcactatcatcaattttctttctgctgatgttaggcaccagccactacattgtcttgttgttaaatgtggaatggtgaatgatatatctgtgggtacttctttgggctgtgcatattcaacgtgtgggtgtttgtgttcagcagagcgtctttatgggtttgctaaacaagatagtattgtcggcttaacttcgattgtttcatgctatgcggagaaaggagatatggatatagcagttgtgtatttttctaaaacgcgtcagctgtgtatgaaaattgatgctgtagctttagttggaattctccatggatgtaaaaagtcttcccatattgacataggaatgtcgttacatggttatgcgatcaaaagcggattgtgcacaaaaacactggttgtgaatggactgataactatgtactctaagtttgatgatgtagagactgtcctgtttttgtttgagcaactgcaggagactcctttaattagctggaactcagtgatatccgggtgtgtacagtctggaagggcaagtacagcttttgaggtgttccatcagatgatgttaactggtggacttttgccggatgccattacgatagccagtttgcttgctggctgttcccagctttgttgcttgaatttggggaaggagcttcatggctatactcttaggaacaattttgaaaatgagaactttgtttgcact

SEQ ID NO: 166672 - DNA, 712 bp, Arabidopsis thaliana landsberg
taaagaccacggtatggcttgtcttacattgagtgagttaaacgcatggaatacatttccaatgtatgaggcatcaatacattcaactcaaggaaatctacagttcaacgacaatcaaagttacaatatggctcatggttttatcaatccatatatgcctatagagtcacaatccatgcctcacaagagtcaacaacaacttcagctcaacaatgattgtgtcaatcatgactcatattacaatgcaactgttttatcggccatggtaccaccaacaattgattctcttcatcaggtaatggtactaatatttttcagcacatgaactagatttgatagtttcaatatttttagcaataacatatattcatagaagtatttttttgtgatgtttttttttcaggacactttaaacaatacaattctttttccaacgacactacaagcaataccgacatctgtgtcacacaatacgtacatgagttcatatccttcatacaatactgttgaagttgttaaagctcagctcaatgcattacaagattcaagcactagccaaacacaagaaacattttctcgtgaaaccaacttatcgtctatagtcacaagggatgaagcagatccagtggataagtatattgattggaacaaagttggagaaactgatattgaacatgattcagtcgaagtccttgaggctttaggtttgaag

SEQ ID NO: 166673 - DNA, 1439 bp, Arabidopsis thaliana landsberg
gttaccgggtcaaccgggtcactgggtacggtttcgtttccatttcctccgattctcgtttcttcttcagattccttcatcgattagggtttaggaaccttgtcatcggaaataatttcttgtctttgtttgttattcgaagcttcttctgtttatttgatacatattctctcttccagttactctatatggaaccattcgttgttaaggagaacatcgtcgcatctgcttcttcgccgatgaagaagcgacggatcgatcacactgagtcagctgatggttctgcgattaacgcttctaactccagtagcatcggtggtaacgatacggtgatgaacatggcggagtttggtaacgacaactccaacaatcaggagtctcaacaaggttacatatactacttccttgtatctcaattctagttgttgcctcattgagattttttcttcttcttcgttgttacttgttagctagaaattttcatttacactaatcaaatcattcttctgtttcagtttgcactttcttcaagaagccaacgaaaagtaaaaacataaggaaaagaaccattgacgctgatgaagaagacggagattcgaaaagcgaaagctctattttacaaaatctaaagaaagttgcaaaaaccgatagcaacttgtacttttcttctggaccatctactagaacgagtggagctcctgagagacccgtttttcactacgattcatccaaggaaatccaggttcagaacgacagtggagcaacagcaacccttgaaactgaaaccgactttaatcaagacgcacgagctatccgtgagagagttcttaaaaaagcagaccaagcattgaaagggaataagaaaaaggcttctgatgagaagctgtacaaaggaattcatggatatacagatcacaaagctgggtttagaagagaacaaacaatctcgagcgagaaagctggaggctcacacgggccattaagagcttctgctcacataagagtgtcggctagattcgattaccagccagacatttgcaaggattacaaagaaaccggatactgtggatatggagattcgtgtaagttcttgcatgaccgtggggattacaaaccaggatggcagatagagaaagagtgggaagaagcagagaaagttaggaagagaaataaagctatgggagttgaggatgaagatgatgaggctgacaaggatagcgacgaagacgaaaatgcattgccctttgcttgcttcatttgcagggagccttttgttgatccagttgtcaccaaatgcaagcattacttctgtgagcattgtgctttaaaggtatgatcatcacaattacgagtctgttttttttttagttgtgaagaaatgtgtgaaactagcgagttttgtttaatgtaatgatgcagcatcacacgaagaacgagcg

SEQ ID NO: 166674 - DNA, 3536 bp, Arabidopsis thaliana landsberg
attcgagtaggaggttgagaactattcgggtattctaaaaattcggttcggtttcggttcgggttcgggtcggttcggttattttagtaaaaatataaaaataatcaaaaatacccaaaatatttttgggttcgggttggattcgggtattttactcatatatactcaaatctacccgaaatacccaattacccataaatatattggttactttttatacaaatataaccaaatgtaaccaaaatacttaaattacctaaaagaaaactataacatttgttacttttatcccaaatatatccaaatttatatgaattactaaaaaaatctagtataatcggatttataattttaattttgggtgtttgaggtatttcaaatatatatataactaatatatataggttacatttgtattcgggtacccacgggtattagattcggttcggattcggttcgggtagtgaggtcgaggacccattcgggtaattctaaaaatcggattcgtgttcggttcggttatttttcgagtttttcggttcggatattcggttccgggtattatgcccagaactatgtatgaacctttacgtatgtatggaccgttttattccaacaaatatactctaaaatattctggataacaataagataagcggtacactagttatttaaattatcaattgtccacactatgggtattaaaccaatctagattactaagagcacctccattattttttttacaaaatgtctaatataataaaatatagttgataagtttaaaatataaaaagatgtaaaatttaatataatttttttattaaactattaatattatgtggatgagatactcataggttaatcagaaggttgtttgaacttaaaaaatcaatgttgggtggcttaccaagaagtactttagagcatttctagtggatcgagcctttcaatggattctttcggttttttaagtataaatttctgaaaaatgttggatgagagtttcaggtttttttttttttttttttataatccaagggtagtcttttttagtaagaattttagaaaaaaacttattcctttaaaattattttatttcataaaacttaacaaatattgcaaattataaaataaaacacataagttattttcaaacattttataatagatgtgcaaaaaaaaactgaaataacgaagttctaaaaatatggttgtgaatttttttcatgctcaaccaaatggtttttaattataaatgcatatctcgatcacgaactcgattttaaatgctcatcaaaaactacgataacacacgaaaacagcaacgactccaaagagagccagcttttttctttttagttagttttgatttatttttttcaatttaatcaagagaacttcataaaaatgtttccatttatcaccaccaaaaatgctcttatatgataaagtacaaaacacggaaaatgatctcgtgatgatacgtagggttagtaatcaatttttttaaacctctcggaacaatatatcacctgttgggcaagggtgggatccatcgcggaaagcggacgaggtagcttgctagcgatgatgatggcggaacattacgagtggctcacaacgtcaagtgtgatggttcatggtttgcaaaagaacattacattttgtgagtgagagactgaaggtgattgttaaatagtggtatttgaagagttttttaattaaagtaactactttttttggctacttatgtaacgtaaccaaacattaatatattttctataactctcctgacaaatttcatagttaagcttacgtgagtaacgtgatgtaatagtttcattatgcattacctactaaaaagtaactttcagatatgtatgagtgaagactacttatagagaaagatctcgtgatgctttgcatgatgatataagtaaacaagtatttccagcttcctaaaattatataacaaaaccgtcagacagaactaaataccatgcgtcgagatgggaagtgaagaccacaaacggttgcagtggacgcgttattctatactgtatagtgtataacatatgtaagaatccaaaccctcctttgcgtcatatgtgctccaaatctagttcaaagatcgatgaatcacttgatagtagtataactcatttgattgaacaaatatatcttgattcactcttttgttttgttacctgaaacacgcttacgaagaggattcatgtcatcgctttatctatcattgatttgaagcgtctttattagaccatacattttatctttctagattgttaatcaaatgtcctgtgtccatgttcaagtgataatgtgatatccctaagtgtatcggtttaattggacaagaatgggcttaaaccaaataagggtataatagtcttttcatataatcagtaatttcgatagccaaaatgagctatataagccgaacaaaaaaaaacctagctcacgctgttgaatcactgaagagagaaagcttgaagacggcgagagctccatcttttctcaggcatctcttatcttcaaatcacaatggtaattagggtttacgctttcgtttctctcgtcttagtctcttccccaacaactactatatgttacttcgctttcctgattccgatcgatctagaacagtagcttagcctcttcctttcaaatccatattgcatagaaagattagggtttgtgttttcatgaatcagagaaccaagtatcgaacagaaagtttaggttatgtgttgattagggaatttttgatgtttggctgtaattgtgtgatttttgttactgcgtgtagtctctggttgcaaatgaggagtttcagcacattttgcgtgtgctcaacactaacgttgatggtaagcaaaagattatgtttgcccttacctctatcaaaggtattggaaggagattggccaacattgtctgcaagaaagccgatgtcgacatgaacaagaggtattgatttcaatcaaacttcaacctttggaaagttagaattgaaattagcagtctctgtttgcatttgatttgatttgtgtatgtgttttgagtcttgttttgtaacatttaggtcctatagtgtacactttgaagccaattcgagttacttttccatcttctagtttccatgttgaaccttgctcttcttttgactttgtgacctatctttgttagcagtctctgtttgcattgattagctagtgtgttgttgaggttcagcaaatagttgtgttagcatattgtataattcttgtgaatcccaaattgcactttctctggattgttgtctaatattggtctcaacttttcaggtctggtgagttatctgcagctgagattgacaacctcatgactattgttgcaaacccaagacagttcaagattccagactggtttttgaacagacagaaagattacaaggatgggaagtactctcaagttgtctccaatgcccttgacatgaagctcagggatgatcttgagcgtctcaagaaaatcag

SEQ ID NO: 166675 - DNA, 1710 bp, Arabidopsis thaliana landsberg
atgaattccaaaattgaaagacctgaatccccctcttttgacgacgccggctctagtaatgacctctgcatccggccgaatgacatcgccggtccccactatcaatccacatgcactctccaatctcttaatcgattgggagagctctaacggattccagccgaagtaatgagggatttccagatgtcggagcctaccgaatcaccggaggagcaccgacctgggttcttttgcgtgtacgagatttacttcaaagggtgtggcttgacttttcctctccccgaagccctcgtgcgttacctatcggccctcgaaatcgccttaccccagctaacccccaacctctccggactattctaggaattatcattattgcggctgaggccggatacgtcatcggggttcccaaactgaacgaacttctcagtgtgaggagtgcttcgaagaaagtcgggtacttctcgacttatctgaacgccaatagaaatctcatctcgcaccttccgaataaagactagaactggcatcacccgtggttcctagttaaaaagagccctgcctcgatcgggaacttcccggacttgctccccacgcagtggaccacttagcgcggtagttattagttcatgcatatgagcttcatttacttcttgccttatctgaccagtttctattttccacttcgcagcttttattgcacctacccttcctactgctgagttcggcgaattcttcaagatcgtcatcgaaggggaaaccctttggaactccttcactcttgaccggttcatagaagccaaccacaagctgaggatgagcccccctggacatctcctccagctgccactgccccctcctttacctaaagggacttctgctcgaaccatcgcagctcgtcgcaagacgatgtccaagtcgattgtggaggcttgcgaggtgaacatatcattcctccaatccacagtcgccaagaaggaatacagcagaaccctgttagtcgacgatggcagtaccgaaggggcaaggtctgccgttgcttacagacccactcctcaccgtgaaggtcatagcagccgatcatcccacaaggagcgatcacctcgccgcgactcacctcgacccacttcctgatctggactcagcagcgagccaatcgccgatctaattcggaagaagagagatagaccatcccgcatcagctcctcccccaaaagagacaagacgagggcccgaactgaccgctctcctcgaccgtcgtcgccaccccgatctatgggtcctcctcctcccgtcgccgtatctccctcgtccggatcaggaggggaaaaggcggagcaaagtactatcccttggcgggatgaaactgaggtccaagatgtcggagctaaagctattttggttcctcagtccaagtcgctcacgggttagaaatttcttcccatttttttttgttatcacattttttgccatttcggcttattgactcagcgtcgttcgaccggtctgacccctttttttttaaaacagcgatggaaacgtaggggaacgtctttcgatgtttcaaaacccgaaaagacaccatccttccaactttcgataggtggcgtcctgcaatccgcgagcgattcctactccatgcccatcattcatctcgggttagttccttcatcccacaatgaaccttttaatctttgcttctttactttgtcg

SEQ ID NO: 166676 - DNA, 773 bp, Arabidopsis thaliana landsberg; identical to SEQ ID NO: 15104

SEQ ID NO: 166677 - DNA, 828 bp, Arabidopsis thaliana landsberg
ttcgatgcagataccctacgctgagaagcatcccattcgttaccgctatggattaccttgtcatttatgggataaactagagtgggtggagtttaccgagagagttgaatttcttaaactggatagtgaagatagcagggattttgcggtgctttttgctggaggaatgagaaatttggtgatgtatagaagccgtaacatgagttggactcgagttgtggagtatcctgaaacgtattcatatcaagatctggttgcattcaaaggaaagttttatgctcttgattcaagtagaaggggacgggtctttgttgtcgaagtttctttggaagttacggagatcccctcagtcggaggatcgcaacagtcttctaaagaaagtctggttcagtcaggcgaggagttgttgctagtgcaacggttcacacctgttgggcggcgttatgatgaatatatatatatacatggttcagagtgtttagacttgatgaagaaagaggaaagagaaagtgggttcaagttaatgacttgaacgaccgagttatctttcttggagctcagacgaatctctgctgctcggtacataagctcccatgtgcaaaggagaattgcattgtgttccttgaatcaaatgatggtttcatctttgacaatgactcggtccttttgtttgacctaaaaaccagaagaactagtactgcgtttaatgaatgcaaaggctacatgggcgtgttcggcgcaaatcttgaatctttggtgtcttgtggacttgtgaccattccaaacccaacggaaagctttgatttcttttataattatgaatggtag

SEQ ID NO: 166678 - DNA, 1097 bp, Arabidopsis thaliana landsberg
actgccacaaaaacaccaattggcctagactagctatggtaccatttcttcttacgctgtgcttttaataatatttttctacttggagaaaatatgattatgtattgtttacattgaaactgtattatacaatggtaacaagtatattacgatcatttatttgtgaaccatatatatttattatacacaaatgaattgaagtatctactctttgtttctagtgatatgataaaatttgaaatgtttacagaccatggaatttgcattcgtgaacaactcaggaattaaagacataacattactcaacagcaaaatgggacactttaacttcttctctgtccatcgcttaacattaccggcgtcactataacagctcccggtgatagcccaaatactgacggtatcaaaatgggttcttgtagcaacattcacatctcaaacacaaacatcggtaccggagatgattgtattgccattctctctgggaccactaaccttgatatctctaacgtcaagtgtggtcctggacatgggatcagtgttggaagcttagggaagaacaaagacgagaaagacgtaaagcacttaacggtaagagacacagttttcaacggcacaagcgatggtattcggatcaagacttgggaatcttcggcttcaaaaatcgtagtttctaatttcatatacgagaatattcagatgattgacgttggaaaaccgatcaacattgatcagaagtattgctctcacccaccttgtgaacatgaaaaaaaggttaacattgtatgcatgaacaagcttggttatttttttcttcaatcacaatgaaatataaaacaaaagacaacttgtgtttccttgttcagggtgagtctcacgttcagatccaagacattaagttaaaaaacatatatgaaacgtcgaataacatagtggcagtgaatctacaatgtagcaagagctttccgtgcaagaatgttgaactaattgttattaacctaaagcatactggactcgagaaaggtcattccacagccatgtgcgagaatgttgacggttctgtacgtggtaagatggttcctcaacattttctagat

SEQ ID NO: 166679 - DNA, 1997 bp, Arabidopsis thaliana landsberg; identical to SEQ ID NO: 16426

SEQ ID NO: 166680 - DNA, 2750 bp, Arabidopsis thaliana landsberg
  unsure (1)..(2750): unsure at all n locations
tccacattctgataagtaccatcttgatgatagttatcatcaaaccccacgttataacgaaatgcatcgttcatcatatccacatatggatcttctacaacattacccacacttttataattctctcttagatacgtactatcaacataattactcggttctacattcatgttgaaatcttctccatgcttataccaaacataataatcaggcataaatccttgactaaacaaatgactactaactcttctacccgagatgatgtgtttttcattcttgcatacactacaaggacaatgaaatttacctcgactactctgtactataggctgactattagcgaatgtcatgaactcctctactcttgcaacgtattcggttgacaaatttcccgttacttcatcaaatctcttgtacatccaatctcgatagaaaccgccaccaccgccattattgaagtttcccgccattataccataaactaaacttatatttttttcttcgaaatcgttttttttttcttttgatgttgttttgatttgttggtgaatgagaatgaagagtgtcgtgcattatatagaggatgttgacgactattnnnnnnnnnnnnnnnnnnnnnnntacaaaattaggtatacctacccaacaacgcgaaaaacattttccaaccgtattatacgataattatgcgactatttgacgacaaacaaaaggtagtcgtattattgtcgccttttttgcgacttaatattaaagtcagaagtgtagtcgtcaatgtacgtacgactactttacgactacttatttccttcagtaatgtcgtcgtcaaatagtcgtatttggacgaccattgaccgactaatttttgtagtcgctaaaatacgactacggaatgaccaatttgtatgttgccgtaacgtcgtccatcagtcgtaaagtagttgcacaaaaggacgactacattgttagtcgcctttcgtagtcgtcgtttgcctgttttcttgtagtgtaatatttcacaaaccggacacaattcaagatgcacttttccgagcaaacaattggatggaagtagaagacaaaaaagaaatctttggaaaaaggaataagccagcaaaaccggcggtcactttccctactaagaaattcgagcccagggaaaactaagggccaaggaagtttgggtcgcaacctttcaataacaatgtcgggaagcagttccaaggaaaaggaaagtcaaacacttgggtctgagacgaaagtctatactgcaacatgcatagggtaacatgacatctaaccaaagattgtagtgtccttaaaaggcatctcgcagagctatgggccagtggagatctctccagttcaaaactcgaaaaggccaagattgaccaacaaagaagaaccaaggagttcgaaggggaagatcaatgtgatccttggaggctccaaactttgccgagattctattagtgctatttaaaagcataggcaaaatgttctactgaaatcaagcttgagagaagaagttaattaccaaggcacttcaatatcatttgacgaggaagaaacgcggcacctcgaaagatctcatgatgatgctctagtcattacgctcgacgtggctaactttgaagtgtcaagaattctcgtcgatacgggtagttcggttgatttaatctttctaggtacattggaaagaatgagaattagtcgggcaaacatagtgggacctccatctcctttggtggttttcacgagcgaatcagccatgtctcttggaacaatcaagctacgagttctagctggaaagatgtcgaaaattgtggactttgtcgtttttgataaaccgacaacttacaacatcatcctcgggactccctggatttatcaaatgaaggcggtcccctttacgtatcatcaatgcatcaaatttccaactccaagtggagtagaaaccattcagggagatcaagaagctttgcgcacatgttatctagtcagccatcgtctgaagatccaatagcaattaacaaagcccgcgaagaaaggaataatcccaagatttctgagtgggtagaaagtggatattgtggtgatcgaaataatgttagaggaggataaaccagattggaaagttcgaattggagccactctaaccggcaaaataaaagaagtcctaatagaactcttgaagaaaaataaagcatcgtttgcgtgctcagcagcggatatgtatggcatagatccaagcataatctaccacgagctaaacgtggatccaagctttaaacctgtaaaacaaaaaaataagaaaactcggagtggaacaagcaaaggcggtaaatgacgaagtggacaagctcttaataataggatctataagggaggtgcagtacccggattgggtggcaaataccgtcgtggaaaatagaagaatggaaaagatagggtgtgcatcgatttcacggatctcaacaaagcttgtccaaaagacagtttcccacttccacatatagatcgtctcgtggagtcaaccaccggaaacaagttgctgactttcatggatgctttttcaggatataatcagataatgatgattcctgaaaatcaaaagaaaacgtcattcatcaaggataggggcatctattgttataaggtaatgcctttcagtttaaagaacgcaggagcaacttatcaatgacttgttaacaaaatgttcaacgcatacctcggagagacaatggaag

SEQ ID NO: 166681 - DNA, 845 bp, Arabidopsis thaliana landsberg
atttcaaaccaatcatggcagcatcaaagctcctcgtatccgacatggcctctgtcgttgatcacgtcccttcaaactacgtacgaccagtctctgaccgtccaaacatgtccgacgttgaaagctccggcgactctattcctctaatcgatctccacgacctccatggacctaatcgatccggcatgagtcaatcagtttgctcatgcatgctcttcttatggcttcttccaggtaagtgcacaaacaatccactttcaatctctcctatactctgtttcttgagtaacactcttatcttttcttgattttacactagggttttgcaaaactgttttttttttctttcatgattttacactagatttgtttcctctgttccagatcaagaaccatggagtaccagaagaaacgatcaaaaaaatgatgaatgcggcaagagagtttttccggcaatcagagagcgaaagagtgaagcattactcagcagataccaaaaagacaacgagactctccacaagtttcaacgtttccaaagagaaagtctttaactggagagacttccttcgactccattgctaccctatcgaagatttcatcaatgaatggccctcaacaccgatctctttcagagaattcacagtcgaatacgctacaagcgttagagccttggttctgacacttcttgaggcaatctcagagagcttaggtcttgcgaaagaccgtgtaagcaatacaataggcaaacatggtcaacacatggctaataactactatccccggtgtcctcaaccagagctaacttacggactttcggggcataaagatgcaaacttggatcactg

SEQ ID NO: 166682 - DNA, 954 bp, Arabidopsis thaliana landsberg
agataggattggcaaaggaaggcggttttgttattgactgctcaagaggagtggaagaggagtggtggtagagatcatgttgttcttgctcatcatccgaatagtatgttggatgctagaaataagctgtttcctgcaatgtttatactttcggactttggaaggtatcctcctactgtggctaatgttgagaaagatgtcattgcgccgtataagcatgttatcaaagcgtatgaaaacgatacatcgggtttcgatagtagaccgattctgctttactttcagggtgctatctacaggaaagatgtgagttcttctgttaccttgctttcagttccttgtgtttccttgtttgttctctaaatatggtttgctccaatgtgtcaaatatctcagggtgggtttgtgcgtcaggagttgttctacctcttgcaagatgagaaagacgtgcatttctcgtttggaagtgttagaaacggaggtataaacaaagcaagtcaaggaatgcacaattccaagttctgtctcaatattgccggagacactccttcgtcaaaccgtctctttgacgccattgccagtcactgtgttcctgttattatcagcgatgacattgagcttcctttcgaggatgttattgattactctgagttctcggtgtttgttcgcacctctgatgcattgaaagagaacttcttggttaacttaataagaggaataaccaaagaggaatggacacgaatgtggaatcgattaaaggaagtggagaaatattatgagttccattttccatcacaggtagatgatgcggtacagatgatatggcaagcgattgcacgtaaagttccgggtgttaaaatgaggattcataagtctagaaggtattctggatctgtttctgagaccgggaaagaatcaagatggtcgtctctgatacctcggactttctggtga

SEQ ID NO: 166683 - DNA, 1932 bp, Arabidopsis thaliana landsberg
  unsure (1)..(1932): unsure at all n locations
tcacagttatccttagcatctcgactcatgcgcagcaaggcgtagtataatatgagtgaaaagttggtggactccgtttccgaaatgtttacagatttttgtccaaaaggaaaccaggctaccacttcacattgccagnnnnnnnnnnnnnnnnnnnnnnnnnnnnnnnnnnnnnnnacgattgatgtttgtcagaacaattgtatgcttttttggaaagaagatgaaaaagaagatcaatgtcaattttgtggggcgcaaagatgcaagcctaaggacgaccatcgaagaaccaaagcaccatatagtcgtatgtggtatctacctattggggaccggttgaagagaatgtatcagagccataagacaggtgcgtcaatgcgatggcatgctgagcaccaatcaaaggagggagaaatgaatcatccttcagatgcggcagagtagagatatttccaagagttacatccccggtttgctgaagaaccccgtaacgtttatctcgggttgtgtactgatgggttcaatgcatttggcatgtcttgtaatcattcgttgtggcctgtgatcctaactccatataatttaccccctggtatgtgcatgaatacagagtacttatttcttaccattctgaattctggaccaaatcatcctcgagctagtcttgatgtcttcctccaacctcttattgaggagctaaaagagttgtggtgtactggagtcgatgcgtacgatgtttcattgagtcaaaattttaatctaaaagcagtaccactctggacgattagcgactttccggcgtatagcatgttatcaggatggactactcatggtaaattgtcttgtccagtttgcatggaaagtacaaagtctttttatctacccaatggacggaagacatgttggtttgattatcaccgtagatttcttcctcatggtcatccatctcgtaggaacaaaaaagactttctaaaaggaagagatgcttctagcgagtatccacccgaatctttgacaggggagcaagtttattacgagcggttggctagtgtaaatccaccaaaaacgaaggatgttggtgggaatggtcatgaaaagaagatgcgaggctatgggaaggaacataattgtcacaaggaaagcatcttgtgggagttgtcttactggaaggacctcaatcttcgacataatattgatgtgatgcatacagagtagaaatttcttgacaacatcatgaacactctcatgagttttaagggtaaatcaaaagacaatatcatgtcaagattggatattgaaaatttttgtttacggctaggcttacatatttatagtaagggtaaagctccatttccagcgtatacattgacagaagaagccaaacagagtttattacaatgtgtgaaacatgatattagatttctagatggttattcttcagatttggctagttgtgtagatatggagaatgaaaagttttcagacatgaagagtcatgattgtcatgtatttatggagcgactacttccatttatgatatgtctataatttgcatgatttaggcattcattcttcaccactttgtcattgtttcatccacatttcatctcattaggagtcgttttagtgtgttttacatacttaggacgactttgcattaggattgcatgtgcatggcatatttggttgttttcaggtactttggatgcttttggagttcatacagaggaaaaacagaacatgaagtcagaatgcccaatgacgccttcagcaaaagtactctatcgcagcctcggagccctgccagggcaaatcactctatcgcaaccccggagaagcaatcgctagcttccgatattataagtttttatctcgcttttacattttcgcaactttgatagccgcagtgtttctcctgcgactttgtcg

SEQ ID NO: 166684 - DNA, 1952 bp, Arabidopsis thaliana landsberg; identical to SEQ ID NO: 5956

SEQ ID NO: 166685 - DNA, 209 bp, Arabidopsis thaliana landsberg
gaagcaccaccgaacaaaaccggtagtgagatatcttgatttgtacttttattctttaccttttgattcagacggatcaggaagcatctgcaaaacgtttagatgatgagacagatgtcaggattacgaaccttaaggaatctagttcaaaggtctccaaggatattgtcaagatgctcatcacgtatgtcaccactactgcagcatga

SEQ ID NO: 166686 - DNA, 1417 bp, Arabidopsis thaliana landsberg
atgcagtacattgggaatgtacatggagatgaacctgtagggcgtgagctcttattacgccttgcaaactggatttgtgataactataagaaggatccattggtaagtgatttttgctttttgtaattgcaccatgccatggccatgaaagttgttcactcatcttcaataaacttgcctaagaaaaaggttatgtgcagatactgatttttttatgctggtatgcaggcccagatgattgtagaaaatgttcaccttcatataatgccatcattgaatcctgatggcttttcaatcaggaaacgtaataatgcaaataatgtggatctaaatcgcgacttccctgatcaggtgattgtctgatgacgcttttgacgatcataaattttattttcaccgatgctgtgattttcatgatggtagctagattcggttggttttattcatagtcacgtttgacttacttaactcatacctgataatgcagttctttcctttcaatgacgacttgaatttgaggcaacctgaaactaaggcaattatgacttggctgagagatatacgattcacagcgtcggctactctgcacggggtaattttcctgtagcagacttgtgcatactataacgtcttaagtatgtccaatttgaaagtttactttcaagattatgggagggggttttcaatgtaatgtcaaggaaaatcttgattcaatgtgaaaaaaatatttgctaaaccagcttttgttttagggtgcgctggtcgcaaattttccatgggatggtacagaggataaaaggtatttacttctattcaaatggttttgaggctaatatctttgctcggtccttcagcaaatgcaaacgtcatgtagttgttttgcactcttcttgcaggaaatactattatgcatgtcctgacgatgagacattccggttcttggcacgtaaatatagcaaatctcaccgtaatatgtctttgagcaaagaatttgaagaaggaatcaccaatggagcatcctggtatcacatcaagtccccttactctgtcttattcaacaaatgagtttcttggttaatgctttaagcaaaacgctctacaggtacccaatttatggtggcatgcaagactggaattacatatatgggggatgctttgaattgactctggaaataaacgacaacaagtggcctaaagcctcagaggtcaaatcttatattcctatgtgataattggttctccttcgcaaggtagtttgctgatactaatagagttcacacatgttacacagcttttcaccatttgggattataatagaaagagcatgctgaatcttgttgcaagcttagcgaaagtattatttaacctttggttttagaaccccaacattttaatcttgtcggatcattttagatta

SEQ ID NO: 166687 - DNA, 1785 bp, Arabidopsis thaliana landsberg
tatgtatcaatttatcaactatcgtatttttaaagtctataaaacaattaaaatgaaagtgatgcatattaagcagtttgaaactaataaaaaaattatgacaactttttatcatgaattttataaacataacgtaacaattgtttgatacacaaactctaacaaatattcaatgtttaacataccctaaaccatatattatatattattattatatatatatatgattattgatttatgtgttattaggaccatatttttacataggatttttgaaaagtatttttatcttattatcttatcgagttttgttaatttttgtagtgcgtacaacatgatttattaatttattgtgtatattaatttatcgagtattaatttatagaagttttactgtattccctaactcattttatttgtggtgatgttgatatataatgctgactctgtggtatttttattctcactatttttgcagtttgagataaaccatctacaagatgaacatcttgaatctgttgacgcttactacaacaaaaagtcttatggtttgcaagcaattcaattcaaaaccaatttcaggacctctgaactgatggggtatagttatgagtgtaccatgttgacgctagccgtcaaaggaaagaagatcattgggtttcatggatctgataatgtacatatatactctcttggagcttacttcacttccattactcctacgagattggaagtgaaaggtggtatgggaggcaagaagtgggaggatggattcgaccatgacaatgtatcaaagatccaagtgctaggtggtgttgaaggcatattgtacatcaaagttgactatatcaagaatggaaaactagaaactggattaatccatggtgacgctggtggtgatggttttttacagaaggtatgtagctattaagtataactttaggttcatttatttgatgatattattaaatcttgtagtaaacgttttatcaaattttacagatggatattaaccagtcaaagaacgaatatctagtatatgttgaaggttactacgatgatgcgtccaaagtcattcaagggcttcatttcaaaactaacctcaacaatgctgttatgatggggtatagaaagggcaggaagtttttacttgcatccaatggaaataagatcattgggtttcatgttaatgccgggaaaagcctaaactcttttggagcatatttcagtacgaccactcctaataaactggaatgccaaggtgatcgtaaaggactgccttgggatgatggttgtaattatgacggcgtaaaaaaggtgtatgtcgatagtataagtgatatagatagtgtcaggtttgagtacgataatggcggaaaagtggaaaagactccgtaccggcgtgatgttacaaatgagaaggaggtcatgattctttaaatctagtaacgtaaaatttcattgatactatatattggttctttaggcgcttatacgaagttgttttctgattgcagtttgtgcttgactatccaaatgagtttatcacgtctgtggaggggaccttagcaactccgactaattttgacattacgtggattctctcactgacattcaaaacatcaaaagggagaacctctccaacatttggatcatcgtctcctggtagaaaatttgtgctggagaagaatggtagcgctcttgttgggtaccatgaatatattggtcctggttataatataaaatctcttggagcatattatcgcccgattcctcctactcgta

SEQ ID NO: 166688 - DNA, 857 bp, Arabidopsis thaliana landsberg
cgtgcaagagaaaaaaagatgatctctagttcaaggcagctgttgcaaagatagcagatccccgaagcgtctctattccaacttaacacccgggcccccgtagcaagtctcttctcccaaagaggtggaggactctgttttctctcgtgcataatcttgacttggacgattcaatcttttggcaccatgaagacagttacaacaagtacttttagtaacgacattcaaaaaagttttgaggagttcatggagaggacattggcgctcctaggtggtggccatataaagacgttctcactaataagtaatgaaatatatagatttgaacatgtagtggattctgttataccctggctatattagaacatacaaaaagattctttgtggcagtttggattcccatacaaattcttcaccagcaccacactggttatgctgtcattgggaacacaactagcctgcccaagaattcctcaagatacatctctcccggtcctaaaagtcctcctacttgaatatatatggtttgaggataatcaattatctgatgtgtttctcgcagcttgccctgcacttgaggacttaaccatacatcacatgtttcgcccattcttcatatccagcaaaagccttaagaaactctcagttaccattaattgtagctatcatgttgatcgttctacaattcttacacttgacacgccgaatgttgtcgacctactactctgattttcctcggcctaaagctccacattgtcctttagattctcttgccaaagttaaactggaccttcattccttagaagatgatagtcgccaggtacaaaatgacgcggatgtaaaaaatctaattactg

SEQ ID NO: 166689 - DNA, 603 bp, Arabidopsis thaliana landsberg
  unsure (1)..(603): unsure at all n locations
atggggagttcatgtttgcctccaggatttagatttcatccaactgatgaagagctcataggctactacttgagtagaaaaatagaaggtctcgagattgagcttgaagtcattcctgttatcgacttatacaaatttgatccttgggagttgccaggtaatttgaaaaggaaaacagttagatttttatccataaatttatatttaaataaaactaaatttgtttgattttatctttaaattttaggtaaatctttccttccaaatagagatttggaatggttctttttctgtccaagagacaaaaaatatgcaaacggttctcgaaccaatagggctacaaaagcgggttattggaaagcaactggtaaagaccggaaaatcacttgtaaatcatcgcatgttatagctggataccgaaaaaccttagttttctatgaagggtcgtgccccattaggcgacagaactaattggtttatgcatgaatatcgtctatgcgatattcatgatcattcacanaaatcaccaaatttcaaggtaaagaaaattagagttcgtttcatttgatccaacttcataatattcattttatgaactaatgg

SEQ ID NO: 166690 - DNA, 4247 bp, Arabidopsis thaliana landsberg
  unsure (1)..(4247): unsure at all n locations
caaacgtttgtggtctcagatgctacaaaacctgattattttattatgtatgcaagtgctggtttcttcaatatgactgggtacacttccaaagaagtcgtcggcagaaactggtaataagttattcaaaaaatttttagagcatttttttcatatataaaatacgtttcgttttctgtaataattaccaaaattgcaaagttttttctaattaaatatcatagttttgtttttaggtttatggttactataaatgtataaagatatcttaaatgacttagtaattctttctaaattttcaaaaattaaacctaacttttatgttttttttttagaacttttcgaaactgtgtaccaaaattacaaagattaagttttaggtatggttatcctaaatgatttagtaactcttactaaatttctaaaaactttttataaacctaatttttatgttgtttttccaaactaatagccttttataaactaagtttattttttaatgataacttaaaatatttcttttaaatcgaacatttctttgcaaattcgaaaattttcttacaaaagtttccaccattttttgtcaatgaatgaattttatttacaaaaagaaagaagaaaagaacataatttgggtttttgttttattgtagccgatttttacaaggatcaggtacagatgcagatgagttagcaaagataagagagacattagctgctggtaacaattattgtgggcgtatattgaattacaagaaagatgggacctctttttggaatcttctcacgattgctcctattaaagacgagagtggcaaagtcctcaaatttatcgggttagtcccttattcctttttatttactcgtttctctcctttatttcttttattcaaaattacaccctttttaatgtgtctaagtgtggacctgtgatttgtgttgctttctccgcaataattcaaagatttgtatcaccgacggatcctattgtagaataacaaaagagaataatcaatcaggaaaaagaaaagaattatagaatctgataaaaaaatatgattttgaggaaaaatcagaagataccaatatgttttgtttatttggaccagaatgcaagtggaggtgagcaagcacactgaaggggccaaagaaaaggctttgaggcccaatgggcttccggaatctctgattcgatacgatggtatttacatactttctttttctatttgtttttccaaatttttttccatttattatgttttcttaaaaatattttcaaattttgttttgtaaaagcccgccaaaaagatatggcgacaaactcagtgacagagctagtagaggcggtgaagagacctcgggcactaagcgaatcgacgaatctccatcccttcatgacaaaatcggagagcgatgaacttccgaaaaaaccagctcggcgaatgtccgaaaatgttgttccgtcaggccgaagaaactctggcggcggaagaagaaactcgatgcagcgaatcaacgaaattcccgagaaaaaatcgagaaaatcttctctttccttcatggggtaataatccttactagatcattttttgacctgacaaatactttataaaaatggatttagtctttgatatgatagttgtgaactgtggtgataggattaagaagaagagtgaatctttggatgaatctatagacgatggatttatagagtatggagaagaagatgatgagattagtgatagggacgagagacctgagagtgtggatgataaagtgagacaaaaggaaatgagaaagggtattgatctagctactacactcgaacgtatcgagaagaatttcgtcatcactgatcctaggcttcccgataatcccattgtaagaacaaatgttttagaaaaatggaaactttttttgttatgtttcatttcgattggtctgaaaacgtattgtttgctttgtcctatgtttctagatttttgcatctgatagtttcttggagctcacggaatatagccgtgaagaaattcttggaagaaattgcaggtattacatgaatgtgatctcaaaatgtcttttgaaaatatttttgagcatagagcatgtgtttataaattttgtttcatggttttaggtttctacaaggtccagagactgatctaaccacagtgaagaagattcgaaatgctattgataaccaaaccgaagtgacagttcagctcatcaactacaccaagagcggtactcgattttttcgatattcttagattaatctgtcgatcattgtataaagttttaaatttacattatattctctgtggcaggaaagaaattctggaacttattccacttgcaacctatgcgtgatcagaaggtcttcgtgagattattgttatatctggattccgattcttgaagaaaaccgtgcattgttgctgattacatgactttattcatctattagggagagcttcaatacttcatcggtgtgcagcttgatggaagtgatcatgtagagcccctccaaaatcgtttgtctgagagaacagagatgcagagttcgaaattggtatgtggttcatatcctactgagttttttgaacatctctttcctatcaaaggagactatgacattggtcacaattttaggtgaaagctacggcaacaaatgtagatgaagctgtcagagagcttccagatgctaatacggtaaggtgtactagttcattattacttaacaaagatggaaaagtataaatgcaatcgaattgcaatgtattttagcggcccgaagacctgtgggctgcacactcgaagcctgtctatcctctgcctcacaataaggannnnnnnnnnnnnnnnnnnnnaaaaaaggcatgcatcgaaccatgttactttttacttggtttctcattcatcctgttcttattctgacagtctcctttgtagatccaagcgagtggagaaacagtgggactacatcatttcaaaccaataaaaccgttgggctctggtgatactggcaggtacaacattgcatgtgtccatagcaataaattcatctgtccatgaatcgccttgtacttcgtgtatacttatatggcgttttttggttggaaaaagtgtccatttggttgagctgaagggcacgggtgaactatatgccatgaaagcaatggagaaaacaatgatgttgaatcgtaacaaggtatatgatggagaatgagtttccttttaagaaggaaagctgaaaaattcaacatttatattatttctttcgttgacaacatgcagctttatgcaggctcaccgagcgtgcatcgaaagggaaatcatttcccttctggatcatccattccttcctactctctacgcttcttttcaggtagatgtttttctgttttgcttgcatcatgtcggtttgcccgtttcattgctcaattgctcttctttttcttccgcagacctctacacacgtctgtttgattacagacttctgcccaggtggagagttgtttgcactacttgacagacaacctatgaaaatattgacagaagactctgcaaggttccctcttttcctcaatctaaacgtataatgtgtaacagaagatctcctggtgatgttttaactaaataggggcactatgttagcaagaaaacatatcaccttctagcaagcattcagttagcggttactcggataactgatgaaggcaataaatcccattgtcattattatatctgcagttatgagttaatctgatcaatctctgtcatcaggttctatgcagcagaggttgttatcggcttagaatatcttcactgcttgggtaataataatcattgtctctgttgatctaaacattgcttatttatacattgccacatgccttgagtagtctcttcttccaataattttttagctgttgtttcggttaaagatctgtatatattttccataaacaggaattgtatatcgagacctgaagcctgagaatatactgctcaagaaggatggacacatagtattggctgactttgatttatcattcatgacgacctgcacaccccaggtacttttttgttcaactctaccattttctattggcatataaagaaatatgataattaagagaagtatgggttgcagcttattattccagctgcccctagcaaacgaaggagaacccataagttaacccattaccccaccattttgttggcagaaaccaaagttaccc

SEQ ID NO: 166691 - DNA, 1076 bp, Arabidopsis thaliana landsberg
atgttcatcgtcttttttttctctcatacgcgaaagacctgcgaattcggggatcgaatccaattgtcaatttctcagggtttcgaaaaccctaatctctctatggaagctaacaaaaaagcgaaacctagttatggcgatgtgattagcaatttaccaaatgatcttctctgccgaatcttatcttacctttcaacaaaagaggcagctttaacatcgatactctcaaagcgctggtcgaatctacttctatcgatacctattctcgatttcgacgattcccgtgttactgaaaccccaaaagggtcaacgaaaaaatgtttttttcaaggctttcgtcgataggttactctctcaacgagtcgagacttcatcacatgttcaaagagtctctctcaagtgtcgtcaaggaggtgttgaaccagattgtgtaatcaagtggatactaacaacagtaagggatcttggtgtcttggatctttctctatgcattgattttggaatctttcatttgccatttaatgtctttaggagcaagactttggtcaaacttagaattggaacaatgatccgtctttctcagtttccttcagatgttgtttctccgacgcttaattctcttgttcttgatttggttgagtttcgtgatggtgataaggttgagtttagacagattctgttagcttttccttcacttcaaagcctgcgggttcatgaatctaacaagtggaagttttggaatggttctgcttcaagtcgaacgcttaagagtcttgtatatagaagtgatgatgattcctctgctcctaaaccttgtgtttcgtttgatactccgagtcttgtttacttggactattctgatatggttgcggataagtatgaaaatctgaaatttgacagccttgttgaacctgggcttgatcttcatttgaccgcttttaaaatacatgcgcataccacattatagcggcatcgaccctggtgatgtgacaaccttgttcaaggggatcagaaatgtcaagatcctctgcttatctgcggatgctctataggtcagtcttcttgagatgtgtacc

SEQ ID NO: 166692 - DNA, 1298 bp, Arabidopsis thaliana landsberg
aagcaagggaagaagagcttgggtatatcacatttgcagtctatggaaaagacgatgttttggctatcaaaacttttgaagacatgttcggattccctagagggactgatgttaaacccaagttcaagaaagaggagctttccggtctttgggtaacaataggtgatgacgcccaattctcgtcctcaagtgccaagagcaacgcaatccgaaacccctgcattcggtacttccagaaagcaatggctaacgtcctctacgcaagggagaagaccggaccaattaacaatggcgagatagagctgctggatattgccctaaaagatatcatagtctacaccaaaaacaaagtgcctatgaagggtgacaccaacgatgcttcaccatcaatgcgtttattgaatcatctttgtggtttcaggaaatgggcagtagcaaataagctgaagggaacaatttctataggaggagtgataacacctatactaatggcttgtggggtgccacttcagtcgactccctttacccctagatggatcgacattcttcacctgagatgggctttgtttattgagcattagagtcataaggggatgcatgttctcaagttttagaacaggacgtaaatggatgccaatcttctcttacccaaccaagagctaacaaccatcgcagtgagaggtaacatcgatttcaacccgcctaatgaagaaattttcttcatggaaagtgcacccccgacgagagaggctccagacattgaagaaagggttgagagtgaagaaggagctgagaatgaagaagcagaggagaaggattgggagaactacaatgctagtagattccattttgaggaacacaaaccgccaccaagagtgagtaagagtctgactgttgcacataagaacattggttcgatgagtgcttggaataagtttcaagacaggatgttggaaaaatgtggcaaggccatagccgcaattcaggctgtactaagctgttcatcttcaggcgccaccatggtgagagaaaaccgccctgaagaagtggtttcaagaaggcatacagtttcaccctcaagacaatctacttatgagcaacgagaggtaagttgccatcaagcccctgcaagcattcatctcatgagcaccccgcaccagaagagaaggagaaaaacaagaatggttcagccaaggagcaaggaccttcttatgtccaatagaagatcactcgaccaagatactcgacgtgatatcgagcagagtgtcgagcaggatccgtgggttcagaaagagtag

SEQ ID NO: 166693 - DNA, 341 bp, Arabidopsis thaliana landsberg
atggcagtcacagcatttaacacattgaaacttgtatcgtcgtctctagatccgattccctcaggctcttgttcttcttattcccttctctctgatatatgtcggatctccttacaagagatgtctaaagcagtcatgttctgttcgagctatgacttcttcttcttcggctgcatcgacttcttcttctcctttggatcgagaatggaagagagttttaggaaaacagtgactgaaaacactgtcgttatttactcccaaaacttggtggctcgaatggtcactactcttctttcggtatcagttttaaataaggatttgggtttaatttcttttctttt

SEQ ID NO: 166694 - DNA, 559 bp, Arabidopsis thaliana landsberg
gggattctaatggtggagcctcccgaagcaggttggtggcggtccagtcatatgttaaaagaaagaaagtatctggtggaggaggaggagataaaacgcatgtcgctgtctccgactatgtcggttttaggaaagtacatgagaaaagaagccaagaagcttctaggatccttgaagaaagtcgatggagggactcgttcaggtgataatgatcatgaagatgggcatcttgtgtcggttatagatacggtgagccgagtggtatcggtcagtgtagtagtattgaagtcgttcttggaactattgtccagacgaaaaagtaacataaagagcaagttggcgtcggtactaaagatgaagaaggataaccatgcgacagccaagaacgtgttggagtcattaaattccgcgtattttcggagattttttatctcatcatgatcttcaaaatgagcttgaagaggattagatgtgcattggtgggttcgagagaaatctagaagggttgtttcgaaggttgataagaacacgagcctcgattctcaacataatctcccat

SEQ ID NO: 166695 - DNA, 626 bp, Arabidopsis thaliana landsberg
tgtataacctatctcgggttcctctttgtgaggtgtgtaagtggaactcttccccagagatgccgccacagcacccttcgtatgttctcctcctcgtcgagcaccacaaacccttacttgatgtatagtctgatacattatggaagttgtttggatgatattgatgtaacaagcactgtacactattttgacccggtcaaggaagatgaaattattgtcagagacaaggcctttcccatggagttgcgtaatacgagtctggttggaatgtcccacggatggggagttttcaatgtggagacaggtgatggtagacataaagctgtttatgttagcgactactgcaatccttgtggctccaaaccaaatcccaaaatcattcctttgcatcccatgtatcccatcggtaaacctaatattactcaattacgcctcatcactaacgctgcaatgacttgttcacctgatcaaagtaaagattttgtagtggctgccaattgtttaggacttgagatccatttctttaggccttgtggcaaaactgacaactactcgggtttaggctataaaaccgaatcccacttttttgatcagtcaaaggttatgtattcaaagagagataaaaa

SEQ ID NO: 166696 - DNA, 397 bp, Arabidopsis thaliana landsberg
tctgggccgacggcgatgtggcgcaacctgaaaaggctgtgacctgcttcgcttgccacggccagaatggccacagcaccaacgagatgtatccggtgctggccggccagtaccccaactatctcgagcacgcccttaccgagtacaaggcaggcacgcgcaagaacgccatcatgaacggtcaggccgccggcctgagcccgcaggaaatccatgagctggcgcagttcttcggcgcgcagacgagcgacctctatacgcccagcgtgcatggcgagttgaagaaataggttttccgatgtgaaaaagccgccgttccccggcggcaatttttatgtacaggatgcacggtatgtaggcgggcgcatggatgcgcaggagcctacagaagtacagg

SEQ ID NO: 166697 - DNA, 819 bp, Arabidopsis thaliana landsberg; identical to SEQ ID NO: 11449

SEQ ID NO: 166698 - DNA, 1067 bp, Arabidopsis thaliana landsberg
ttcatttttgggttgatgatttggagaaagaagagagaggaggtctagggtacataattttcaaagttagggatgtcgaatatactattgatatttgccatcttgagaccattttcggattcccaagtggagaaggaatcctccaagactatgatcaagaagagctgaaatctctttggaagacaatcgccggtccaaaatccttctcgtcaaccaagagcaagagttcttcaatttgtaatcccgtgattagatacctccaccaatgcatcgccaacaccctctttccaaagaaggccaccggatttgtcagtgaagaggagctatgcatgatataccaatctttggtcttcattttgagagaaacaaaagattggaggaagatggcgggtgatagagcggacacttcgttgagtgttgttctcttggatcaccttttgagcttcaaggagtatgctgcaaccatccatcgctcgggaattcgcgggagtctttgtgttggtggtctcttaacgttaatactaggagctgtgagtatggaattcggaacccctgacgtgttgcctaagttcattgacctagactatctcaaggggaaggattttcttgagaaaacaactgcggcgaatcgctatctcttcaagttcaaccactcggagcttgggccttctcttctatccctaccatgcgagaaccggacttcggtgaagacaaggcgcaacatcaatttcatgccatctccctttgccttgaacatcgacattggagaagctcgagaagatgaaccagaatatagtccagtcgactatgagcaacatgagtacttcactcaagctgaattatgaggagcaaatcgagtttgagcaacatgttgatcaaccagagcatgggccagcgaacaagagcaagctcattatgaagaaggtgctaaccaaggaggaaatgagtttgctgaagttcacaagaagctcggtgtacttaaagagcttgggaacattcacactaagacaatgaagggtttcaagaagaagatgagaacaatggagaagtcgctcaagagtatggct

SEQ ID NO: 166699 - DNA, 963 bp, Arabidopsis thaliana landsberg
tattttcatgctcaacaatctcagtctcgctcatcctctggtctctgctctgatctttaaaccctttgtgtcttatgtatgttgattacttctttctcacgctttatatgtttttcaggaagcaaacggtgtttctaaactgtttctaaacatcttggagcttatccctcgctggaactatcactttgaagtgaatgaagtagcgaaaacgatttgcattaggtgcaagacggatatggcatattcaggtgaaacgtcttatggtatcatcatcaatgctaattcactcagagtatacaaggcaagtcatttctcttttctcttatctttgatgtgaaagagagagtctttaagtctttgaacgtttttgggtaatcacagtctgcattcaaggagtttacatttgagaatatcattaaggccatcatgatcaatgtaaagatgctttgtgacaaggaaggatgtgggaaacgaaactatgttgatactatgataagtaaccttccatctgcttttatagttggtaagctttggattgttaattggttagtagctttaacaacataatgcagtagttttgagcttgttttctcttattttttatagcacttcagtgggagaacaatgagaccacaaaagagatattcgatacagcttctgttctggcgactgaaatagatattagtgctatatatagatatgtaggtgacagtgcatttaccaaataccgtcttgtctcaatggtaagggtccaagtatttgatttttaatttgtttcagttccgtttaagtttactatgtttaccaatgttgaatattcaggtttggtcgcatggaaatctatacaactgtgtagcttatgaaaacaatagatgggtcagacatttttgttctgagatagaggtaaagctttatagacatttttgtaaaagacaagctagtatgttgtgactgagagcacaa

SEQ ID NO: 166700 - DNA, 572 bp, Arabidopsis thaliana landsberg; identical to SEQ ID NO: 80474
  unsure (1)..(572): unsure at all n locations

SEQ ID NO: 166701 - DNA, 467 bp, Arabidopsis thaliana landsberg
caaggtagtgattcaagaagcttcttgctttttgaaatgagacaatagaatgattttattctagaccggattgataaaattcaataggatgctaatctattagatatagtcttaacagtatagttcaaagtagaatttggtatgtgatgttcaggttaggagcttagaagcacaaggcctgccttcaaagcaagccgaggcaataaccggtgctataactgaagttcttaacgatagcttaggagttgtttcacagttagttgtctccaagggagagatgcagaaagtaagtttctgttgtgacaagtctttgttgcttcatctattccaaagagtaggatgcggttatagcagcagtctaactttggttttcttgcttctggtaggctgaaatgacgcaggaatcaaacttatccaagttcaaaagtgaaattaatagttcactggtaagttgtgttttcaaacgt

SEQ ID NO: 166702 - DNA, 997 bp, Arabidopsis thaliana landsberg
atggctgatcaaactcagtttctccgaaccaactcgatcgtaaaagcttcctactgggttgtgaagacggaaaacgacttccctgccggaaacattgactcaactcgcttcacccatcttttctgcgccttcgctgacgtcgactcttccacccatgaagtcactatctctgccgcgaactcatgccaagtctccagctttacccatatcgttaaagacaaaaacacggacgtgcaaactctcttgtcgatcgggggtaaagatgcagacaaagctgtgttagcgtccatggcaagtaacagcaaaaaccggaaagcgttcattgattcctcgatcgatatcgctaggaagaaggatttctacggcctcgacctagcttgggagtatccaagcaatgacgtggagatggccaactttgggaaactcgtgaaagaatggcgagctgcggttgtggaagagtctgacagaactaatcaactgcctttgctcttgacggctgcggtttactactccccggattactatggtgaggagtacccggttcaagccattgccgacaatttggattttgttaacataatggcctacgatttttatggaccgggttggtcgccagtgaccgggccacccgctgctctatttgatccttccaacccagcaggtataaaccataactaaacccgtaacacaactgcagtttttccttactatcaacatatatatatacatagacaatgaaatcaaaattgatagaaaataaatgcttaacatcattcactcattcatctacgacttcaaaatttaaaaccaaatcatgaaatatattattatggtgtgatttaaattacaggtttctgcattattacctcttatttctaaaaaatttattttagacagaggttgtgaaatttgttaaaatcatatatattttacattttactttataaatatcattttacttttacatatatatttagcactcaaaagctatttatgg

SEQ ID NO: 166703 - DNA, 961 bp, Arabidopsis thaliana landsberg
cttgtaagatcttctacaatgtgttctcatgatcctcttcacttcgtcgtaataccctttatggcccaaggccatatgatcccattggtcgacatctctaggctcttgtcccagcgccaaggcgtgactgtctgcatcatcacaactactcaaaatgtagccaagatcaagacttcactctcattttcctctttgtttgcgactatcaacatcgttgaagttaagtttctgtctcaacaaacgggtttgccagaagggtgcgagagtttagatatgttggcttcaatccccgatatgatgaagttctttgatgctacctactcacttgaggagcaagttgagaaagccatggaagagatggttcagccgcggccaagctgcatcattggagacatgagccttcctttcacttcaagacttgccaagaaattcaagatccccaaacttatcttccatgggttttcttgtttcagcctcatgtctatacaagtggttcgagaaagcgggatcttgaaaatgatagaatcaaacgacgagtattttgatttgcccggcttgcctgacaaagttgagttcacgaaacctcaggtctctgtgttgcaacctgttgaaggaaatatgaaagagagtacggccaagattattgaagctgataatgactcttatggtgttattgtgaacacttttgaagagttagaggttgattatgcaagagaatataggaaagcaagggctggaaaagtttggtgcgttggacctgtttccttgtgcaataggttagggttagacaaagctaaaagaggagataaggcttctattggtcaagaccaatgtcttcaatggcttgactctcaagaaactggttcagtgctctacgtttgccttggaagtctatgtaatcttcccttggctcagctcaaagagctgggactaggcctgaggcatctaataatcctgtcat

SEQ ID NO: 166704 - DNA, 537 bp, Arabidopsis thaliana landsberg; identical to SEQ ID NO: 71711

SEQ ID NO: 166705 - DNA, 503 bp, Arabidopsis thaliana landsberg
atgacgaaccaaaagctggttacccagacctttcttggatacaaactgccgcatattctgttgccttgcatcagcggtgcgaacggccggaacctcacgtttcagggggaggggtcggttacaacccaagccatgccgaaacggtgcttcttcggaacgacagtcaatggaatggcggccgtgccgctttgcacctgcgtcggcgatgattcggagagtcaagtcaaggtgttcaaaaggatattgacggtctgcgttggcaacatctgccgcagccccacagccgaatacctctttcggcagcagttgtcccatcgcggcatcgaggtgggcagcgctggtgtttccgccatgcgcgactaccccatggacgcgaccgccctgcaggtcatgggggagcgaggcgtggatgacaccgcgcatcgcgcgcgtcaggtgacgccggagatgttgatcattccgaatctcctcggcatggaaaaaagccacctgagcacgcttgc

SEQ ID NO: 166706 - DNA, 783 bp, Arabidopsis thaliana landsberg
ggctttacatgtttattctgtagattctagaccaagtcgtaaaaattgttgttttatgttgtaggtattgtgcttgactctggagatggtgtgagtcacacggtccctatctatgagggttacgctctcccgcatgcaatcctacgtcttgatcttgcaggtcgtgacctcacagatgctctgatgaagatcctcactgagcgtggttactctttcaccacaacagctgagcgtgaaattgtcagagacatcaaggagaagctttgctacattgctcttgactatgagcaggagcttgagacggctaaaaccagctcttctgtagagaagaactatgagttacctgatgggcaagtgatcaccattggatctgagcgtttccgttgccctgaggttctttaccagccatctatgatcggtatggagaatgctggtatccatgaaaccacctacaactccataatgaaatgtgatttcgacatcagaaaggactagtatgttaacattgtgctcagtggcggatcaaccatgtttccaggaattgctgatcggataaccaaagagatcacggtgttggcacctagcaccaggtggttgcaccacctgagaagaatattggaggatccatcttggcttctcttagcacattccaacaggtaccctaaactctttaaccgtgtgatgatgattcaagttattcacacaaagtactgatgtttggtgtggatatcaaaggcagattacgagggatcagggccagccatttttcacagaaaatgcttt

SEQ ID NO: 166707 - DNA, 718 bp, Arabidopsis thaliana landsberg
agaaaataaaaagtatttgcaagtaaatgatatatatataaacttattgatagaggtattattgttcaacacagacggttgggatatttaagaaataatgttgtgtaaaacacaaattaatcaggaaatggtattggagaacttgaatgtgcagtccgggaacgaccaatcgggagtgctcacagatatgctaactctaaattcaacggtcaggatcttatacagaaaccccgcaactttcttcactgtccacgtcacctccgctcccctccagctcagctattcccagcttatcctcgcatccggtcaggtaaaccatttcacattttattgatttaaccgggctggttattgattcttgatgaactaatttttttaacgtgtgtgactaaaatagatgggagagttctctcaacgaaggaaaagcgagagaatcattgagaccaaagtatttggggatcaaattcctctgtatggaggcgtaccggctctgtttggccaacgagctgaaccggaccaagtcgttttgcctcttaacctgacttttacgttgcgagcacgagcctacgtgctcggccgattggtcaagactaagttccactcgaatatcaaatgcagcatcactttttatggcgataaactttcaagacacttgatctctccaaggcctgttctgatcattgatgaaaatgaacagtataatgatgatttagagaag

SEQ ID NO: 166708 - DNA, 587 bp, Arabidopsis thaliana landsberg
tgtttccttctccatgatcgaaaacaagacggttaattgtacaattgctcatggtacccttcttttttaaaaatattaaattattgagtctgtttctttggaaatctaaaactttcatgttttcgattattttgtgtagatgcttatggtgttgtcgtgagagttgggaatataacaagactcgattatgttcctcaagatttttaaaatcctagactttctcaatttcttgagtttgagctaaaaaatacttggttagtatttccgactatatagttctgcatctatatggttatatataattatattaaaacatagtaaatattgttatctttataggtgtctaaattcatagaacttagatgattgagagaaataattttgatgttcttattaggggaaaatctctgacatgtgttgcaagtggatatacttgtgatttgtttgtgcgtttatggagggatcttggactaggtcttggttatgaatggcgttttggtatgaatcctacaacctgtgtgcttcgattttggatgatttcggataatgaaggtaaatattaacactcttctcatcatctatttaat

SEQ ID NO: 166709 - DNA, 2568 bp, Arabidopsis thaliana landsberg
  unsure (1)..(2568): unsure at all n locations
caccttcgagtggagtagtcagaaagcgccccgaatcaaagaatttcaatttaaatattttgggagcataattttaaaggacaggaaattattttaacacattagattattattttttataaaattttgaacatggcatgaaaatcattggagatagccctgattttaatttatcaactacaatttttttttttttgtaaatcaactaaagattcgttgacaccaagatatcgtagatcacccaattaagatatgctaataagattatatgaattttgaatacgataattttttttatttttttttataattaagaacttgcacgctaagatgatcgagatttgccaactacgacaacaaaataaaagaataatttactgttcaataatttctctctcgcagaaaaggtctataaaatagcagtctcactctcttgagttatatacatctcggtctcattcacgtgtttattctccctatttttcaccatatatatatacatgacgtcatccatgtttcgatctccttgcaagattccgtcggtgaaaggttttgagcaaaagagctacgtaggccttaaagcagcttcgtataacgtcagagtcaactcttttaaaagcagtgaagttgctagtcaactccaaaagatcgactcgaccttgatatggccggtaaatgctctcgaggcgcctccagtcccgagtaaaccagccacacctctgattgatcagcctcttgtaagtaaacacttattttaaaaccaaaatgtttagaacctaaacacttttgtttttcttttggctttgaacttcttttgttagtttcaatctaatgtgagttaagtgtttcagcagctaagccgacgcgcacgtcgtaaccgaaagtgccctnnnnnnnnnnnnnnnnnncaagagactaatatctctcctgcaaatttcatataccctctcttcattcacgaaggttagtttgagtttttatttaggattaacttggttataattatcaaaaatgatttatagttgttgtgctttaagccaatgtgattctttaaatggcaagaatacatggtattttacatgctatcgaaaaaaactatcttcgttttcttacgtgaaatatggaacctttgaaggtgaggtagacattcccataacatcgatgcctggacgttacatgcttggctggagacacggcctcattgaagaagtgagtgatgattctatatgaaaactttagagactataaatttgatatcttcttctcattttacttgtaaacaactttgttcacggtttgttctattaggacctaaaataaaacttaaagataatgaagcattctttttggctaactcttgtatgtgttttgtgaggaaaataggttgcaagggcactagatgttggtgtgaatagcgtaaagttgtatcctaaagttccggaagcgttaaaggtttcatcattttcttcttaatcagtgttgtgcatattttttgagttgtttgacacatattttgacaatggtttacaaaatatgaatacatcaataactaacccttctctgtttagtctccaacaggggaagaggcatttaacgacaacggtctaatacctaggacagttcgtcttctcaaggacagattccctgatcatgtaagatatatatatacttctttggtcaatagctagaggaagtggttctgaacttgaataatgacaactttcttattaatttctcaaggttatctacactgatgtcaactttgatgagtactcaacaactgggcatggtgggatcgtaggagaagatggtaagaaatctgttttgtacatttaaaaacctattcaccaattcacaaattgtagtaaatctaaaacatccatctatgttttataggcgtgatattaaatgatgaaacaattcaccaattgcggaaacaagcagtttctcaggtaaaaatgaaaccattttgaccaattaaataactaaaacgtttaatattctaataagaactgatgcaggcccgagctggagcagatgttgtttgtacgagtgagatgttggatggtcgcgtaggcgcggttcgtgcagctctagatgctgagggatttcaagatgtgtccattatgtcttactctgtcaagtaaattacttcataaaatctcaccttctttttattttctactaattagtccaatctaatcagttgttgtcactatcaacaggtatacaagttcattatatggccgttttcgcaaagtgcaattggacaagaaaacgtacgtaaaacaattgtttgtttgttttgattgtttgtttacgtttgcgtttgtgtttactttataaacttaaacttagagagcatctccactactactaaagtatttaactttaaaaaaaaaaaaattactatagtaataattaaatgatattttgtgacaaaaaaataatattgacaaattttagatgaagttcttgttagtataaattctttattaacattcgctatctagttattttaataggaaaatctagttacctttattggaaatactcttatatataata

SEQ ID NO: 166710 - DNA, 627 bp, Arabidopsis thaliana landsberg
ttaatggctgatccagattgtatcttcagaaatggatatgtagactactataactatagcttcaactatgccacttccctctcacgcatctacaactctcatgacagcttttattatcctcaccagacgacaaacccaaacatcaacgaaaaccctaatttgacttcacctgactctcctccacttagagaagccctccctctccttagcttaagccccattcataagcatcaagaacctactgctaaccaccatgagtactatttcatggagacgacagaaacttcttctaattcaaactttcttgatcaatgccaagacagttatcgtcatgatgtaaccgtggatcttcatctagggttaccaaacctcggagatggtggaagcagcagcagcgatgtggtccttgattccaccgaccaccaagagggtcaccatgatcatcatcaagatcaaggacttgaagttactatggcttctgaccatgatgatgaacatggtggcttacaaaggggtaatcatcttcatcacttttggatcccgactccttctcagattctgatgggtccaacacagttctcttgtcctctatgcttcaagactttcaacagatacaacaacatgcaa

SEQ ID NO: 166711 - DNA, 2688 bp, Arabidopsis thaliana landsberg
  unsure (1)..(2688): unsure at all n locations
agctatttgaagtgataaagaatctatggttcatggtccntgtggtgtggttaccccgaaatgtccatgtatggaaaacggaaagtgttcaaacttttatacaaaagatcatgttcaaaaaaccattattgataaagaaggatttgcataatacataaggagaagaacagataactttgttgagaagaaagactttaaatgtgataactgatatgtcattccttataatagatccctatcactgagatacatagctcacatcaacgtggaatggtgtaaccaattaggttctgtgaaatacatattcaagtatattcataaaggacccgattgtgttactgttgttgttgaatcgtctttaaattcgaaaagtaaaggaaagggtaaacagagggacaatgctgatcgagatggattagagacaaagaagaagaatgaagtcgaagactatttcaattgcaggtatgtttaattaaaaagttaatagtattattactataaaatacatatatttgtgttccttatgattgtataattttgaatttcaaatatgtttctacttgcgaagcatcctggagagtattaaaatatcctatacattatagatctatggctgtgatgaagctttcgttccatttgctaggggaacaatttatttatttcaaaggcgatgaagaagtagaaacagtgttaatcgaagtgatctagatgctttatgttccttgcttggttcgaattaaataaagttagtaagattgctaggaagctgacttatgcagacatcccaactaaatttacctatgattcaaaagaaaagaaatttaatatgagaaaaaaggttttgctatagggagaataaactatgttcctcgtgatatagaagatgaatattatttgagaatactcctcgatgttcaaccaggttcaagatgttttgaagagctcaggacagttaatggtgtggtatatgaagagtggaaagatgcttgtgaaacattaggcttattagataatgatcaggaatacattgatgatttaaagagaacaagtttttggagcagtggatggtatttacgtcagttattggtaataatgttagatgctatgataattcctgaaaatgtgtgggctgtaacgtgaccacgtctctctgaagatataaaaaacaataagaggcaatatttcaatagaccaggtaacatctaatatcattttaaaacctcaattttaattcattttgttttacaatgcaatattcacataaacttgctttgcttagttgtaactcatttagttatatgttgtttacagatttaattttgtcggatgaggagaaacaattatatgctctacaagagatagatcacattttaagaaggaatggtagttcacttacatattataagactatgccactagtacctagagatctgaggtttgatactaatgtcttgattttagatgagagagggtatgatcatgataatttgacagaaaaacatgccaaatggattaagatgcttactctagagcagaagtctatttaccacgatattattggtgcagtgaatgaaaatgttgggggagtatttttttgtttatggctttggaggaacaggtaaaacatttctttggaaaacactcactacttccagtggtattgcttctctccttttagaaggtggtaggacagctcactctatatttggaattcctcttaatcctattgagtttactacatgtaattgaaagctggttcagataggactaatttagtcaaagaagcttctctgattatatgggatgaagctccaatgatgagcagacactgttttgtgtcattggataggagtttgtcagatatttgtgggaatggtgataataaactttttggtgaaaaggttgttgtctttggaggtgatttccgacaagttctaccagtaatccccggtgctgatagggtagacatagttatgtatgcccttaattgatcttacctttggagtcattgcaaagtattgactctgacaaagaatatgcgtctttattctgaaggtttgagtgatagtgaagcgaaagatattaaagagttttcaaagtggattttagcagtaggtgatggtagagtttcagagccaaatgatggggaggctttgatcgatattccttctgaatttctgattacgaaagcaaaagatccaatagaagccatatgcacaaagatatatggagatattacaaagatacatgaacaaaatgatccagtttttttcaagaaagagcaatattatgtcccaccaacgaagatgtcaaccaaataattgagaccatgcttgataacctccaaggttatttactaattcagaagcattgatttgtaactttatttacttttatgaatagtgtttctattttcttttccttctttactgtaactaactaaaattttaattttcaggagaggagtttacattcttatgttcagacagtgtagacccagttgacattggcggtagaaataatccggcattgactcctgactttttgaatagttttaaagtttcagggttgcctaaccataggcttcgtctaaagattggttgtcttgaaatgaaacctagaaatattgatcctataggtggtctaatgaatgacacaaggttacagatcacgcaaatgagtccatcg

SEQ ID NO: 166712 - DNA, 1270 bp, Arabidopsis thaliana landsberg
  unsure (1)..(1270): unsure at all n locations
atggcggtttataatgcctctgttgttcttagcccgaatctggagacatcgtcgtcatggtatcaccataatccgtcttcttctctagacctgattaggattcatactcttccgatgaataagatgacaaggagaggtttgatacagagagtgcgttgcgagacttctccgtccagcgactcatcgcctctggacaagcttaagaattctcctgcaattgacagtaataagaatctctgccttcatttctgaaatgttccaacttttgaattttgtttttgattgcatttgagattcgtgattaggtttcgttgattaacgttaaagcaaatcctcggagattgttgttaccttgttaaagtttatagctttgttgaatattaggatacacaagggagagaagcagcattgtggtgattgggcttagctttcacacatctcctctagagatgcgtgagaggcttgctattcctgaagctgaatggccactagctatcactcagttgtgcgctttgaatcacatcgaagaagctgctgttctcagtacctgcaaccgtatcgagatttatgtatccgctctttctcgttaccgtggtgtcaaagaagtcactgaatggatgtctaaggttttcttccctttcccttttatctcattaacttcagtgttatcggtggcaaatgattacatgataaaatgctatttctttgccagagaagtgggnnnnnnnnnnnnnnnnnnnntcagcatcggtttctgttgtacaacaaagacgccacgcaacatctgtttcaagtctcagctggtctggaatctcttgtcataggagaaaatcagatacaatcacaggttagaaaagctgaacaagtagttaaacaagaagggtttgggaggattatcagtactctatttgaaaaggcaaacaaggctggaaagcgtgtcagagcacagacgaatatagcgctctggggctgtttccgttagctctgctgcagtcgaacttgctctcactaagcttccaggatctgtatcatctgctatgatgttggcaattggtgcaggaaagacggggaagcgtataatcgagcacctggatagctaaaggttgaactaaaatggcgggtatgaaccggagcgaacataaatgatgagatatccgcaaggagatgcacctctggagatgagattattcataaaccccttgaccgagagctctagctggtgctgcaaaatccacagtgatgagtactagcacataatcatgagacacca

SEQ ID NO: 166713 - DNA, 1375 bp, Arabidopsis thaliana landsberg
actaaaataaccaaagacaaagacagtttatgttatattatacatatatacccaatagttatccacaaatgatcggatcgcttgtttactacttcctccaaaatttggtcatcttcgggatccacaccacgtctcttgtccagaattgtcgtcagccaccttatttttatgtttacttattctgatgggatgcgacaatgttttcgttacatgaagttcttaaaaatatctgatcaaaaagaatgaagctcttaaatattttgaaacataaccaacaaacatttcttttatataaagttaaaatgaaaattttaaacatccaaaaatttccatcaaatatatcttgccttaacaaaacagatacatgttttcttgttggataaattatttcataatttggatcaagtgaaacaaaatgtttctccacttttaactacgtttgtacattgtgcaaaaatctagagaacaagtatatctggaagaaatgtaaccatgcaagtgtattctctcatttagggtaagtacatcccattaaacataaaaatagaaaagtatatgtatatccaattcgtctcatacatgcataccacacaattaatgattctttattcaattacatctttttacataaaaacagatggcataagtgtaaataaagggaaagacgacccaagaataaggggtcacagtcgttgagcttataaaaagcatctcataggactcaacctcaccaaagtcatatcctattgcatcactctcctttaaacacagtcagagaaaacagcaactcttgtctgaaaaactagagagagaaaatggatcatggtaggttaatggatgatcaaatgatgctaggctctcaagtgtacccctacacgacccaaccccaaaattcacactgcatcatcgttaaccagatcgatggaggcgaagaatcaaaaccggtgaagcggaggaggaagaggaggagtaaaggttcatcagccaccaacgaagaagacgtggcggagatcggagggatgttgaggaagaggaagttgaccgatgaacaagtgaacatgctcgaatatagcttcgggaacgagcataagctggagtcagggaggaaggagaagatcgccggagagttaggtcttgacccgagacaggtggctgtttggttccagaaccgccgtgcacgttggaagaacaaaaaactagaggaagagtacgccaaactcaaaaaccaccacgacaacgtcgtactcggccaatgccaactcgagtctcaggtataaattttatgttttttcactataaaacagagtaaatttggtgattcttaatttcatgttgcttgttttttcgaaagatgagtaattttatccgttcttag

SEQ ID NO: 166714 - DNA, 157 bp, Arabidopsis thaliana landsberg
cttcccgttccgcgacggcatcgacgcggccgccgaagccggcatcagcgcagtgatccagcccggcggttcgatgcgcgaccccgagaccatcgctgctgccgacgagcacggcatggcgatggtgttcaccggcatgcgccacttccgccattga

SEQ ID NO: 166715 - DNA, 2352 bp, Arabidopsis thaliana landsberg
  unsure (1)..(2352): unsure at all n locations
cgatcaacatttccatgagtttggttcgattgaataccatatcaaggtatatttttggggcttcctttttttaataataatcttctttcttattcgattatatgtgctcttacaaaatgaaatatatatgatttggacatgcagtactcggtttcggatccaaatattgtgcatgtatcgacgtcgacgttgcttgagacacaaggagcagtgacattgaaggagatttcaagtcacacttatgaggtgattaagaatattggagttggtgnnnnnnnnnnnnnnnnnnnaccaagattagggtttcaattgacccttggcctaaaccttgataatataccacgtggcaaaggtaagcttcaatattgaaatgtactttttcccgctacttagttattataagtttttttcatatttactcattcaaatgcagaagcgattaaaatcattacaaggatttctgaactacaagcgataatattaagtagccaactaaaagagatgctgagaagtttaaattttcaagatgattcacgatcgatcaacaacatgcccatcaggattgtttatcacccaagtgaacctttctacgtctttaaacaggtttattttaccgcgttttatttgtttatctgagttacatccaactaaatataataatggatagagaccaacgtctaaaatttatcgaataactataactataagaataagtctttgaatgttttttcagccggaaaaaatcacggccgtgtttccgatgaattttaaagacaattcggatgtggtcatcgccacgtcgttcttccaggtacaactaaaatgcatacaatcaatgggtgggactagagttttgcattgagacgtcactaaggtttcctttgtcaaattttatctttttatgttaaaaacaaattggacaatacatataaaaaggaactagttgaagtgggaagccaaaaggatatgggaaaagccccacaatgtagttggtcgccaattcctcctctccaacttagaggagaaccggttcaagacttgaccaccaattctggttttgtatcatttggtacgttttgtgtcattttatctgtttataaaacttaatccaacatctttaattagtattcttaaatgtcaaagttcaaacaattctcattgcagatattacttcacggcacattgaaggaaagagactggacaaaacggtttggaacttgctaaatttctacgcatgcgctaagtaccatattaaggtacattagttctagtttttcaaataaaatataatagattttgtgttcttgtaattgaaaattttcaacctcgtattgtttaaatagtgctcgagagggtacatacagagacggatgagaaaaagaatggaaactttagttaaggtatttttatcatatattacgtacacacacgaatctacaacaatagttgacatttcataaacaaaataacttatgtttgtaaatttacattatatacgtagctgctaaataacacaagcctagaagaagaagctgctcaaaatggtatcctttttttttgttacctttaaccttacttaggtttgtaaataaaaaaatcctttttttttgttacctttaaccttacttaggtttgtaaataaaaaacaatattttatcattttttcttttccattctctaatttctatatagaaaacggaagatgcaaatacgtaaaggagtttgtgaaggtaccaaaacgcaaattgatgatgaaacaaagatgcaaggagatgacaaggagagtgaagataagcaagttccggatcaaaatcaacggttgtgctcggtttcgattcaatcagcggtggatatctctccccaaattctcttcgaaaccatcagataaatcatacacaaaattggactaagtaatcacttaacttggaaagtctcaagaaagaggctcggtgttgttgttttttttctttgtcaacatgctttaaaattgaattcggggagcaatattatacgttaatgaatatcttgacaacaaaaaaaaacgttatcagataaacttatggatataatttggtaaaccaaaaataaacctaatcaaaagttggcattgaatgcagcatgttacgtaagagctttgtacaagtaccattcactctttttacttttcaatgtatacaatcatcatgtgataaaaaaaaaaatggaaccaatcaacacactgagatacggccaaaaaatggtaatacataaatgtttgtaggttttgtaatttaaatactttagttaagttatgattttattatttttgcttatcacttatacgaaatcatcaatctattggtatctcttaat

SEQ ID NO: 166716 - DNA, 2075 bp, Arabidopsis thaliana landsberg; identical to SEQ ID NO: 20585
  unsure (1)..(2075): unsure at all n locations

SEQ ID NO: 166717 - DNA, 1532 bp, Arabidopsis thaliana landsberg
cggcggttggcgaccaccaccttgttccatctggtttacattgagtttagtattttatttgagtctcgtatgggtgatgtacttcgtggctttcgcaccgccgatctcagtgatctctccccttctcagttcaggttctacacgaacccctaattagctactttgtttactaatcacaactactagtaaagatttttttatctaatttaataaaatatccttaagttacgttgtaatttgattgaagtaatatcgtgatttgcgcgtgttattgtttaccaaaactaatacaggttcactcctacacctagagatatcaaatatgtagattagtttagaacatacgatgtttatttgtttacttttcttaccaaaaatgttttagaaagtgaaaaacacatttgagggataacaataaatttgagagattaaaacacttattttactttctcttttttcaatgtgtaaacaataacatatggactaactaaatatattttgattacttaatatttaatatttagggttccatttgtcaaaggcaggacggtaagtgagctacaatgtgagaccgtgaaggaagagaatgcgataacggaagagttgtcggagtggcaagacgatgcgagtgaccttgtcatggggacatcgtcagatcccgaccagaggatccgacggctagcagaaatcgtccaccgaactgatgatctgcgactgagaacgatcacacgtgtggtggaggtcttgagtccgctccaacaagcggagtttcttgtcgctgcggctgagcttcgtacaggcgttgctggttgggggactagccacgaccgtcgtcgaagttccgaagtttaaagctaactaaaaccggtctaaaggtaatgagaatcgaggaagaaaaatagtttttggatattaattatatgtttttaccatgtttttggttatccagactgagtttggttttacatggttatgaaaacaaaaaaaactcatatgttatgtctctacggttgcaataaagatcaacccacgtgtggtgcttgttagtttaccttttttagttagaattttgtgtgtttgattttttttatgaggtaattatcggaccttattggggcttctgatagtttgtatataaaaaatactaaagacagagaatcggggacatgggtcattgttggtttctatagaccaagtggataaacagaaaacaaaaagtcagctacagaaaaagacatgaagtgaacgtggcactgccatgtctcttgaagacatgcaagaggacacttggtgtggtacgcgtcctcctatcacggtgtcgattccaaacattttgtttggtttagttttaagattcttcttcgaaagaatctcatttttaatcgaaagatatgatgacatgacaaatttcttcttacataaatttgctcttataatgtttattttcgtgtaagttttatatattttctaaaatattgaacttaaactagctagaccctttataaaaatactatcagcccttttatataatg

SEQ ID NO: 166718 - DNA, 3827 bp, Arabidopsis thaliana landsberg
  unsure (1)..(3827): unsure at all n locations
atgaaaatcattggtcctgttctgctgctccccccagatcccccagatctggtttcttcttcttccctttctgactctgcagccgcctctcctacaaccctaatcgtttctacagtcgcctcagccgctgaacctccgtcactggatcctttatcttgtgtgtcagttccgccgattgtttcttctgttggagttcccgtctctgttcctcccctcgcgtcttctggagatactgtagctacgtcttctgtcgctgcagtttctgaaagtcctgtatccccaatccagtcctcaattcctgctagcattccttctaccgcagcaccttcatactctcagcggttcaaggcttctttaaggaatttaagaaaaatctcttcaccggtctgtactgaagatggcacaccggtggttcaggcaccagcttcagtccttttgaaaacggcagagcagtggaagggacatatagtggcgcaattccatggcctcattccgcatccaaagaaaatcttctctgatttgaatccagcttggggcaagtttggaaacatagtcattcgcgcagtctcggatacctcgtgtcttatcttcataccctgtacttcgaccagggagtgggtattgcaagtggggtactggcaggcaggtaattgtgctttctcggtgtacccgtggtcacctgatgcttcattgcagatgttggatttggagacggctcctacatgggcaattctagaaaatgtcccggctcagatgtactcacttgatggcattagtgtcattgcaagtgcaattgggaagccactgcatacggagaagtcgaagttagatcctttctactttggcaacacaaaggtgaaggtggaaatctccttggccaaaccgcctccgacaactatcattgttagggatgctatgatgaatcaagttaaagtgcgtgtgtcataccctcgtttacctccaaagtgttgtaactgtgatcggtttgggcatttgttggatagatgtccaaagcctttgttgaggaagaagcatggagctgcagctaagggtatggagccaggagggactgcaattgcagaaactttaacaccgcttggaaaggagagtataagctctcagacagaccaaagccagaagagaccgactaacccaagtaaaaggactcgggctcgggcggaaactcggagaagatcaaaagagaggagcagaagttctcctccggttgatatatctgttagtcataagcgtgacgagaatatgtctatccaaactcaggagttagttaaggcgtggatcaaagaaagtgcagacaagaagttgcaggttactaaaattgttgagtctcaaccttctattgcagataaagatcaatggatagaggtaggagccaatggaaaaggaaagagtattaagaaagtcttggaggtgaaagattcttttgtgggaaaagtctatggtaagccgggtgctgctgagccgttaagactgtttcccggaatgaaaagtgctagaaagcttgctaagttagaagctaagatggtttttgtcaagaagcctctcaagggtcctgttttgccttcagttgttaggaagggaggtgagcaggtttctggtattgcttcttcgtctcaggttgatcggggtactccctcggttaagcttgtttctctctgatagagcatagctctaacaacttttgggttcttaatgatagtttttggatggaatattagaggcttnnnnnnnnnnnnnnnnnnnaggttattggcggggtgttggagactcatgcctcagtggagaatgctcagcgggtttttggaggagcttttccggggtggagaggcgagatgaactacgagtttgcggagaatggtaggatttgggtcgtgtgggaccttgctgtttcagttatttgtctgtataagtcggctcagataatgctgtgtggagtttatgtgcctgccactaaagaaaatttcttagttgcatttgtatatgcttataacacagcagttcaaaggagggaattgtggcaggatattcaaaatatttttgaggcttctccagctagatattcgcctttgatgttagtgggggattttaaccagattctgtatgcatctgaacattattcagtgttaccacatactttgcctcttgcaggaatggcagaatttcatgactgtatagtggacaatgagctaagagacttgccggctagaggtgcttttttcacctggtataatgagcgtattgatgatccggtggtgagaaagttggatagggttttggtgaacgatcattggactgctgcgtttcctgagtccttatcagttttgaccctccaggagattcagaccattctccttgtttgatctactcctcagctttggtggaaagaagtaataaggcctttaagtacttctcttttctctctacgcacagaaggtttttggatgttatcagtgaagcttggcaggtggaagttggtgtcggttctaagctgtttactttggctcagaggatgaaaatagtaaaagcagcgtgtaaaaaattgaatagagagggctttggtaatatacagcaaagaaccaaagactcacttgaaaagctagaattgattcaagcagcaatgatgattactccgtctgatagacttttcagggaagaatttgttgcaagaaaggagtggatgttcttcgcaaaagctcaagagtccttttataggcaaaaatcaagaataagatggataaaggaaggtgatgcaaataccactttcttttttaagtatgtgattgcaaatttgggcagaaattgtatcaagatgctgaggaatgaggatggggaaaggattcaggatgtggcgcagttaaaggatatgctgatttcgtattaccaaaatctgttgggcactcaaattgtaggagtctctcctttgtctattgatgaaattcaagatctggtgtcctttaggtgttcaaccggtttggttctcagctaataaaggtcccaacaagggaggagattcgggatactgtcgcttctatgcctaagaacaaagctccgggtcccgatgggtttcctgctgagttctattgggaagcgtgggatgtggttggtcaggatttaatagaagcggttcagggtttcttttcttctggaaggttaccaaagaacttcaatactactgcgattactctgatccctaaggtgcaaggggctgatagtgtgtctcagtttcgtccgatctcttgctgtactactatatacaagattattgcaagactgattaagcaaaaactcaagctttttatctctgatgcagttcaaggtaaccaagtgggctttgtgaaggggcgtcttttgtgtgagaacgttctgttggcttctgagctagtcacaaatttccattctcatggtattacttcaagaggttgtcttcaggttgatcttgccaaagcttatgataatttggattggggattccttttgaatgttctgcaggccattaatcttcctgaggtgtttattggttgggttaaagagtgcttcacgactacttccttcagtgtcgcttttaatggggaacttataggcttcttccctggtaagaagggtctgaggcagggagatccaatctcttctctgctttttgttttggcagcgcatgatctgtcaatgaagttggacaggggcgctacgactaagaggacatgcatccccccctagagagaagttccttatactactcatctagctgtggcataccgcgaagacgatttattttttgggaaacatagatactatagaaggtatactatatg

SEQ ID NO: 166719 - DNA, 3215 bp, Arabidopsis thaliana landsberg
gcctctggcagcttgatgcccctctctgcggcaagattgtagaggttattcaggataaactgtgagacctgactgcgatccttgcggataggggttgcagaaaaccttccggcatgcttaaagatctacctgccatgattaatggagtaaaagtgcctacagacttcgtggtgctggatatggaagtagagcataaggatctcttaatcctgggaagacccttcttagcttcattgggagcagtgatagatgtcagggaaggaaaaataagtctcaaccttggaaagcacatcaagttgcagtttaacatcaacagaactccacaagggttaacagaagatggaaatacttctggaaatgatagaatgatctcagaagaaggatatgagactgaaagagtgaaagaatttaaaaagaggtctgataagcaagatgaaactatagagaagctagcccacactgttgaggaacttagaagtaagttaaatcagttgcagaaagaagctcaacctaaacgaaggattgacaccatcccgagaaagaagttcacttcaagatggtctgaagagatagattaccctccagaagagaaagaaacatattttgaagagaggggaattgagtattctgttgcagacctctccagggagaacgctgagtatgatgatgatatcagagaggattatgcagaccctctctatagttcattttcttcttgataagtgtgaggagtcaagctagagatttaaaacaagctcacttgggaggaagtcccatgattatccttgtaaataatttttactttcttgttatttttgatttgttttagttgtgtttgtggttctctggaaaaaaaaaaagaagtaacgtgagggtagagtaaaaattcaaaacttttactctactgatggtctggagatcgagtacattggtcgagtatgagtgatgtttaaagcccaaaaaaaacttttaaatcattactttactcgaccaacagaaggtacagagtcttccaggagtctatcaagtttacaatggattgcgggatttcttggagttttcctagtgaaaagagaatacagagaagagacaagaagacaacgagggacccactgctgcagccatgtctcccacgctccccacaaggttataaagaaatctccatgcctcttccctcaccactcgaccactccctatcctcttcccatctcagcttactcgtccccaaccctctcaccaacacttcacatgcaaccaagaaatccccatcaccccccacgcttataactctaccactcgacctcatcgttttctcctccataacccctcctcactcgacctcaccatctcttttcctcacaaccactcgactcgacctcgccatcatcaccaatccatcaccactcgaccccatcatcttctctcttcatatactcgacctcgccgtgtcactcgtcctcgccgctaatcaccaccacaacaactagggttctcatcaccatagtcatcctcacaaccttcactcgacctctccactaccacaaccactcgaccgctacacaccaccgtcttctcttcttccgcgagctccacattactcgatccccaatcaccatcttcttcatcgtttcaccactaggtcacgtctaccaaccgtccacaatcactcgacttcttctcacatcacctcatcaccttctccgtccaagcctcactactcgaccaaggtgccatcgttctcacatctctcaagtccattcatcactcgattcaccgccaaagcgacgccactcgaccacaagcccgccttcatttcacagttcactcgaccgctcctctatttccacggtcaaaccgcaactgctctcctcctcttcaagctcaccactcgaccaccgcctcactctaaccacgaaactagctgcactcgaccatacaaaatcacttgatcaaccgaaagaaaagaaaaaaaaaaaaatcaaaaccgacggtttactcgatcacatcagtcgaccggtttgtgtttttggtttgttaagactaacgtattaatgtttatccttgagtttcatttgttttcaggtttcatcatgagtaactacagtggagaatcctcaatggatcctgattataacgtagatgaagcagagtcttggtccactagacaagagagagaagaacacgtttacgagagttttatagaagaatttgagcgctccgcagcacgacgtaatcagagaagagctaaaatcgctagaggaaagagagcgatgtcgagtagatatgagctgattgatgaggatatcgaaagtgagtatgagccaaagtcatggcgcaaggagacgaagctgctgaacaaacctgacgaggttacagtggaagagtatatcaggttctttgagatgaataatttctggggaacgcggtatccgtgctatgagactttagcccagctggggttactggaggacgtgcagcatctgttcgagaagtgtcatctggagaaactcatgtcttacccttaccctgcctataaggaggagacaatcgagtttctttccacgctgcaagtggagatgtatgaggcactcacagactttgagctggataccatggggttaggtttcttgacgttctcagtggatgaacagcggtatcagctttcgatcaagaagttagaagaactgtttggtttccctagtggaaagggaaccaaaccaagatttgacagagaagagcttaaggacttgtgggccacaattgggaacagtctaccgttaaactcggcgaggtccaagagcaaccaaatccagagtcctgtgatccgctactttcagggatcggttgccaacgtcttttactccagggagtctacaggcaccgtgtctaacacggacatggagatgatagattatgcgcttacagggattctccactggacgaagggagagaatgtcttgagtggcgatctcaacaacgcaccaccagtaatgcctctgttgatccatctgtgtggatacaggaagtgggcgttgacgaacggaaagaataaggtgagaggagcactatgcgtgggtggctttgtgacgccaattctgcaagcttgtggagtaccgctcaaggaaccagggttagcaccgagaatgatggacttggatcatttgtgccgatgtgagttcttggagtttgacatggctggcgactttcaccgctat

SEQ ID NO: 166720 - DNA, 312 bp, Arabidopsis thaliana landsberg
gtgcggatgatatggcacccgggggcctgttagccagcgtggttcatatggcgataatagactatggtgttgatcgacacggaagaagtctgcagaaaagtatggactcgcagaggtagtcctaagagtccaccaggtgtatgggtttgccaaagtccggatctccaagagcgtaggtcttataatatgttaggtgtcacttatgttagccatccacgcctgcaacggttcgtaatgtccgacagttgcatagggtggccttgttgtaaggattataagccccccgatttttatatgatcccggcccccttc

SEQ ID NO: 166721 - DNA, 688 bp, Arabidopsis thaliana landsberg
atggaaatatcagctcttcttacttctgcgggaattaatatatcgataatgcatagttcttttatcactttactccatacttaggaaacagccacccaattactgtgtatattttggccaaaggcttgtttgtggtggtgctagacggttatgatcctttttggtatgagaggtttgtgccgtctccaagttggcttgtgaaagcatgggagactagtgaagacgagttattagctgctgctggtcttgatgctgtcgtcttccttaggatggtcattttcaggttactgaaaataaactctcccagatgctttttctttgttctgcttcttggttttgttctgtagtgtttgttttactttgtgttttttgttctgcagcattcgtattttctttatagttgctgttatttgcattgcctttgtgctgcctgttaattattatgggcaaccgatggtgcataaggaaatccatttggagtcatccgaagtgtttacaattgaaaatcttaaagaaggctcaaaatggtaaatgtttttttttatctctacctatgtctctttgaaagatgttactctatgcagagagtgtaaagtgctgattttttcttattacatttaaagctctcaggctgtgggttcattgtcttgcactgtactttataacctcagcggcatgttttttgcta

SEQ ID NO: 166722 - DNA, 935 bp, Arabidopsis thaliana landsberg
acatactcatcatcaatggcgctaaaggtaaccaagatctcccaagtcagcccagcaagtaactcgtccaatgactcagccaactcgatggttcttccactgacgttcttcgacttacgttggttacaattccatcccaccgaaagagttatcttctacaaactcatcaaagactcatctcttcagtccttcctctccgtgatcctccccaaacttgagctctctctctccatcgtccttcgtcactacctcccgctcgctggccgcctcacatggagctcacaagatcctaaacctagcatcatcgtctctccgaacgactatgtttccttgactgtcgcggagagtgatgctgatttctcccgtatctccggtaaagggctacgtcccgaatcggagatacgctctttggtgcccgagttatcgctttcttgtgactcaccttcggttctttctttgcaagtcactttgttccccaaccaagggttttgtattggtatcgcttctcatcattctgttatggacgggaaaacagtgattaggtttataaaatcatgggctcacatttgtaaacatggagccatggatttaccggaggatttaactccggttttagatcgtacggttatcaatgttccttcaagtcttgatgcaaaaatcattgaacttttgtcatatttctcagaagtgaaagatagtttcagatcattgaagctgcttcctcccaaggagatcagcccgacctagtacggatctcgctcgagttgactcgagagaatatagagaacttagggagcaagccaagagggagtcagctcgctctcatcatgagcttcacttgtcaacgttcgttgttccaacgcgtatctgggcaggcttggtaaatacgcataagaactcccccagccggtgcgtttcatgtataagataaaaag

SEQ ID NO: 166723 - DNA, 1305 bp, Arabidopsis thaliana landsberg
ccaatgattcgaggattgcttttgggaatcatctggatgatattttgtgtttgttcatcatttcagcaagagacgccgtttgtttacaacaactttggtcaagtagatcatcttcaccttgacggtagtgcaagaatcattcccagtggtggtatcctgcaactgacaaatgcaaccaatagccaaataggtcatgttttctacgagaagccgattgagttcaaatcatctgaatcagtctcgttctcgacatattttgtgtgtgcactgctccctgctggtgatccgagtggccatggcatgaccttttttgtgtctcattccactgatttcaaaggcgcagaagcaactcgatacttcgggattttcaacagaaatggttctacttccacacgtgtgttggctgtagagcttgacacttctctagcttcagatgtgaaagacatcagcgataatcatgttgggattgatgtgaacagcgcagagtctattacatctgccaatgcttcttatttttcagacaaagaagggaagaagatagacataaaactcttgagtggtgatcctatccaggtttgggtggactatgaaggaacaacgctcaacgtttcattggctcctcttagaaacaagaaaccaagccgacctcttttgtcatcaacatccatcaatctaactgatattttgcaaggtagaagaatgtttgttgggttttctggctcaaccggatcaagcatgagttaccagtacatactcgggtggagtttcagcaaaagcatggcgtctctgccgaacattgacatctcaaaacttcccaaagttcctcactctagcactaaaaagaagtctacatctcctgtgctcagtcttctgcttggtttaatagctttcatagttttggggattcttgttgtagcttatttgtataggagaaacttgtactctgaagtaagagaggaatgggaaaaagagtatggtccaattaggtattcctacaaatctctatacaaagcaaccaaaggattcaataggagtgaatttcttgggagaggaggttttggtgaagtctacaaaggaactctccctcggagcagagaactgagagaagtagcagtgaagcgagtatcacatgatggtgagcacggtatgaagcaatttgttgctgagatcgtgagcatgaggagtttaaaacaccggagcttggttccacttcttgggtattgcaggagaaaacatgagttattactggtgtctgagtacatgccaaatgggagtcttgaccattacttgtttaatcatgataga

SEQ ID NO: 166724 - DNA, 1934 bp, Arabidopsis thaliana landsberg
gcaacaccaatgtgttaatccgcttatcaagtgattctccacagcaacaacaaggtcaaaccttttgttccctaaaactaaggtcaaaccttttgttccctaaaactaaggttttgttcccaagcagcaatttcaggggaactaccagcagcaaccaccacttgggtttgcacctcagcaacataaaggccctgctgctcctgacattaacatgaaacaaatgctacaacagctgctctaaggacaagcatccggctccatggagattgctaagaaaatatatgagttacacaataagctagactgtagctacaatgatctaaatgtcaaggtggagacactgaattctaaagttagattcttggaggaaaattccgcatctacttccgctcaaaactagataagccaacttccaggaaaagcaattcagaatccaaaagaatatgctcatgctatcaccatacgctgtggaaaagcacttccaaccagagaggaacctaagatagtcaccgaggacacagtagatctagatggggaaaattttagttttagtaaagatcaagctaacaaggaacttgagcagccactcgaccagtcactcgagcagccactcgacctcgtcactcgaccacctttcctaataacatcactaactgctctaaaactagttgctgtaaaaaacaaagaaaaggtctttgttcctcttccttacaaaccccaacttccatttcctggccgtcacaaaaaaatattggcagataagtatagagctatgtttgccaagaacatcaaggaggtttagttgcagatacctcaaattgacgctctagcactaatctcggattcccacaagtttctgaaagacttgatcgtggagagaattcaagaagtgcaacggatggtagaattgagtcacgaatgcagtgctattatacagaagaagatcattctaaagaagcttagtgatcctggttcattcactctaccatgctctttaggtccattggctttcaacagatgcctatgtgatttaagagcatcagtcagtctcatgccactctccgttgccaaaagattggggctcactcaatacaaatcttgcaacatatcccttatcctagctgacagatcagtaaggatccctcatggtttacttgaaaacataccaatcacgattggagctgtagagataccacagaatttgtagtcctagaaatggatgaagagcccaaagaccctttgattttgggaagatcattcttagcaactgcaggagctattattgatgtcaagaaagggaagatcgatctaaaccttggcaaagattttaggatgacctttgacgtcaaagatgcaatgaagaagcctactatagaagggcaactcttttggatcgaagagatggatcagttagctgataaaaggctaaaaaagttaaaaaaacaggatcatttcaagaggcttctaacaaaggatagcgaagaaggaaatttgcacttggagactttggggtaccagaagcttttggatgaacataaagcagcttagaatccaggagaatatgaagatttgggtgaaagggcaagggacaaatatatactcgaccacatcactcggccaacagcccattcagtctactcgaccacatcactcgatcacagccactcctctgaagccaacttagtatccaatgactggtctgaactcaaggcgcccaaagtcgatttaaaaccactaccaaaagggctaaggtacgtttttcttggactaaactctacttatcctgtcatagtgaatgatgagctaactcctgatcaaataaaactgataataactgagcttaaaaagtataggaaagctataggatactcaaagctataggagatcctaatttttttagaatgatcttatgccgaatgatcgcactgcattcg

SEQ ID NO: 166725 - DNA, 752 bp, Arabidopsis thaliana landsberg
cgtccgttcggccttgcctttgacaaatccacttgtgacctctatatagccgatgcttatacgggccttcttaaagttggcacaacatgtggtgtaaccaatcaggttttgtcatgtgagctgaatgaagcccttcgattgaccaatggataggatatcgatccacggaccgaagttatctactttatagagttaaaattatcttatattatcttaaacaaagaacatgtttatactttatattaataaaaggagcatgtttatatgatggattagctcgtaattgttaatttaattgattaattgagggatagtacgatgagtggagacagaatcggtagactaatgaagtatgacccaactacgaaacaattgaccactcttccaagttctaagcaacatagcattcgcaggcatcgtttggagtaaaaacggtgattactttatagttgtcgatcgatgccaccacgtgtggaatcctatattactgggttaacgtctaaattttaggaaaactactaaatttttgtggaaaggcttttggggttatccgacaacagaaatagatccagaattcggagtagccgggtaggcatatggaacatgtggcttggaactgccagtggactggatccattcggtttgggccaagtacaaaaggaacgacatcgtcgtgaggttgaccgagagtagtggcgtaatttcgaataatttcggaagtttggaaggtagaaataaaccacaaaagaact

SEQ ID NO: 166726 - DNA, 1667 bp, Arabidopsis thaliana landsberg
  unsure (1)..(1667): unsure at all n locations
aagaggagaaaattatgttgggagcgagcagaagctgcgaaagccgaggtagaggaactgttaagcttcggctccatcaccgaggcaaattaccccgactgactcgcaaatctaatcgtagtaaaagagaaaaacggcaaatggagagtctgcctgcccaaatgacagtttcccattgccgcatatcaatcgcctcgtggaatcaacctctggaaacaaattgctatcattcatggacgcttcctcgaatatctagtcacgcatcgcggcatcgaggcaaatccgaagcaaatcgaggcgttattaggaatgacatcacctcaaaacaagcgagaagtgcagcgcctaactggaagagttgcagcccttaaccgattcatctctcaatctaccgacaaatgcttggctttttacgatgtgctccgggggaacaaaaaattcgaatggacaacccgatgcgaagaggcttttcagaaactcaagaagtacctggcgaccccaccaatcctcgcaaaacccgtaatcggggaaccactctacttatatgttgtcgtgtcggatactgcagtcaggggagtgttagtccgagaagacagaggcgagcataaaccgattttttacgtctcgcagacactcaccggcgcggagtatcgctacccgcaaatggaaaactcgccctagtagtcgtaatgtcggctcggaaactgcgaccctactttcaatcccattccatcgtagtaatgggatccatgctgctctgcactgtcttacacagtccaagccaatcaggacgcctggctaaatgggaaatcgagctcatcgaatatgccatcgagtatcggaactacccagaaaggaggcccgggagaatccgctcgatacaacttggctattgcatgtagatagctcgtcatcaaagcaaggttcgggcgtgggcatccgtctcacttcccatacgggagaggttctcgaacaatcattcagattaaacttcgaggctaccaacaacgtggtcgagtacgaagcgctcgtagccggactcaatttttgtgactctcagctcgtcgtaaatcaattcaaaggagaatacacggctcgggacaaaagaatggaagcctatctggctcatgtacaaaatctggcgaagcattttgacgaattcgagttaacgaggatccctcgaggagaaaatacatcggccgacaccctagctgctctggcctcaacaactgacccaagcctgagatgagtcattccggtagannnnnnnnnnnnnnnnnnnnnnnnnnnnnnnnnnaacgaacttgtcttccacatacaagttggcgcggattgcgacgacgcttcggatgatagcccagacctgggttgcgacttcgaatggatatatcccatcaaaagctacatattcaaagggaaagtgccctcagacaaatgggaagctcagaaacttaaagctcagctgcgcgcttcgttctggtcgaggaaaaactctacaagtggcgactatccggacccttaatgacttgtgtggaaatagaagcggctcgcaaagtcatgaaagaagttcacggaggctcgtgtggaaatcattccgggggaagagccttagccatcaagataaaatgccacggtttcttctagccgacgatgatcaaagattgcaa

SEQ ID NO: 166727 - DNA, 737 bp, Arabidopsis thaliana landsberg
atgtgtagcttgatggcaagcttgttgctcccagcaaacttgaaaccagatttttcagacaaagagagaagtagctcaatcccttcaactactagaagttccaagaggaagaagcaatctatgtttcctgtaaaaatctaaatcttttacctgagaaatgttttcaaaactctgtttcttaaagagatatgttttatctgaaatcaaatgttagtgttatttttcattttgttttgaaatggtgaaggttgcaagactattcggacaggcgattttcgaagcttctaaactgaatgtcaagttcttaggagttgatgagaagaagcatccaccgaatcttccaagaacttacactttcactcatagtgacatcaccgctaagttaactttagctatttctcactcgatcaataactctcaggtaattagttatccattacctctctacagtttaacacatgtaaagacatggatttagaatttagagttttagcaaacctgagtaagtttttagcccatggttggattagctgcaaggatgggcaaacaggttgtaccgagacgaagtagttgccgaatggaggaaggtgaaaagtaacatgtcgcttcacgttcattgtcacattagcggtgatcattttcttttggatctcattgcggaacttcgttacttcatattttgcaaggagttacccatggtaatttttttttaaccaagtaactatattctagtggtt

SEQ ID NO: 166728 - DNA, 2064 bp, Arabidopsis thaliana landsberg; identical to SEQ ID NO: 26150
  unsure (1)..(2064): unsure at all n locations

SEQ ID NO: 166729 - DNA, 1808 bp, Arabidopsis thaliana landsberg; identical to SEQ ID NO: 12247

SEQ ID NO: 166730 - DNA, 353 bp, Arabidopsis thaliana landsberg
  unsure (1)..(353): unsure at all n locations
gttttttgttgaaattgttcagacagtgtttgattgggacnagttcacaggagatgacaaaatgggagatgcgaacatagacattcaaccatacttagaggctttgaaaatggggatggagcttttgaggctacctaatgggtgtgctatcaaaagggttcaaccattcaaggcacaattgtttatctgatgagagtagcattgtttggaacaatggtaagatcacacaagacttgatccttagacttaacaatgtcgaatgtggcgagattgagatcatgcttgaatggcatgaaggtgctggttgcagaggtatcacttcctcttccaaaggtggaggctcttcctctacc

SEQ ID NO: 166731 - DNA, 665 bp, Arabidopsis thaliana landsberg
atcttgattcgtaccaatgacgacgttcaattactatttagcgggcatccaacgatcgttaactccgtcggagtcaacccaatcctacgcctccacgtggtctttcctcttcaccgccgtctcatcttacatcatcgccgccgtcactctccacctcctcctcctcataaccctctccctctctaaccgccgtcgcggattctccctcggtccaatcccagctctacacagcttaaccatttccataatctccgccgtcatattcgtcggtatcctcctctccgccgcagcagagatcagagacacgcggtggctatggcgtcgcacccgcaccactgctctccaatggttcctctgctttcccgtaggtacacgcgcttcgggacgcgtgttcttctggtcatacgcgttttacctctcaagattccttcacttgttccgtactttcttctccgtgatacgacgtcgtaaactcagcttcttccagcttatcaaccagtcttctcttctctgtatctccttcctctggctcgaatattcccaatcctttcaggtataaaataaccgggttaccaaacattaaaccggaatcaattaccgaatttataaatttgaaccgttcttcctgggtttggtttctgtaggtggtagcgatactattaacg

SEQ ID NO: 166732 - DNA, 1473 bp, Arabidopsis thaliana landsberg
  unsure (1)..(1473): unsure at all n locations
aaacattaggaagagttatggtttccctatgcattttgattatggatcgaaagaagacatggatcaagcttggtccgaaatgaaagcaagtgaagcaaggacgcatctctttggagtttggaattggaagtacttaaggaagacgaccacaattgcaaaaggatgctccactctaaaatactactttgctaatgtccatttatgctttttcttgttcgttgtgcctaaacgtttccttctgatgtaggtgnnnnnnnnnnnnnnnnnnnnnnnnnnnnnnagggggagcatgatatgactattcccgagcaccacccgaaacttgaaccagcggagcagcttatagccgaggaacaacttggagccgaggagcagcatgtagtggaggaagctttggccaaaccaagaagacaaatgactcgctcgaagaccaaacttctcaacaaagctatttcggactacccaaacacttggacaacaaccatgatggttgcaatatctttccaagacgattggtaatgggctaagtgttgctttgggtgctcttttcccctgctaaggttttgtcccattgggttttccttagtagatttttaacgaggcctaagtaacacttccaaatcctcccttatcaatccggcccaagcccactaagaggaccacgaatttggaaggccatgggtctattttgtgttcaaaatttcatttatgatttctccttttccgagtaatcttggagcttgttccaagactaactcttccccttctcttcttctctatttaaactcttgaatttcctctttgtagactcaactatcttttaatcaaaaacctttttacgttagatcaatctcttgttcttctctttggtgcgtaatatccaacgacgagttcaagatcggtaaatcaaaggcttttccgcaacctttgtgtgaccatttgccccacatcctttcatcatagtaatctctcgattgctttggatgcaaagcctatctcctactcaacctaaagagtatcggtcttagggaattcatattaacacatctcctaaagctgatagacttcacctctagagtcaacaacagagacccttacaactcagcccacagatgagtgctgtagagaatcagtgttgattgacaccacacaccttgttgatcgacaccatcgtgattcacagacatatgcttctgcacctccttcacagcccacacctatttcaattccctatgataggtactccactatctcttctcctactgttccttcgattacctctttagaatctttgatttgtggttcaccggtaaacgagcatcgaggggcttgggagcttgtttcttctgttgatcttgcaggacaaggagagagtatcgatcgacacctgatgttgtatagactcgatctgtttacacaccgccttgaaaagcgagattgcagcacaagtcctcgacccctctatccaagtgg

SEQ ID NO: 166733 - DNA, 379 bp, Arabidopsis thaliana landsberg
  unsure (1)..(379): unsure at all n locations
ttccgacatgtaagcagtcccgtgagaatccgtaaaagtaagctaccatgcttcaagaccgattcttgggcgacaaggcatcgaaggcttatgtattggcttatcgttatcgcaatattgatgccatgttctgcattcgctgaatctctcacgggaaaagctaccatcatcgacggcgacacaatcgagattcaccagcggcgcgttcgcctatcaggtatagacgcgcctgagtccgatcagctttgccgtggtgacgatagcttgccttataggtgcggcgcgaaagccgccaacgacctagaccgcttcatggcaggcannnnnnnnnnnnnnnnnnnnnnnnnnnnnnnnncctacaagctgatcgtcgctatct

SEQ ID NO: 166734 - DNA, 1382 bp, Arabidopsis thaliana landsberg
  unsure (1)..(1382): unsure at all n locations
aaaagttcaaaagtgaaaaattcaagaaggatcttaatcaagagatgatcagcagngcctctactgaagaggggtacaagaagaaagtcatccaagaaaagcttgatgatcccggttcattcactctaccatgctctctaggaccattgacattcaataggtgcctttgtgatttgggagcatctcttagccttatgcctctctctacagctaaaaggctagggatcatggaattcaagttctgaaacttagccttactcttagctgatggttctgttgcacatcctcatggtctagtagagaatctgcctgtcaagattagaaatgttgagatacctacagactttgtggtattggacgtagatgaagaaggcaaggatcccctgatcctaggcagaccattcttagcttcagctggagcagtcatagacgtcaggaatggaaaaattaatctgaaccttgaaaaaggcatcaagatgaagtttgacatcagggaagcttcaaagaaatcaacaacaggaggtcagagttttgggattcaggacatggatgttgatgaagaaacagaagctgaaacctcaccaaaagtcaactatacttctcaactcaacaagctgaagagaactattgaccacaagaagagagcaatagaagggttagctcagactgaagatcctacagaagatgactggtatgagatgagaaaataatttaaatggcaaagaagagtcatagagggattatcttcaagggtgatgaagctgaaagatcaactatagatgtttgaaaaaagagttaataagttttcaaatggtattgatacagaaaagatggaaactgcactagctatcaaggaggacgaagatttcacaacnnnnnnnnnnnnnnnnnnnnnnnnnnnnnnnnnnnnnttagaggaaaaaagcctagagagcaagttgttgagtgaggaggaaacccctattccgacttattctccaggagtgcctaaatagtccacaaacccctctactgaagaagaacacttgacacttgactctgttgctgaaaaacttctggaactcaggatagagtaccaagctcaaaaggataccattgggaagttaacctacaagatgaaagaactgaaccatgcaatcttggaactttaagaaatggttaatacttaccccggttttgaaattgagccttggtcaaaagaacctggttcagaagaagaagactactctactgatcataaagaagtttattttgaagaaaaatcaaatgagtactcatcattacatatgtcaagagaggatggagtgtatggttcaagcattgaagattcaaccactaaagatgaggacttctcagttcctcctttcaacctttttttgact

SEQ ID NO: 166735 - DNA, 356 bp, Arabidopsis thaliana landsberg; identical to SEQ ID NO: 68592

SEQ ID NO: 166736 - DNA, 1336 bp, Arabidopsis thaliana landsberg
aaggtccctgaacaaattgtagttcccaagcaaagcctaaaaccatcacttgaaccaagcgttgagccaatgcactgtaagtcttctaatctttcaaaatccagaggagacacttgttataactgtcgtaagaaaggacatttagttgcaacttgccctgaaaaacttgagctaactaatacttcattagaatcgaaactgagctcaccaaactcaagtagtgaagtagttagtcaaggtttagaaaattctagttcttgtgtcatgcacttgttcttgtcaaaggatgttgattcaggtgatattatggagcatgagaatgacaaaattgaagaaagcacaaaagaggagaatcatcatttggtgtcaaccacttcacaagcttgtcgaactggctatgtttcaaaaatcaccatcttgaataagaaaggaccgccatatgtatcccaaccagttctaaaccgagatttacctaaagaagaaccacgtcaattagttggattcactcaagttgaggctgtcatggtccacaaacaatcacctagagctgaatgcaatattgttttcaaggataaaccaccagatgctacaccaccatttaaaactggaggtatttatctaaactcccaaaatcgaatgaaagctaatttgctttctcttggtgaaggttgtacactttggggggaaatcaagaagactaatgatcgggagataagcactcatcatatgagtcaatcaagagatcctcgtgaagattatcaaaaccaacttcggctaaaacacagggaagaatgcatagaggagcctgaaatggatatttcttcatttagtacttttcatacctatcaatggcgaccaggagagttgttaaatagctatagagaggaggtgttggtcaccaacaatgccttgatccaaaagaacccccagatccaacgccacttccatttgtcatgatgataccaagcaccgaacacactgtgaaccttactcaggtaagtaactctttaactcgatttgtttctcatgtttcaagaactgttactatgagtttatcatatttaggaaacattgagaaagagttagatttatttaaagaatatttggaatcaaactcttgtcttaggataaaagtaaaacatgaacatttcaagaatggtgccttgattaaagctgagccatgtttacttgtttatagtgatttcatgactatgataacgcacttgctttttgccaaaggtgttgacaacattgcaggtataaaagagaagccaccagacttagaatttctcatgtccaatctctttgagaggactgaaattggagttgttttgat

SEQ ID NO: 166737 - DNA, 1246 bp, Arabidopsis thaliana landsberg
ggatttcagaaaaaaaaaagcaaataaaaggaaaaaaaccttcctgatccaggtagctttgttctcaattgtagtatccttaacgagtgttttgcgcaatgcttctgtgatcttggttctagtgtccatttgatgccgcgatccgttgcgttatcccttggtttgacagattgtgagccaacgcaaatcactattgttcttgctgatcgatctgtccatatacctgatggtatcctatgcaatgtccctgtacaagtcggtaatagcatgattcctacagattttgtggttttatcttatgagaaaaaacctaaagatcctctaatcttggtaagatctttcttagccacaagtggtgccattattgacataagaaagggtagaataggcttgaatgtacgtgatctaaaaatgcagtttgacacgaataaggtggttaagaagcctaccatcgatgggcagactttctatgttgacactatctcgtctctagatgaagaattcctgacgggcagacctactgatcgatgggcagacctgctgatcctttagagcatgctctaataccttaaatagacaaagtttcccacgggtatagtaagctgctagatagaaatgagcatgtaatacaattggttgttcaagaggagttaattagcacatctactaaagcagcaacagttggcgactggagcaaaataggcttctaaagttgatctaaagccacttcttgtcattgttaatgcttatttaaacaacgcagagctcaccttattgctaagcaagctgcgcaagtatcgcagagctcttggctattctcttgattatattacaggtatctctccagacttgtgtaggcataggattcaccttaaggatgagtctaagtcctcagttgagcatcagaggagactaaacctgaatctcaaggatgctgttaagaaggagatcatgaaattgttggaagcagggatcatttatcctatttcagatagtgattgggttagtccagtgcatgtggttcctaagaaaggaggtgttacagtggttaagaatgacaagaatgagctgattcctacatggactgttacgggccacaggatgtgtattgactataggaagctgaacgctgcaacaaggaaggatcattttcctctgccattcattgatcaaatgccggaaaggttagctaatcataagtactattgctttcttgatggatactcaggattctttcagatacccg

SEQ ID NO: 166738 - DNA, 1335 bp, Arabidopsis thaliana landsberg
atggtcaccgaagaagttgtagttcacaagcaaaaccgacaaccatcacttgcatcaagcggtgaacaaaagcaatgtaagtcttctaatctttcaaaatccaggggagtcacttgttataactgtcgtaagaaaggacatttagttgcaacttgccctgaaaaatttgagctaactaatacttcattagaatcgaaactgagctcaccaaattcaagtagtgaagtagttagtcaaggattagaaaattctagttcttgtgtcatgcacttgttcttgtcaaaggatgttgattcaggtcagactatggagcatgagaatgacaaaactgaaggaagcacaaaagaggagaatcatcatttggtgtcaaccacttcacaagcttgtcgagctgactatgtttcaaaaatcaccatcttgaacatgaaaggaccgccatatgtatcccaaccagttctaaaccgagagttacctaaacaagaaccacgtgaattaggaggattcactcaagttgaggctgtcatggtccacaaacaatcacctagagctgaatgcaatatttttttcaaggataaaccaccagatgctacaccaccatttaaaactcgaggtatttatctaaactcccaaaatcgaatgaaagctaatttgctttctcttggtgaaggttgtacactttgggggccaatcaagaagactaatgatcgggagataagcactcatcatatgagtcaatcaagagatcctcgtgaagattatcaaaatcaacttcggctaaaacacatggaagaatgcatagcggagcctgaaatggatatttcttcatttagtactttccatacctatcagtggcgaccaggagagttgttagatagctctagagaggaggaattggtcaccaacaatgtcttgatccaaaaaaaaccccggatccaacgccacttccatttgtcatgatgataccaagcaccgaacacactgtgaaccttactcaagtaagtaactctttaactcgatttgtttctcatgtttctataattgttactatgagtttatcatatttaggaaacattgagaaagagttggatttatttaaagaatatttggaatcaaactcttgtcttaggataaaagtaaaacatgaacatttcaagaatggtgcattgattaaagctgagccatgtttacttgtttataatgatttcatgactatgataacgcacttgctttttgccaaaggtgctgaccaacattgcaggtataaaagaggagccaccagacttagaatttcttatgtccaatctctttaataggactggaattggagttgttttg

SEQ ID NO: 166739 - DNA, 2798 bp, Arabidopsis thaliana landsberg
caacacagtcacaacaaaccttttgttccctacaatcaaggttttgttcccaaggatcaatttcaaaggaactaccagcagcaaccaccacctgggtttgcacctcagcaaaaccaaggtcctgctactcctaaggctgacatgaaacaaatggtacaacaactgcttcacgggcaagcctctggctccatggatttggcaaagaagatatctaagttacataacaagctgcactgtagctacaatgatctcaatgtcaaggtggaaacactgaataccaaagtccgatacttagagggatattctgcatcttcttcagctccaaaacagataagcctactaccaggcaaagcaattcagaacccaaaagaatatgttcacgctatcactctgcgtagtggaaaagcacttcaaactagggaggacccaaagacagtcactgacgacagtgaagatcaagatgggccactcgagctgccactcgaccactttactcgaccaactactcgagcaaccttcccagcaacatcaccaactgctccaaaaccagttgctgtcaagaacaaagaaaaggtctttgtccctcctccttacaaaccacagcttccatttcctggccgtcacaagaaagcattggcagataagtatagagctatgtttgcaaagaagattatggaggttgagttgcggatacctcttgttgacgctctagcgctaatcccagaatctcacaagtttctgaaagagttgatcgtggagagaattcaagaagtgcaaggatggtggtattgagccatgaatgcagtgctatcatacagaagaagatcattcctaagaagcttagtgatcctggttcattcactctaccatgcactttaggtccattggctttcaacagatgcctatgtgatttaggagcattagtcaatctcatgccgctctctacagctaaaaggctagggatcatggaatacaagttctgcaacctagctttacttttagttgatggttctattgcacatcctcatggtctaatagaaaatctgcctgtcaagattggaaatgttgagatacctacaaattttgtggtattagacgtagatgaaaaaggcaaggatcccctgatcctaggtagaccattcttagcttcagctggagcagtcatagatgtcagaaatggaaaaattaatccgaaccttgaaaaaggcatcaagatgaagtttgaaatcagagaagcttcagggaaatcaacaacaggagttcagaattttgggattcaggacatggaagttgatgaagaaatagaatctgaaacctcaccaaaagtcaactatacttctcaactcagcaagctgaaaaggacttttgaccacaagaagagagcaacacaaaggctagcttagactgaagatcctacagaagatgaggaaaagatttaaatggcaaagcagagtcatagagggattatcttcaagggtgatgaagctgaaagatcaactatggatgtttgaaaaaagagttaaaaaaatttcaaatggtattgatccagagaagatggaaactgcactatctatcaaggaggacgaacatttcacaacataatggcttgcaccagaagataaaaaaggagttcacttagaggaaagaagcctagagagcaagttgttgagtgagggggaaatctctattccgacttattccccagaagaacactttacacttgattctgttactgaaaaacttctgaaactcaggatataatacaaagctcaagaggataccattggggagctaacttacaagatggaaggactgaaccatgcaatcttggaacttcaagaaatggttaaaggctaccctagttttgaatttgaggattggtcaaaggagcctagctcaaaggaagaagactactctgctgaccagaatgaagcttactttgaagaaaaattaaatgagtactcatcctaccatatgtcaagagaggatgcagaatatgattcaggaactgaaaattcaaccactgaagatgaggactcctttgttcctctcttcaaccttttttttgactgaactctctaagagtcaagcttagtgacttgaaacaagttcactagggaggaagttccatgtctatccatgtaaataactttctatttttcttgttatttttgatgtttttgtttaagtgtttcaggtttgttttagtgaccctaagggagtaaacggtcgagtaaattcaaaccaccccaagaaagatctcaaccgttgataaagtaaccaaaggagaaacattctccattgtttgatagagtgattttttgcgattcattctggtccgtttgaccgagtgattgaggatggaggatttctcaccgtctcatcaagtgaagaaaccaaagagaccctcttcgtaacaccgacgcctcgtgaaccgtctttattgaaacgctcgcgtccctttgtcttcttgtcccccccccctcccataatcactttggtccccccattgcaattcccgaactcaacaacctcatctctccatctcccataccaaagcattctcgaatccttacaattctctcgttatctccttcacttccctttcttatcaaaaacttttcacaaattcatttctttcctccatcattcaatatcctaatctactgaattttggttttgagtttctcccacctttgttcttgatgatgaatagacgctcgcttttgtcaaggattcaaaacaaagctctctccccatcgaggaggtacccaacaccttcttcgcatgcaacagct

SEQ ID NO: 166740 - DNA, 616 bp, Arabidopsis thaliana landsberg; identical to SEQ ID NO: 76916
  unsure (1)..(616): unsure at all n locations

SEQ ID NO: 166741 - DNA, 1032 bp, Arabidopsis thaliana landsberg; identical to SEQ ID NO: 27767

SEQ ID NO: 166742 - DNA, 397 bp, Arabidopsis thaliana landsberg
  unsure (1)..(397): unsure at all n locations
atgttcgctaagaatgacgtaatgatcaatacgttaaggcttcaaaactctcagagattgatgttcacagnaggaaacagcagtcatcatcaaagccgagatttctctccaagaaacagttcatcatcagaaaatattcttctgtctccaagcatgctggattttccgaagctagggctaaacagtcccgtgacgccactgagaagcaacgatgaccccttcaacaagtcatcacctttgtcattagggaactcatcggaagaagacaaagccattgctgataagggcttttatcttcatccatctccagtctcaactcctagagactctcagccactgcttcttcctctttttccggttgcttctccggcgaggaactcttaatcccgacgatatc

SEQ ID NO: 166743 - DNA, 480 bp, Arabidopsis thaliana landsberg
  unsure (1)..(480): unsure at all n locations
tattgtgtcacggcgctacgcgctatcaccgcgcagagtcgacggacgaacctccgggaaatcatggagatcaatctcaattcgatgttcgactgcgccgaacgctttcgaccgatgctgcgggcgacaaaaggggccataatcctcgtgagctcggttgcggcctaccggacactgcgcgagcagccggcttatacggcatccaaatcggggatactgggtctgacgagggccttggccgcggactacattcgggatggcatcaatgtgaacggcttgtcgcccggccttgttgaaacgnnnnnnnnnnnnnnnnnnnnnnnnnnncccaaaatgctcgaaaaaatttcggcgcgcctaccgatcgggcgccccgctatgccggatgaaatggccggagcggcgttgtttctggtctcgccgctgtcgtcatacattgtcgggcacaccctggtcgttgacggcgggatgatgctgtca

SEQ ID NO: 166744 - DNA, 355 bp, Arabidopsis thaliana landsberg
atctaggtcaaggttttagccagcttggtttcatataagcactgtgggggccgtaatacgatgtcgctatcgtagttgtttaggagaaatgcgaatatggcggttcccttatggtcatgcaggccagccatctgttagataggtgcggatgtctgagtaagccaaggggtctacaggtcttgctttcgttcatctgcaggtcatgcgtttggattgcttcctcttttgattgggtagggcttgtcgtattcctcccgcgggccagtcagttaggcctccccatttattagttaatggtggaataaaaaaaaaaagctgtgtaggccgctggctcttaataattatccatgtgccg

SEQ ID NO: 166745 - DNA, 2529 bp, Arabidopsis thaliana landsberg
atgtttgcgatgaatgtgaagatcgacaagttttctgggagaaacagtttcagtctctggcagattaagatgcaagccctgttaaagcaacaaggcttgtgggcgccgctgtctaatgacagtaaagggaagagtgacgctgctgagatggctgtcatggaagagaaggcacactccacaatcatgttgtgtcttgaagatgaagtcatcattgaggtttcaagtgaaaccacttcttttaatctgtggaagaagttagagagtttgtatttgacgaagtctctacagaacaagttgcttctgaagcaacatctgtttgcattaaatatgcaagaagctacgccacttaaagatcacttagatcggttaaattcaatattactaaaactgcgtaatattgatgttaagtttgaagatgaagatgctgctgtgcttttgtcggtatctttaccactatcatataagaattttgtggaatcatttatagtgaatagagttacagttacattggaagaagtcaagtctgcgcttcacatgacgatgtggcgtcatcaggaggctggtacaattacagataatcaagcctctgggctagtagctagtggcagcaatggggtaggatatcgtatgaagaacagaattagaaatctgttttctaagagtcctaagccacatgatgtctgtaattactggaagttaaattgttttgggaggaaacaatcagagtctgctgttgtaacataagatggcattaagtctgaacaagatgttgctcttgtggctgctgaaaattatcacaattctgatgtgtgggttcttgatacaggagcatcatatcatatgtgtccaaggagagagtggttctcaacttatgcacaggtagaaaacggctgcatcaagatggccaacagttctgtcagtcaagttactggaatcggttctattcagatcaggacacatgatgacagattttgcacactgaacgatgtcagacatgttccgtcgatggaaaagaatttgatatcactgagtctgcttgatagtagaggtctgaaatactctagtggagatggaattttgcaggtctgtcaaggttctcatgtgattctgaagggtgtcataagtggtactctatatatactacaggggttcactgttacagtttcagcgaatgttgcatcagcagagattcacaaggaggatatgactaagctatggcatatgagacttggtcatatgagtgaaagagggatgcaaattttatcaaaggaagatcttttgtgtggtcagaagatcaagagtcttgagttctgtgagcattgtgtgtatgggaagcttcaccgtagtaagttccctaaggctgttcacataaccaaaggcacattagattatattcactcggattgttggggtccagctcgagttgaacctctggcaggtcacagatattttatgtcgatgattgatgattattccaggaagacatgggtgatcatgctaaaacacaaaagtgaagctttcaagaactttagggagtggaaaattttggtggaaaatcaaactggaaagaagatcaagaggctgcagacagacaatggtctggagttctgttcatcagagttcaatcagctgtgtaaggatgaaggggttgctcgtcatcacactgtcagagatacaccacactagaatggtgtagctgaacggatgaatcagacattactggtgagagctaggtgtatgctctctaatgctggtttagaaaaacggttctgggctgaagcagtaagtacagcctgctacttgataaatcgtgggccgcacagaggaatcaagtggaggacacctgcagagatgtggtctggtaaatctgctgattactctaatcttaagatttttggctgcacagtttattaccatgtaaatgaaggtaaattggagccaagagcaaggaagggagtatttgtaggctatggagatggagtcaagggattcagggtttggtctccattagagaacagagtgattttgagcaggaatgttgtctttgacgaagtttctatgctcggacgttcagaaaagtctacaactacagaagagagcagtagttttgataaacaggtggagctgacacctaatatgaaagctgatgtacagaaaccagaagacagcaaggagctacaggcagcagatgggtcagctgacactatcaagccagaattaaaaccttacagtatcgctcaaaaccgaacaaggaggattggagttggaccaccacaaagatacggttatgaggatatggcaggattctgtcttgaggatatggcaaggtatgctttacaggttgcagaagaggtggatactcatgagccaaccacttatcgagaagttgtttcatggattgaggctgagaaatggtttgctgcaatgggagatgagatggaatctcacagtaaaaatcagacatgggattttgtcaaacgaccaccaggaagaaagattgttacttgcaagtggatcttcaagataaag

SEQ ID NO: 166746 - DNA, 383 bp, Arabidopsis thaliana landsberg
  unsure (1)..(383): unsure at all n locations
gttgttagttcagtatgatgtcgcattcaggcactcaacctcacganatgagatctatctgatatcgatttaatttggttggagtattaacgttatattgtaaaacactaaaatcatattattccaagaaacgtgtttttttgtttctttctctttctgtgtacgtgtatttgaaacgttggattgttgcagtttacgtgccacacatgagcatactctacggcgatttaacggagggggagaagaagaaagcgttagagaaagcttacacgcttgattcgagtctcgacggattgaattttaagataaatcgagttgcattatggataaccgatgcagacgttggatcgtgggtgaaagttgacgaacatactctaatttct

SEQ ID NO: 166747 - DNA, 508 bp, Arabidopsis thaliana landsberg
  unsure (1)..(508): unsure at all n locations
cgagcacgcggacctcccgggcacgctgtcgatcgggaccgacgccctgaccgccgtgctggtcgagctggggcggcacgccagccggcactggcccgcgatgctgctggtcaacgggcacggcgngaacgtccccgcgatccggtccgcgattcaggcgctgcgtcctgaggggcgggaatgtcgcgtatggcacgcaagcctgcccgacgcggccccgggcgtgccggcggacccgcacgcgggacggttcgagacgtcggtcatgctggccctggccccgtcgcaggtgcggctggaggcagccgcggccggtgacgcccggcccctgcgcgagatcatgccggacctgatgtcgcgcggcgtccgggcggtgtccccgaacggggttctcggggacccggcgggagcttcggcggcggagggcgcgcggctcgtcgaacggctcgtcaccggactgcgggcgaccgtggaaggcctcaacggccgctagcgcggggccttcccg

SEQ ID NO: 166748 - DNA, 541 bp, Arabidopsis thaliana landsberg
atgaaacaagatgaaagaaaagccctgattggcaaatacattctattgattctaggatcggttctgattttagtgccgctccttgctaccctctttagttccttcaaacccactaaggatattgtagataatttctttggctttccaaccaacttcacatgggacaactttagccgtctcttagctgatgggattggaggctattattggaactctgtcgtcatcactgtcttgtctttacttgcagtaatgatctttatccctatggcagcctactccatcgctcgcaatatgagtaaaagaaaagcctttaccatcatgtataccctcttaatcctcggaatcttcgtacctttccaagtcatcatgattccgattacggttatgatgagtaaactcggtttggctaatacctttggtttgatcttgctctacttgacctatgcgattccacagaccctctttctctatgttggctatatcaaaatctcgattccagaaagtctggatgaagcagcagagatcgatggggctactttag

SEQ ID NO: 166749 - DNA, 565 bp, Arabidopsis thaliana landsberg
cgtgctggtggtgctgtcgctgcagctgctcattccatgaaatgtcgtgggactgatatgacagattttcgcgcgtgccgacatcggtctgttcggcgagttcgtcaataacgtgctgcatctcgactacaactacgccaatgggcagctgtcggcctggttcacggtcattctgatggatgtgtggcactggacctcgctggtggcgttgctggcgtatgccggactgtgcgccataccggaagcgttttaccaggcggcgcgcatcgacggcgcctcgcgctggtcggtgttccgcttcgtgcagctgcccaagctcaggggggtgctgaccatcgccatcctgctgcgcttcatctacagcttcaagatctacgcggaagtgctgacggtgacgggcggcgggccggggtcgaccaccacgttcatgaccgaaatgctgcagacctcggcggtcaagcagttcgaatacggcaaggcgggcgcctacggcatcttgtatttcttcatcatcctgctgatcagctacatcttctacctggtgctgacgcgcatgggtactgta

SEQ ID NO: 166750 - DNA, 557 bp, Arabidopsis thaliana landsberg; identical to SEQ ID NO: 75876
  unsure (1)..(557): unsure at all n locations

SEQ ID NO: 166751 - DNA, 1972 bp, Arabidopsis thaliana landsberg
atgggtttgaatctgaatccaatattgagacaagaactggctaatcttgacaaagacacagagagtcgtaaatcagcaatgaaagctcttaaatcttatgtgaaggacttggattcaaaggctattcctggttttctagctcaagttttcgagactaaagaaaccaactctttgtccggtgaatacacgatttcgctttatgaaatccttgctcgtgttcatggacctaacattgtgcctcagattgatacaatcatgtccactattgtcaagactttggcttctagtgctggttctttccctcttcaacaagcgtgttcgaaagttattccggcgattgctcgatatgggatcgatccgactactacagaagacaagaaacgagttataatccactctttgtgtaagcctcttacggattctctattggcctctcaagagagccttacttcaggggctgctttgtgtttgaaggctcttgtggatagtgacaattggcggtttgcttcggatgagatggtgaacagggtttgtcaaaatgtggtagttgcgttggactcaaactccaaccaaacacatcttcaaatgggtttggttatgtcacttgccaagcataatcctttgattgttgaagcttatgcaaggttgctgatacacacggggttgcgaattctaggattcggagtatctgaaggaaactcgcagaaacgattatcagcagtccaaatgttgaacttccttatgaagtgcttggatccgagaagcatatactcggaagttgagttgataataaaagaaatggagaggtgtcaatctgaccaaatggcttatgttagaggagctgcttatgaagcaatgatgacttcaaaaagaatagcggcagagctcgagtcgaagatggagaaaggttgtcgttctgttactggttcgaatttcagtcgaagaaactgttcgtccattgttcctgattactccttatcacctgaatcacagactctaggctcttttagcgggtatgattctccggttgagtcctcgcctatttctcatacttcttgtaactctgaatttgatcggaggagtgtgaaccgcaaactttggagacgtgatgagaatggaggagtggttgatatctctttaaaggatggtcttttctcccgtgtaactaaaggaagcaccactgtctctgattcacctcttgtaccgtatgatacttgtgaaaatggagatgaatttgaagggtttctaatggaaagtttgagaaacaccactcctagtcctcaggtgaacatcaatccatctttgttgtatgtttgttagtttcatttatgttaaacatttctgacttttctgatacacagagacagcgttcacgtcgcatcaatgctgaagatttcaacatcttcagcactccacggaagctaatcagctctcttcaatatcctgatgatgttgatttagatcattcagacatccaaagtccaatactgagaggcgagagagagaaaaccataggatctcgcaagaatcctaaactcagaaagcaatttccaaccatggtggaaacaatgtcatcaactatcacagttagtgaagacacagctcaaacacagatgataaccggtaagaagaagaagaacacgatgagctatgccaaactcgttattgcgatatcttttgttgtggtggctctcttcgcaactgtgatattgatggtgaatcaagatgatgatgttggttactacactgtccctacatgattcacctcttattggtgttaagtttaatcgtagtgtagcagagagagtagtttagctatttaattacgtgttagttgtttgtaatgaacttgatacaagatgtagtagaatcttcttctacttgttgttctcattttgtcccctatcccaatgttaagaatataaacgatgttaaaacaaaaggcttcaaaagagaatggtgtgtggaatta

SEQ ID NO: 166752 - DNA, 725 bp, Arabidopsis thaliana landsberg
  unsure (1)..(725): unsure at all n locations
ttactcggattcatcctttttctccctcgtagacgaaagaccttacatcattagatactctttgagttatgctcctaacttggatcgcttcccacaaacactgtccgataaaatggatgagcttatcatcaatgcgacttcttccccatcgctatcnnnnnnnnnnnnnnnnnnnnnnnnnnnnnnnnnnnngaaacagttcgagggttcgtttgatatagatacaatggctcagtgtagtcctgatcttgatccaagaaactgcacaacgtgtctgaaacttgcggtccaagaaatgttggaatgttgcaaccagtctcgttgggctcagatctttactcctaaatgcctcttgaggtacgaagctaccgctttgtcttcaccgcctccaccatatccatcacctccaccaccttcttcaccacttttttcaccattattgccgtctcccccgctttttaagcggccgcaaaccgcgtcagggtttagcgggtcatcttctattaacgttataaaaggtaattaagcatgcatattatatatcattaatatacgtatataaacgttttgttatacaattcgggttatgaagaagagactatatagagtaaattactaaacagtttgacttttttacttgtcttgcaggaaacaaatcatttgggagattttttattgcggtcatgacagcttatgtgtcaatacttctgggtgtaggaatgtaa

SEQ ID NO: 166753 - DNA, 279 bp, Arabidopsis thaliana landsberg
atggcaagcctgtggcgagctgtaatcggcggtcagaacaacaattccgaagactacggaggcgtagagttctggtctaacccagaacgaaccggctggctcacgaaacaaggagagtacatcaagacttggcgacgccgatggttcgtgctcaaacaagggaaactcttctggttcaaagactccgacgtcacgcgtgtgtcacgccctcgcggtgtcgacccagtcgcatcgtgcttaaccgctaaaggagcagaggatgtactcgacaagcaaaac

SEQ ID NO: 166754 - DNA, 566 bp, Arabidopsis thaliana landsberg
acatatgttgtaaataaaggtggtcaaaagtgaatgacgtcgtgaacaagttggtaaggagtcacttggctgcaagcaaacaacaaacaagtggtcagaatgatgatgatgtggtgtctttggcacatcagatcttctcaaaagattatggctgcaagtttacttgtgagcatgcttggagggagcttagatatgatcaaaagtggattgctcagtctactcatgggaaagcaaagagaagaaaatgtgaagctgactctgactctgttggcgttgaagacaaggaagctcgtcacattggtgttaaggcggccaaagccgtagccaaaggcaaaggcaaagccaagcaaagctcggttgaaggtgaagaaaccaatgctttgaacgaaatacaaagtatatgggagataaaagagaaagatcacgctgccaaagagaagctaatcattattaaagagaagaaaaataggactaagttgcttgagcgtctgttagggaaaacagaacctctatctgacatagagattgatcttaagaacaagttaatcaatgagttgttggcttga

SEQ ID NO: 166755 - DNA, 568 bp, Arabidopsis thaliana landsberg
  unsure (1)..(568): unsure at all n locations
acccggacgtcggcaagcggtctgcccgcgcccgcaccggccagggttcggtttatgcgcatgacccccatgcggttttcgaggaggatgccgaggccgccaccgtgcgccgcccggaacggcannnnnnnnnnnnnnnnnnnatggcgttcgacacgatgcaactgccgcacaacgccaccttgatcgagatcaaggcgcggtataaggaacttgtgaagcgttttcaccccgacgcgaatggcggcgcccgggacgcggaagagcgcctgaaacaggttatcaaggcctatggcgtgctgcgcgcgtcgggtctgctttcctgaccggcgcttcaggcgccctcccccattcaggacatgacatgagcgaccagacagagactctcgatcccgcgcgcctgcccgacacccaggtggatgccgccgacctgttcggcatcaagaccaagatgaaagtgcctgccttcaagaagggcggcgcccatgtgccggaaatcgatcccgcttatcgcttcgaccgcgacaccacgctggcgatcctggccggattcgccttcaaccgccgc

SEQ ID NO: 166756 - DNA, 4127 bp, Arabidopsis thaliana landsberg
acggataatatatgttaacttgtatgtgggaccctcatttgtctctcatggaggctttcaagccttgtgttgaaactgaatagttacatatgcttccaacagaaactagcatgcaaattcatatgttttcctattctactaattatgtattgacacactcgttgtttcttttgaaagatataaagttggacgaatcgagcagctagaaacatctgaccaagcaaaagccagaggtgctaatactgtaagttttcttggataggtcaaggagagtgttgcagactgtttttgatcatttctttttttgtacattactttcatgctgtaattaactcaatggctattctggtctgattatcagataattccaaggaagctagttcaggtattaactccatcaacagcaagcgagggaaacatcgggcctgatgccgtccatcttcttgctataaaagaggtttgttatttacttatttatcttatcatgttcagttcatccaagtcctgaaaaattacactcttctttaccaatcttccatcaagctgtgtaaaggatttggaattagaaaatcattatttgatgctttgttttatatgcaagaggttcccttgaaaagatctgtttaagattctttgcacttgaaaaattcaatctttttaagtgaatcccctactttcttacaatgatcatagtctgcaattgcatgtcaagtaatatcattccttgttactgcatccccctctttcttaatgaccattgtctatgttgtgtttgtctcgtgtgctggagaaaatgatagctgatccaagctgtacattatcatgattaagtagctgctcaggaattgcctttggttacattgcctaatggtttgatgtcaatttttcttctgaatctttattttagatcaaaatggagctacaaaagtgttcaactgtgtatggatttgcttttgttgactgtgctgccttgaggttttgggttgggtccatcagtgatgatgcatcatgtgctgctcttggagcgttattgatgcaggtaagcaagtgtattctgtatcttatgtgtaccatgtgacttcctgtgcatatatttgggttgcaggaactaattctgaatcaccatttggtatgttttttccaggtttctccaaaggaagtgttatatgacagtaaaggtaaactgcttgtatcgccagttgttttgttaaacagaatttaaggtaaatgacactggttaatttaaagtgcatacatgttgaaatattgcagggctatcaagagaagcacaaaaggctctaaggaaatatacgttgacaggtaccatttcagtaggcaagctaactgacaatttaaccgctcaccgaatgataggtctcttaaacattgctaatgtagatgatgtttatgtttcaatctaatagggtctacggcggtacagttggctccagtaccacaagtaatgggggatacagatgctgctggagttagaaatataatagaatctaacggatactttaaaggttcttctgaatcatggaactgtgctgttgatggtctaaatgaatgtgatgttgcccttagtgctcttggagagctaattaatcatctgtctaggctaaaggtgtgttggcttgtttagtttttgcttttcacaaattaagcaaaggaacttttcataacttacagtttctatctacttgcagctagaagatgtacttaagcatggggatatttttccataccaagtttacaggggttgtctcagaattgatggccagacgatcgtaaatcgttggctattgggcaataactgttatggtggtccttcaggcaagtgcatttgtcttttatagtaacagcatctagagggcagacatagaaggaaaaattctcagccttagcatggatctccagtaagtaatatccgatttttgtttacctatgtagggaccttggacaaaaatcttgacaactgtgttagaccaactggtaagcgcctcttaaggaattggatctgccatccactcaaaaatgtagaaagcatcaataaacggcttgatgtagttgaagaattcacggcaaactcagaaagtatgcaaatcactggccagtatctccacaaacttccagacttagaaagactgctcggacgcatcaagtctagcgttcaatcatcagcctctgtgttgcctgctcttctggggaaaaaagtgctgaaacaacgagtaagtatcaatcacaagttttctgagtaatgccttccatgagtagtataggactaaaacattacgggtctagctaaagactgttctccttcttttgcaatgtctggttattcattacatttctcttaacttattgcattgcaggttaaagcatttgggcaaattgtgaaagggttcagaagtggaattgatctgttgttggctctacagaaggaatcaaatatgatgagtttgctttataaactctgtaaacttcctatattagtaggaaaaagcgggctagagttatttctttctcaattcgaagcagccatagatagcgactttccaaattatcaggtgcccatctatctttcatactttacaacaaaatgtctgtcactactcaaagcaatgcatatggcttagatctcaactcacaccccgaggatcctaaagggatttgctttttattcctaatgtttttggatggtttgatttatttctaacttgaacttattaatcttgtaccagaaccaagatgtgacagatgaaaacgctgaaactctcacaatacttatcgaactttttatcgaaagagcaactcaatggtctgaggtcattcacaccataagctgcctagatgtcctgagatcttttgcaatcgcagcaagtctctctgctggaagcatggccaggcctgttatttttcccgaatcagaagctacagatcagaatcagaaaacaaaagggccaatacttaaaatccaaggactatggcatccatttgcagttgcagccgatggtcaattgcctgttccgaatgatatactccttggcgaggctagaagaagcagtggcagcattcatcctcggtcattgttactgacgggaccaaacatgggcggaaaatcaactcttcttcgtgcaacatgtctggccgttatctttgcccaagtttgtatactcgttagataattactctattctttgcaatcagttcttcaacatgaataataaattctgttttctgtctgcagcttggctgctacgtgccgtgtgagtcttgcgaaatctccctcgtggatactatcttcacaaggcttggcgcatctgatagaatcatgacaggagagagtaagttttgttctcaaaataccaattcctcgaactatttactcagattttggctgattggacaaggtggttttgcttttttttaggtacctttttggtagaatgcactgagacagcgtcagttcttcagaatgcaactcaggattcactagtaatccttgacgaactgggcagaggaactagtactttcgatggatacgccattgcatactcggtaacctgctcttctccttcaacttatacttgttgatcaacaaaaacatgcaattcattttgctgaaacttattgatttatatcaggtttttcgtcacctggtagagaaagttcaatgtcggatgctctttgcaacacattaccaccctctcaccaaggaattcgcgtctcacccacgtgtcacctcgaaacacatggcttgcgcattcaaatcaagatctgattatcaaccacgtggttgtgatcaagacctagtgttcttgtaccgtttaaccgagggagcttgtcctgagagctacggacttcaagtggcactcatggctggaataccaaaccaagtggttgaaacagcatcaggtgctgctcaagccatgaagagatcaattggggaaaacttcaagtcaagtgagctaagatctgagttctcaagtctgcatgaagactggctcaagtcattggtgggtatttctcgagtcgcccacaacaatgcccccattggcgaagatgactacgacactttgttttgcttatggcatgagatcaaatcctcttactgtgttcccaaataa

SEQ ID NO: 166757 - DNA, 1029 bp, Arabidopsis thaliana landsberg; identical to SEQ ID NO: 43029

SEQ ID NO: 166758 - DNA, 1195 bp, Arabidopsis thaliana landsberg
atggagaggaaacagtcaaatgctcattccactttcgccgacatcaatgaagttgaagatgaagcagagcaagaactgcaacagcaagagaacaacaacaacaagagattctctggaaacagaggaccaaaccgagggaaacaaagaccattcagaggttttagcagacaggtttcgctagagacaggtttctcagtgctcaacagagaatctagagaaagagatgacaaaaagagtttaccgaggagtggtcgtagctttggcgggtttgaatcaggtggaatcatcaacggtggagatggtcggaaaacagatttcagtatgtttaggactaaatcaacgctcagcaaacaaaagtctttattgccttctataataagggagagagacattgagaattctttaagaactgaagatggtgagaccaaagatgattctataaatgaaaatgtttctgcaggaagatactttgctgctcttagaggacctgaattggatgaagtcaaggtaacaactcttcttctttctctttctctcttcaaaacttaattatcagttagttccaattgtactctcttgcaggacaatgaagatattctgcttccaaaagaggagcaatggccgtttctcctaaggttcccaattggatgcttcggtatctgtttgggacttagcagtcaagctgtcttgtggcttgccctagcgaaaagtcctgctacaaactttttacacatcacaccattgattaacttagttgtatggctattttcactggtagttttagtctctgtgtccttcacttacatactcaaatgcatcttctactttgaagctgtcaaaagagagtattttcatcctgttcgagtcaacttcttcttcgctccttgggtggtttgcatgttcctagccattagcgtacctcccatgttctcaccaaaccgaaaatacctccatcccgccatttggtgtgttttcatgggtccttatttcttcctcgagctaaagatctacgggcaatggctttcgggagggaagaggcgactatgcaaagtcgcaaacccatcttctcatctttctgttgtagggaatttcgtcggggccatcttagcttcaaaagttggatgggatgaagtagctaagtttctatgggcagtaggttttgcacattacttggttgtgtttgtacactttatca

SEQ ID NO: 166759 - DNA, 1445 bp, Arabidopsis thaliana landsberg
atgatgaatccgaataagcagcaaagaagaaacctttacttcttcttcgtcttcgtcttctatgtcttcatcctctgtgctcgctttcaaacctctgaagctactaaagactcgtcggctcaagtgaagttacagaatcgtcgacttagctccaccgtcgtgtttcctgtctccgggaatgtgtatcctcttgggtaagtgccaaatttcgcatctttttgtttcaatttctctgttttatgctacttttcagtgaccctttcgtgggtttgatcttgtttctttgattttccttatcgggattgtgttgtcttatgtctggattttgtcttggtgcggattctttgttggcttctcttgcatctgtgtggcttcttcccttgtttcctatttccttgcttgacacgatgtgaaatcttccttctcttgctctttgagatgatttcaaagcttgctactttcgggaattgaagattttgggcaatgttgattctgattttcaccttgtattgaaaacgcccaatttgattgttgaagtaattaacgaattcatctttccaggtactattatgtgttgcttaacattggcaacccacctaagctctttgacttggacattgacactggcagtgacctcacttgggttcagtgtgatgcaccttgcaacggttgcacaaaggtaagcgttgatatgctttttagtgtgtgacataataagcaaaggttctatcttagaatttctttctctttctttgcagcctcgtgctaagcagtacaagcccaatcacaacactttgccttgttcacacatcttgtgttctggtcttgaccttgcccaggacagaccttgtgctgaccctgaggatcaatgtgactatgaaatcggatactccgatcatgcatcatctattggtgcacttgtaactgatgaggttcctctaaaactcgcaaatggctccattatgaatcttcgtttgacatttgggttagttttattctaccttttttcacacattagaaaagaaaaacactaaatttgcggttgtacaagttcctaatttttgaatcaaattttcttttagatgtgggtatgatcagcagaatcctggtccacatcctcctcctccaacagcgggaatacttggccttggaagagggaaagtaggcctctcaactcagctaaagtccttggggataacgaagaatgtgattgtgcattgcttaagtcatactggtaaaggctttctctctattggagatgagcttgttccttcttctggagttacatggacttcattggctactaattcacctaggtgagcaatctttgagcattatcttctttataactgccacttgtttactcacacttttataattgacaagttgaaattatggtgtgaattttttctgtagtaaaaactacatggctggacgagcagagc

SEQ ID NO: 166760 - DNA, 1042 bp, Arabidopsis thaliana landsberg; identical to SEQ ID NO: 51989

SEQ ID NO: 166761 - DNA, 3757 bp, Arabidopsis thaliana landsberg
atgttttggaagctcacatctctctctgcatcatctcctgtgagttgaatttttagatgtcgtgttgtatgttagcgttcatcttgtctacacatactgatatgctttagaattagattattggagtttctatccgttgctttgctttttcatataatttatgtcgaatttttggatttgctagatttcaattttttgaattattgtctctgagtcgtgaattgttcatgtattgatgttctttccttttgttatgagcgcaggtggagataatattagacaaagaaaatttcacgttggaagagcttcttgatgaggaagagattattcaagaatgcaaggctttgaatagcaggctcattaacttgtaagctttttttaatcatttataattggcttatattcctcattatctgtttcatagaaccagataaaccctatggtgtatgttgaatcctatgtctcctctatctgcggagttttagttaaggagtcccatatttccttcgtattttcttggatgactttattgattgggtattaatgtctgcagtctaagggataaagctcaagtggagcaattattgcggtacattgttgaagaacctccacaggatgctgatagtaaacgtgctttcaaggtaatatgcttccttgattctaactggaaattaccttgtcttaccatcctctccttttgccttttatccacttttcttttgaatggttctggatttcttttctctctaactaataatagtttcttctcttttaggtttccattcatctcttgtgaaatatttacatgtgaaattgatgttattctaaaaactttggtcgaggatgaagaggtatttttcattcatcctactaccttttcctcaaatagcagttcatacttttcacttttctgtgcatctggattatgtttattgttatcctagattctcatttgttcgaataattttatcttgcagctgatgaacttgcttttttcctttctggaaccaaatcgtcctcatagtgcattgctggcaggctatttcagcaaggtattctctcttacgatacataagtttacgtattagccaagttcctgtaattttcttttgttttgtttgtaccgatacatatgacttcatttcaaggctccgagaagtgattcttacttctctctgtttggtgtaggttgtcatttgccttatgatcagaaaaactgcaacgcttatgaattatgtaaaagcaagtaataacacatagttaaacggatggtaaactatgtgagaaatatattatggaaactatttgaactgatttctaggattatccaggagtactgtagaatacgtcttattttctggtaactcttctattcagaatggatattaccttccattgtaatctcgcaagccagatgtccgtctatttactaaattgtttagtagatgagattgacatgactctattcttcaattgctggcaattatattgatgtgacagacaatttaggggaatttttttgttatttgtttagtattcagtactcaaagtaacttttgatgatcacaggggcatcaaaatgttttctgccagttagttgatttgattgggataacatccatcatggaggtaattggtttgacttagactcagtgcaacttggtgtggttcagaggtcttttttgctatgatatttacgcgactttttctaggttttggttcgcttggttggggctgatgaccaagtctatcccaactttctggatgtgatgcaatggttggctgatagcaatttacttgaaatgatcgtggacaaacttaaaccatctgtaagtggttaagcttttctataatcatcccagagacaagaggctcttggttttctctttgatacttgtaggtggtgtaaatctaggatatctgatgatattactaatttcttctatcatcttcattctgatatgtttcttgcattacaacttgaatcagagtcctccggaggttcaggcaaatgcagcagaaacattatgtgcaatttctcggaatgcaccgtcagctttagctacgcagctctctagccctgggtttgtaatctttcttccatgatgattcctaatgctttgatagatgatacaaaagtgtttcacatggcagcacaactttttccctgtttttgcagctacgttgcaaagatatttggtcatgctcttgaagactcgcattcaaaatccggtctagttcattcactttcagtatgcacctctcttctggatccgaggagatctgctgtttcatcttctatgttcaattcttacagaggtcaacatatgttcgagtctcctgtcccagtttccccagaaactattggtgccatgctgcccaaactcagtaagttggatcctatgatgcaccatcgtcacatgaccacaagattactaattttctggcttttttatttgttgcatgcacataatcttattgtgcacttggacaatagtcaatccttttcttatgtgatattactttccatttgcgaggatacctagagtatttagcatctatctggacgttctgtttgatcttccctgctctctatttggtctcttctattttggtttatattgataaatggaaactggttttacataattctggaatgcttacgtagcacatcttggatatgtatgatactgtctcatacaagtttttcaaatcaggttttatgcattcaatgaccttaagtaatatttttttttttttctgcagatgacttgcttatgcttctcactgtagcatctgatagcacagtattgcctacaacatatggtgaactgaggcctcctctcggaaagcatcgtctaaaggtcaggtccaaacatggagcattttatggaagacattgtcgtttttaggacaccaacagtgctcttaatatattgtatgtaaagtctctatacttaattagactcacttatcttattttctttgtttcagattgtggagttcattgcagttttgttgaaaactggaagtgaagctgcacaaaaggaattagtcagttcaggaacaatcaaaaggacccttgatctgtttttcgagtaggttttgctaaacttaaaattttgtgattaccgtgtgctatttctacgagatcttaaaaaatcaaatactctcgacatatgaaggtacccgtacaataatgctctgcatcatcaagtggagagtataatactttcttgtttggaaaacaagagcgatttgatggttaaccatattcttcgagactgcgatctgattggcaaattcctcttgtcggacagggactcaaacctcttaggtgatagccaggtattaccatttgctatgttcacaaaggtttaactgatcatcagcatatgaaagagtcatcttaatacagctccaagttagctccattgactcattgctccagcgttcattagctaaacaaatattctctggcattttctttttcttttgtgcgaggtagcccactgtagctgcctccgggaaaaaaaaacctcgtgtcgggtatgtcgggcatatcacaagaatatcaaataaaattggtcagttgagtaacagcaatggccagataaaggcataccttcaggttggtataaaaattatacgtgtcgtgttgtttttcttctgccgcttttttgtcacttcacacgcataaagaatgtaaaaacattagttgagtcttgtgatgaatggtcctagcactctgttggaa

SEQ ID NO: 166762 - DNA, 1415 bp, Arabidopsis thaliana landsberg
cctaagctgtaattccttgggatcttaccagccgccattttttttctaggtttgcacatcagcaaaaccaaggtcctactgctcatgtggttgatatgaaacaaatgctataacagccgcttcacaagcaagtctctggctccatggagatggcaaagaagatatctgagtcacataacaagctggactgtagctacaatgatctcaatgtcaagatggaaacactgaataccaaagtccgatacttagagagacattctgcatcctcttcagctccgaaacagctaagccaacttgcaggaaaagcaattcagaacccaaaagaatatgctcacgctatcaccctatgtagtggaaaagcacttccaactaggaggaaccaatgacagtcactgcggacagtgaagatcaagatggggaggatttaagtctcggaaaggatcaagctgacaaaccactcgacctgtcacttgaccagtcactcgagcaaccactcgacctgtcactcgagcaaccactcgatttgccattcgacaacgttactcgaccaacaactcgacctatcttcccagcagcattaccaactgctctaaaaccagttgctgtcaaaaacaaagaaaaggtctttgtccctcctccctacaaaccacagcttccatttcctggccgtcacaagaaagcgttggcagataaatatagagctatgtttgccaagaatattaaggaggttgagttgcggatacctcttgttgacgctctagcgctaatcccagactctcacaagtttctgaaagacttgatcgtggagagaattgaagaagtgcaagggatggtggtattgagtcatgaatgcagtgctatcatacagaagaagatcattcctaagaagcttagtgatcctggttcattcactctaccatgctctttaggtccattggctttcaacagatgcctatgtgatttaggagcattagtcaatctcatgccgctctctgttgccaacagatgccttgtctaccaacgaatctggggagccgatcatcccaacttcagatgattggtctgaactcaaggcgccgaaggtggatctcaaaccacttcctaaaggtctaaggtacgtatttcttggtccaaactctacttatcctgtgatcattaatgctgagataaatgatgatgaagtgaacctgctattatctgaacttagaaagtatagtagagcaattggttattcattatccgacattaagggaatttaacctagtttatgcaaccataggatccaccttgaaaacgaatcctactctagcgtttaaccacagaggaggttaaatcccaacttgaaagaagtagtgaaaaaagaaattttgaaactgcttgatgttggtgtcatctaccctatatctgatagtact

SEQ ID NO: 166763 - DNA, 1066 bp, Arabidopsis thaliana landsberg
ttggtattacttaaggctcctactttagtaagccttagacttagcgttggtccaaaatgtaccgctgatgatatcggattgtggattaaactcgcgctggaccgcaacatctgcgagctaataatcaaacattatcccgatcatggtcacatcaggttatctaggagactatgcgacagcaaaacccttgtttccttaaaactcaagaacgcaattcttggagctatttggctcccaacatgtttcagttcactcaaaacgcttcaccttcgatatgtgaagtattccggggatgaatgtgttcgtaatctcatatcaagctgtccttcacttcgaaatcttgttgtgaaacgacacaatgaagacaacgtcaagagatttgctattattgtgcgttacttacagagcttgacggtttatttatcacctttacatggtgtagcagattcagatgcatatgtgataaatacacctaatttgaagtacttaaacattaaggatcattacactgatctatgctcttttgaagatatgccttacctagacgaggctaatctcgacgttgccttcacccatactgagaatttttttgaatctcttacctctgtcaagaaactttccttatgcttgaagaaatcaaatgtgagtctagtaacttaaaccctatcattgtttttaaaaaaaattctcatgtacttagaaaagtttgtgtgtcatgtgcaggctcagtatcctgagggtattatcttctctcagcttgatcatttggagctatgtacatgtgatgattcaaagtggttgaatatactcgcaatgttgcttcgagattctcctaaacttcgagttctcaagcttaacgataaggtaattagttttccagttcatggctcatcacttgatctgtagttttttttacttgatgatctaactaccgaccatgttttatgatctttttttctcagaaccatgatttcgttgacaagtactgctcttgttcttggaaccagcaaccaagttatgttccggaatgtttgactaaaagtcttaaatttcgagtggcgaaact

SEQ ID NO: 166764 - DNA, 1314 bp, Arabidopsis thaliana landsberg
aaatcgacatttggagtgctggtgttattttatacatcctactgagcggcgtaccgccatttcaaactggtaaaaccttaagctaaatactttgagatgtgttcttcttgaggaattgaatctgtaattgtgtctactctttgtattgtagatgctgagattaaagaatgcaggcttgattttgagagccaaccatggcctttgatatcttttaaagcgaagcaccttatcgggaagatgctcaccaaaaacccgaaggaacgaatctctgctgcagatgttcttggtaagccctaactgatttttgaaacatttaaattgaaaacatgattgttagtgtttaccaaatgaagcttctagtgtattgtttaggccttagagtgacactatgtgaatcttgaagtcttaaatgttacagtctgaaatgttagtgcgagtttatggttgtgtctaactaaaaaatccttgtggtttgtagaacatccatggatgaaaagcgaagctccagataagcctattgataatgttgtcttatcacgtatgaagcaattccgagcaatgaacaagcttaagaagctagctcttaaggtaaaatagtagcttcaagattattatcctcaactttggattgtgatttgtgcgtttggtttgaaggttattgcggagggtctatcggaagaggagatcaaaggtcttaaaaccatgtttgagaatatggatatggacaaaagcgggtcaatcacttatgaagaactcaaaatggggctgaatagacatggctctaaactctctgagactgaagttaagcaactcatggaagccgtaagttatcttcagcatcttggcttcactttccacagttaaggttttgaaaaagacaaagcttgaaacacatgctgataacttttcaggctgacctggattgtaatggaacaatcgactactacgatttatctctgcgacaatgcatagatacaaattagatcgagaaagcattccaacactttgataaagacaacagcgggtaagtttcttccatttgcagtttacgaatcacgctccatcgatcatttcttgtgtcaagagaatcaagattcaaatgtgtgtaactattttgaggcaccaatgttaatatgttggttatacaacaggcacataactagagatgagttggaaagtgcaatgaaagaatatggaatgggagatgaagctagcatcaaagaagttatatccgaagttgataccgacaatgtaagttgcactctccaacatatagccaacatctcaaacattaaacaggttcttgaaaccttg

SEQ ID NO: 166765 - DNA, 1304 bp, Arabidopsis thaliana landsberg
atggattcagagtcggagctgaaatcactgttttttcaaattgtatcagtcccagatgatagggagaagaagtggacggtcagaccattggttattaaaataatctctctggtgagctcaatggatttgactacagaggagaagccagagtctgatgagctagtgttactcatccaagagatactctctctagtcaactctagggattcagattcccagccaaagcggctggtggagctaatatcattcatttctcaaaagatttctctcattgatgaaactttggaagtcaaaccggagccggaacttatctcactcactcatcaaatactctccctcgtcgtctctatgaactcaaactcgggggagtatatttccttgtgccctcaagcacaagtaaaactggaaaacggaagatttcgtgttcttgaagacgtctcgtggcgcaccaataacaagtggcattgcctttctgtaaactggcggacattcaagttatcaagagaagaagacactctccattttatctgcataggttgcaatggcgataaccataaagaatttaacaatgttcctgttgagatcaaccatcctcttcatccaaatcattctctccagcttgtcgtgttgcaggaagatagtaccagggaatgctattgttgtgatgaagctcttagccgtatactttattattgctcggcttgcgattttgctataagtatactttgtgcgaggaaaccaccagtctttttgataaaccatcaccgtccggagtggcatggtcatcctcttgctctgtttccaagacaagctttcttaacttgcaacctttgcgccttggccgatccaagctctcctatctatatgtgtccgccttgtgactttgtgactcatctaagatgtatcaacttaccacgtgtcataaagatctctcgccacagccatcgtatctattttactccttcgtttgaccaagaaggtttgtcttgtggtgtttgtcgcagaaagatcaacaaattatacggaggctattcttgtatcaaaaatggttgttggtatgcggcacattcaagatgtgcaacacaaaaaaatgtgtgggatggtgtagaacttgagggagtgccagaagaaaatgaggaagaagtagatccaccgtttgcaacgaaaggaagtggagtcagacgacatttcactcatcgtcatcttttgagacttgatgtggacacgggaagagattacgtcgaggataagctgtgtaacatatgcattacgccaatctattttggtaacttcaactcgtgtac

SEQ ID NO: 166766 - DNA, 1725 bp, Arabidopsis thaliana landsberg
actctgttaaggaaatcttatgggtttagatataaaaaatacaagctttgattgttcattcgacttatcaatgcacagattttccaagttctgatgaagttaagatttgtctggtttaattgcagatacgtgtatagttgagttatctcaagggttggatcaagatgtaagcaacttgggagaacatataaagctttcttgtgggtcttcatggagagagactctttgtgaaggagagtcacttgaaaggaaagttgaaccgggaaacccatctgttcttgttattagttcctctgctctgagatctttggaacttctaaggtacattgtaaatatgtgtacttgtatctttgttattgattgatataatgcttgattgaatagaaagttgcttagactgagtcctgtcttatgtatgtaggggtttgcattcattgactaagcaatgtccagcagtgaagttgttctcaaagcatttgaaggttgaggaacaggtagtgttttattcttataatgatttgtctatagagaactgaacttaattctaagcacatagaaaagagagaacaaattgaaactggcattttgagttatttcgttattgaatcttgttttggttctcttgtgtggaatgcattgttcttgcttctctggaacttgggatatgatgacaaaaatacgatatctctaaggctaattgctgtgcggatgaaatgtatttgcacgtcagtctgatcccattatgtatataacattaggagttggtgcatgctcatgtagttcgtttctttcatttttagttaatgttaaggatttgggaagtgatgataagatatatcaatatatcataggcacatgcaatgctgaacgatatatatttgcacgtcagtctgatccctttatatatatataacattaagagttggtgcatactcatgtagttcatttctttcttttttagttcatgttaaggatttgggaagtgatgataagatatatcaatatgtcataggcacttgcaatgctgaacaatatatatttgcacgtcagtctgatccctttatatatccatcattaagcatttatgcatatactcatgttattcttccctctctctgtctgtctttcatgttaagagtctgggaaatgatgataagtatatcgatatttcagaggcgtatgcaatgctgaacgaactatttgcacgtcagtctgattccagctcttgtttttgtttcttaatttgcatataagaagactatagaattagattcttctgctttggtctaaatatgaaactctcatttaaaaaagaaatggtttccgaaaatctttatataaatttctcaagctcattgttatatgactcgaattattaactctagttcattgtgttgcaggtatctctgttgaagaaacgggttaatattgggagtggcacaccaaacaggttagtaaatctcatcacatcctttcattgtttccctttacttgtatctccatatccttcttgctctagatcctgactgtcctcttgctcttctatgcaggatcaaaaagctagtcgacatagaagctttagggctttcgcgtttagatatgattgtgatcgacatgcacccagatgtcaagggattttccttattcacattgcctcaagtcaggtttggtttctcaactcttgacaagctgccccattatcatcaacgagtggaattttttctg

SEQ ID NO: 166767 - DNA, 4484 bp, Arabidopsis thaliana landsberg
atgcaacaaacaatggttgatatggcgcaaaagttttcaaacgtggaaaaaaccgttgaaacactgcaaacaacccaggtatcgctcagccaaaatgttagtaccattcagtctcgtgtccgttctttaaatgtagaaaatcctagagttcgaagaactatcttcggatccccaaattcccttccgcgaaatgcaacatgtgatcaaacgaccccggatggtacaaacgcggagaatcaaccagaagatggagaaaggcattccgaggacgataaccagttcagagaccagcacgagcaggaaaacttcgaccagctcgaaaccatgaaagaagtaagccgagagttgaaagaaattaggtcgaaattccccaagctacaagctcggagccggatatcaatcgggttatcgaggaggctaggcgaacaccgttcatcccgcgaattccgagtttgagaatcagagattctcgaaaactcaacttttctgatagccgctgggcgagttgatctaaatgaagccgatgaagacgcatggtattgcaaacttttctctgaaaatctgtgtgggcaagccctgatgtggttcacttaattggaaccaggatctatcagtaatttcaacgaactatcggcagtatttttaaaacaatactcaattctgatggataagagcatttcggataccgatctctggaatttgtctcaaaggccgaatgagacacttcgggctttcatcaccaaatttaaaacgtgctttcaaagctcccaaggatctcacaacagtcggctctgtcggctttgcgaaagggattattgcattatttgtggtttaaggaagatctaatacttcacaaacgtgatactattcaagacgcactatttcgagcgaataattggatggaagtcgaggatgaaaaagaaagctttgcaaaaagaaataagcaagcaaaaccagcggtcacttttccgcccaagaagtttgaaccccgggaaaatcagggaccaaggaagtttggttcacagccattcaataacaacgtcggaaagcagtttcaggggaaaggaaggtcaaacacctgggtctgagatgaaagctcgtattgtgatatacacagagtcaccggacatctgaccaaagattgtagtgtttttaaaaggcatctcgcagaattatgggcaagcggagatctttcaaaattaaatatggagaacttcgtcaagcaatatcatgagtcgagggataactcagaagctcaaaactctaagagaccaagaccggctggcgaagaagaaccaagaagttcaaaagataaaatcaacgtaattcttggaggatgtaaactttgccgtgattccatcagcgcaatcaaaaagcatagacggaatgttcttctaaagtcaagtttaagtgaagaagtagattttcaaggcgcttcaatatcattcgaggaaaaagagacgcagcacctagaaagcccccccgatgacgctctagtaattacgttggatgtggctaacttcgaggtttcaagaatcctcgtcgataccggcagctcggtagatctaatttttcttagcactttggaaaggatggggataagcagggccgatgtggtaggaccgccatctcccttagtagcttttacaagtgagtcagcaatgtcgctcggaacaatcaaactaccagttttggcgggaaagatgtcgaagattgtagattttgtcatttttgataaaccagcagcttataacatcatcctcggaacttcgtggatctacctaatgaaagctgtcccctctacggatcatcaatgcctcaaattcccaactccaaacggagtggaaacaattcggggagaccaagaagcctcgagaacttgttatttagctagccaccaattgaaaatccaatagcaattaacgaagcgcgcaaaagaaaggagtactcccgaggtttcctagtgggcggaaggtggacgatgtcgtggtcgaagtaattctagaagaagacaaaccggatcagaaagttcggattggagctactttatctggctaaacaaaggaagctttaatcgagctgttaagaaggaacaagaaatcatttgcttggtcagcaacagatatgcccggcatagaccgaaatataatttgtcacgagttgaatgtggatccaagcctcaagcctgtaaagcagaaaagaaggaaactcggagtggaacgagcgaaagcagtaaacgacgaagtggataaactcttaaaaataggatctataagagaagtgcagtacccggattgggtggcaaataccattgtggtcaaaaagaagaatggaaaggatagagtgtgcatcgattttacagatcttaacaaagcttggccaatggacagtttcccactttcacatatagatcgtcttgtggaatcaactgccggaaacgaattgctaactttcatggatgccttttcggggtacaaccagatcatgatgaatccagaagatcaagagaaaacgtcattcatcacagacagagggatctattgttataaggtattgcctttcgggttaaagaacgcgagagcgacttatcaacgtctacttaacaaaatgttcaacgagcacctcggaaagacaatggaagtctatattgatgatatgctagtcaaatcattgaaaaaggaagatcaaaacaaaaatttagaagaatgtttcgctatccttgaccaatatcaaatgaagttaaacctggggaagtgtacgttcggagtcccatctggtgaattcctcggttatattgttacaaagctaggaattgaggcaaatccaaaccaaattaacgcctttctcaatatgccatctccaagaaatttgaaggaagtacagcggttaagcggtcggattgcggtattgacctgtttcatttcaagattaaccgataaatcattgcctctctatcaaattttaaaagggaacaaagagtttctttgggatgagaaatgcgaagaagcattcggacagctcaaagcatatctgaccactccacctatattgtccaaaccagaagcggatgagaagctttatctatacgtctcggtctcaggccatgcagttagcggagtcttgatccgagtagaccgaggagagcaaaaaccaatttattacataagcaaatccatgacagatccggagaccaggtatacgatgatggaaaagcttgcacttgcagtagtaacctcagctcggaagcttcacccgtattttcaatctcacccaattgaagtgttatcaaatcaaccgcttcgaacaattcttcatagtccgaaccaatctgggaggttggcgaagtgggcggtggagttaagtgagtatgatttagagtacaagagccgagtcgccatgaaagctcaagttctggccaactttttaacagaattgccagtacttggcgggcaggagcaaccaaaatatcagacttggaagttacacgtcgatgggtcttcataaaaaaaatggatccggggtggggatcaaattggagtctcccacctcggaaatccttgagcaatcattccggttattattcactgcatctaacaatgaagtgtgaagaactaacttgtttcttattgattcataatgaggttacatcacatatatatacatacttgaggaggttacatgtctaatgggctaggttacaaaagcccataactacttaagtctatgaccgacctatgtctaattcccatgggccggacctacgggccggaccaactatggcttctcttcatggaccgggccgacaggccgacgggccgatggaccgatggactggtgggccgactggtcgatgggccgtcacaccaatgggctgacggacctatcctccaaggacatgggccacggttatggaggccatccaacaagtggtttacaacatgaagcagaatatgaagcattaattaccagactcaggttggcacagggagttggagctaatgaagtgatcccctactgtgattcacaactggtggttaaccagttcaatggagactatgaagccaaagattcaagaatggaggcatatcttgaggtggtcaaagatgtggttaaaaatttaagaagctcgaactcattcgtataccacgaggagaaaacacaactgcatatgcactcgcagctctggcctcaacaccagaccgcaaagtcaaaagaatcattccggtagaatgcatttcggagagaagcattaggaggaaaaagagacactcgtcattacaagatcttgagctgcagcccgagatcgcggcgaacctgggattgaactaccacctgtcaagagacgaaaatcaaaaggggcagccgtacctaagctagccgtgcaaaaagataatagggtcgaagaaattgtagagcccatagaagatataggtccagaaaacactgttaaagctgaggccgaaccatagattgacgaagacttc

SEQ ID NO: 166768 - DNA, 557 bp, Arabidopsis thaliana landsberg; identical to SEQ ID NO: 67888

SEQ ID NO: 166769 - DNA, 2503 bp, Arabidopsis thaliana landsberg
aatccaacaacaatctctacaccctagtagctgtggattatgtctccaaatgggtagaagctatagctagtccaaagaacgatttagcgattgtcatgaaactcttcaaggcaatcatcttccctcgttttggagtgccacgcatagtcattagtgacaaaggtaagcatttcattaacaagattctagcgaaattgcttttacagtatggagttcagcatcgggttgctactccctaccatccacaaacgagcggccaagttgaagtttgcaacaggcaaatcaaagagattcttgagaaaacagtgggtaaagcgaaaaaggagtggtcctacaagttagatgatgcactgtgggcctacaagatagctttcaaaactccgcttgggaccacacattttcatcttctatatggtaaagcttgtcatcttttagtgaaattagagcacaaagtagcttgggcagtcaagatgatgaattttgacatcaaatcaactggagaaaggagtcttattcagttgaatgagcttgatgaattatgaattcacgccttagacaactcgaagctctacaaggaacacacaaaagcttaccacaacaagaagatcctcactcggacctttgagcctaatgaccaggtacttctttatgattctagattgacaatatttcctggaaaattgtgttctcgttgcacagatcccttcatagtccactcggttaggccatatggaacagtcattctcaaaaacaacaatgaaaaaccatttgctatgaatggacagatagtcaaacactactgggctgaagccgagattctagtagaaaagcctttggatcttcaggacccacctgttgattaagcaactgcagagtcaagctatagactataaacaagcgcttagtgggaggcaacccactggtaagtacttctccgttttattcatttcattcatttgattcttaacattaagattttttattttataggactattcagaaagaaaaaaaaacgtgtgttgaccaaaaacgcgatagtgtcgatcgacatcctcattttccaggtaagtcgatttaacctaaaacttcatcttctttatttcagttttttccaaaccggcaaaatcactcttttctttctatatccttcgatttttcaccgtttcttgtgatttcaggctctaatctcattagaatttcatcctctatcttccccaagtatcaattccaccaatctgcaagatggctgggcagaaaaagaaggcaaggaagagcgttcctccaccttcctcctgcgccggtgctcaacaccgcaggagcttctccaccgccgccggcctccgcccttcccaacctcaaccaccagctgcagtgcctgaacctcccatctatcgatttccatggccaaagcttccaacagaaaaaattccttctcaaagagtttgggagaaggatgtcaacaaagaattcactaaaggtgactatatcaatcgccctttttctccagattgggattattatgatacttttttctataatgcctagatgagtgtagaaattttgcctactcggtttgcggattttggtttaatgcagcgtttgcagatagagaaatctgttttaggactgctagatgatataggtttgggaaccatctgttgtaggcagtacgatttgtatcctgagctagttagacaattcatggtttttgttagggtctactatgtgaatgacaggaaacgcaatgctcaggaaggagctcttatctacttcattcgcggtgtcagatagagtctaccaccgagagatttgtgtgacatctatggttttgattttgatctcactagagtttccctgcctggacagtttaaggatgctcaggttatctggtgcaggtttggtaatggaatttttgattccaggacgcagttcactcagagatccgccaccctgttctacggtattaggttaggctgattagtagcacaatgttgtgcaagatggagtctggcaagatgagactctctgagttgttactgctctatcacgctcttcatgacttctttcctgacagccttggatttgagcaggttgaccgtaatgtcaactttggtgttgtgttcgctcattacttggtttctctcaagaccaagccttttacagatagaggacacaaatctgagagagttggcagtcttctcactcccatattcgagcatttccgcatcagctttgagggcaaagaagtcaacaccacgcgtttcactatggatgagacttacctgaagaactctcattggcttaaaggcaacctactgtggtgcttcagagatgatacaagtcagcacatgattcaattaccacaccctgcacttacatagattataggagagcatgaggagataggctttcatcccgatccctcccttctgcatgtcgcaccacgcagcaggcgatagagaggttctgctgcaggatctgcgcctacacagaccgaggacga

SEQ ID NO: 166770 - DNA, 1905 bp, Arabidopsis thaliana landsberg
tggtcagtttcttcacaagcagagagcttcaggagatgagatctctttagatgttgagcttaacatggcagagcgacagagcaacacgccgccacgtcctgcaactgctagcaacacgccgcgacgtggcttaacgacgatttctgaatcttcgtctccggttaagactaaagttaaagcagacgcagtaagacggaggcagaacagaacatcgctaggtggaagtagcgacgaggaaggtcgaaacagagacgaagcagaggttttgaagtgtggttcgaagaaaccgatgttgagtaggaacaagaccaaatcaagattgcaggatcctccaacacctacacatccagcgattgacaagacagagatgaagtctggtcggagatccgggatttttaaatctgggtttcttgggaaaagccctaaagcgggtactccgggtcggaatgggtttgaggaagaagaagaggaggatccgtttctagacgaggatttaccggaggaattcaaaagggacaaacttagcttctgggttttccttgaatggataagtctagttctgatagtcacaagtttggtctgtagcttaaccatacataacttgcaacgcaagacatggtggaagctggatttgtggaaatgggaagtgactgttttggtgttgatatgtgggagattagtctcgagttggatagtgagaatcattgtcttcttggtcgagaaaaacttcacttggaggaaaagggttttgtatttcgtctacggagtgagaaaatctgttcaaaactgcttgtggttagggctagtgttgctcgcgtggcatttcttgttcgataagaaagtcgaaagagagactcggagcactgctcttcggtatgtgacgagagtgttggtatgtttgcttgtggctcttatcatttggttggttaaaacaattctggttaaagttttggcttcatcgttccacatgagcacttactttgatcggattcaggagtcgttgttcactcaatacgtgattgaaactctctccggtcctcctttgatggagattcagagaatggaggaagaagagcaacaagtagcagaagatgttaagagcttagagaaattagccggagctaagctgcctccagctctaaaagcgaccgtcaagagttttatgaaagtcgggaaaagtccgggactgaatcggattggttctaagagaggagaagatggcgaagggattaggattgatcagttgaagagaatgaacacaaagaatgtgtctgcttggaacatgaagagattgatgaatataatactaaaaggcgctatttctactttggatcaaaatatgcaggacactactcaggaggatgaggacgctacgcatataagaagcgagtacgaagctaaatgcgcagctaggaagatttttcacaacgtcaccgagccaggttctaggtatataccttgaatttgatcatatttctcaaagttcttgatttgtttggtttcagctcaaaatcttgataggatttttctggtttaatttaggtacatatatttggaagacttcttgcgttttctatgtgaagaggaggctgaaagagccatggctctctttgaaggagcttcagagagcgataagatcagcaagtcttgcctcaagaattgggtggtaagtctcaaattcaatatatcaattaagaatctttacatggaaacagagttatctaatctcgcgagttctttcacaggttaaggcgtttagagaaaggagagctctggctttgaccttaaacgatacaaaaacagcagtggacagacttcaccgtataatcaccgtggtaactggcattataatcataatcatcaggcttctatatactaggaatcgccacaaccagattcttgcta

SEQ ID NO: 166771 - DNA, 2181 bp, Arabidopsis thaliana landsberg
aagaaattcgcataggttagtttgctggtcacagaattcgaactattttcctttctaagattgaaaatgctttagtgtactaataaaacatttttctccattttgttttttgtagtttcgggttcagtagcaggagttgttttgttcctggtcttattaaccttgtttctccgttttctccggaagagaaaaatacggctgagacaacagaagctgaaggctcttattccactagaacactatacttatgcacaagtgaagagaattacaaagtcatttgcggaagttgttgggagaggaggatttggaattgtttataaaggaacacttagtgatggccgggtggttgcggtgaaggtcttgaaagacacaaaaggtaatggtgaagacttcatcaatgaagttgcgaccatgagcagaacttctcatctcaacattgtttccttgcttggtttctgctctgagggctctaaaagggcaattatatatgagtttttgggaaatggttcacttgataagttcatttcaggcaagagctcggtgaatatggattggacggctctatataaaattgcgctaggagttgctcgtggtctagagtacttgcaccatggatgcaaaacaaggattgtacattttgacattaaaccacaaaatgtactcttggatgacaattttttccccaaagtttcggactttggtcttgctaagctctgtgagaagaaagagagcgtcttgtcgttgctcgacacaagaggtacagtagggtacattgcaccagagatgatctccagagtttacgggaatgtgtctcataagtcagatgtatatagctatggcatgttggttcttgatatgattggtgcaaggaacaaagaaaacgctaatctagcctcttcttctaacacaagttcgatgtactttccggaatgggtgtatagggatcttgaactagccaattccggaaggcatattgaaaatagaatcaacagtgaagatgatgatctagcaaagaaaatgacattggtgggtttgtggtgtattcagccttctccggtagatcgcccagcgatgaatagagttgtagagatgatggaaggaagcttggaagctcttgaagtccctcctaggcctgttttgcagcaaattcccacatcaaatcttcaagaatcttctattctttcagaggatgtctctgtctacacagaaggatgatctaagaagctaccattgaacatatatatttttaatgactgtaaaaaattgtattcatccaaaatcatttttacaataaatgcatacttgtttgaagttcttaatagaaaacagagcaagaaaatcaaatctattaagaatgtggcctaatttctcccaaaaggtagctcaaaagttaaggatggccatattctttatataatgtccaaagatcttaatcaaaatcgatgtgagacattctaataaaatcatgttgtgccaaaccagatccttagaccgttgcttgagtgtgttgaatctagcgatgataagcggtgatgatcaatatgcttggtcaacgaagttggctgtgtcatgatttctccatgtcgttgacggtttctttctctccaaattgtgtgaagagtgaattgtctacattccgaattaaccagaagacttttctcttgaactagtttattttactatgttaaactttttaataaagatttccatcgcgataaaacatttgaggcgtttcatccaaagatgagatcatgactttaagttttatctacaaataactcccagactagactttttttgttttttttaaaaccataagagaaattacttcatcatctgtgcaagtctcttaaacgctctttggtcagctttaaaggatgaagataaaatgatttaggagataagagatagtatggtattggttgaccgtttaatttagttggagagaaactggaccgttagatatataagtgaatgactgtagcggtaaagagctgataaaattattgacttttcaagtttcctaaagcctcttcggtcagctataaaggatgaagataaaaagatgtaggagatagtatggtgttggtttaccggcaagtcacctatctcagtcccacaaatgcccaaggcccactaaagattcttttccatgttttaactcattttcggagaatagac

SEQ ID NO: 166772 - DNA, 1435 bp, Arabidopsis thaliana landsberg
ggattaatcacgatcaaccacaattctacttatgtaaactatatattctgtaattagaagtctctagaatatctagtctgtatataaacaatgtaaatcatctcaatacaaaacatccaattctatattctctatacttaaaacctaacgtgaaaaagataactctcaaaaccagtccttttgggaaaagaccaaaacaccgctaatagaacaccacttctcgcgattatacaaaatcgtatatcatatgtgtaaaatatatatcttgtgcaaacataacatggagatctctgaccaatgttttattactttcccatagctattccacaattgcttgggtagcttcactgacaaagggtgtcgcggacaatgttgaatacggctataaaagaagaaacaacacctcagtgccattagccttcttaggcgcattgggggagatggcttttgcgtatgcaggtcacaatgttgttttagaaattcaagcaacgattccatcaacaccagaaaatccatcaaaacgacccatgtggaagggagccattgtagcctatattattgtagctttctgttacttccctgtggctcttgtagggttttggacattcggaaacaacgttgaagaaaacattctcaaaacactccggggcccgaagggacttataattgtggccaacatgtttgtggttatacatctcatgggaagctaccaggtatatataccaagaaacaccttatctattagaaaacttctaactactaaaaaaacgccttcatatttcttttcctaggtgtacgcaatgcccgtatttgacatgatcgaatctgtaatgataaagaaatggcacttcagtccaacaagagttctacggtttaccatccgctggacttttgtgggtatgtctctgtgattttcataccaagattacatattttgtaaagaaagactatctaacttgtatatatatatatatcacagccgccacgatggggatagcagtcgctctaccgcatttcagtgctttgctgtcattttttggaggattcatatttgccccgaccacatactttgtaagctcttaaactctatcaacatatctttctttctttttttgaataaaatgtaaaatttatttctaaaaaaaatttgttacaacaagtgcatcgtccaattaaaagattttaaacaaattttctaggcaaagctagtcttcttggtgactatcttgaagcaaaccacattctcctacaatcttcatatcgtctatctctatcaacatatcgtgatatcttcaacaaaaatatatataattaatgatgttctctttcagatcccttgcatcatatggctgatcctgaagaaaccaaagagatttagtctatcatggtgtatcaattgggcaagtggaactcctcctttggtctttttgtcaat

SEQ ID NO: 166773 - DNA, 4003 bp, Arabidopsis thaliana landsberg
aattcactcagtacaggccttgcgacctgactttgatccttgctgataggtcttcaagaaaaccctttggcctgctacaagatctgccagtaatgattaatggagtggaagtacctacagatttcgttgtgcttgagatggaagcagaacctaagaatcctctgatcctaggaagacctttcttagctccgtgggagcgatgatagatgtcaaagacgggagaataagtctcaaccttgggaagcacatcaagctgcagtttgacatcaacgaaacttcgcaaaggacagctctagaagaaaagatcagggctcagcctcaaccttcagattcaatcaccagaccaagcacaacctctacacctgacttgcgagatctcaaaaagaaatctgatgagcaagaagaaaccatagagaagctagctcagacagttgaggaacttaagagtaaattggatcagatgcaagagaaagctcaatcaaaatgcgggactgatactatcccgagataaaagtttacttcaagatggtctgaggagatagattatccaccagaagagaaagaggcctatttggaggaaagaagaatagagtattcttctacgcatctctcaagagaggatgctgaatatgatgatgagatcagagaggactatgcagatcctctctatcacccattttcttcttaatgagtgtgaggagtcaagctagagactttaaacaagctcacttgagaggaattcccaagactgtttctgtaattaaaacttttattttcttgttatttttaatttgtttttggctatgtttgtgattctcaggaacagagaaatagtgtggaggtagagtaaaaatttaaaaattttactctacagagcaacacgggatcgagtatgtcaaaaattcaagaatttgaaaaacttctgttgcactcagaagccatgaggtcgagtaagttggtcgagtattagtcaccatctcaaaaaacaaaattttgaaattataaattatactcgaccaacagaagctacagagacttgtagggagtttaacaagtttacagaggattacagaaggttctagtcaacagagaacagtgcttcaggacaaacagacagaccgtggcccaccacctctcacctttgttcccccacgcgtttttagagataacaaaatctcttccctccttccccaccactcgatctcaccctatccttccccaccactcgatccaacctcatctcttcctactgacgccatctctccctcacaacactcactcgaccaaacctcaccatctctctccctctccaaacactcgaccacacaaaaacactcgatctcacccctccggcttcgtctcccttctcactcgaccacgacacagccgccgccgctcgcgccaccgccttcattctctctttcactcgacgacggtaccagttttgccatatctcccttttcactcttgaccccgccgctcctctctattcaccgcctactcgaccgacggaccttcaccgtctcaccgtcgcctccttttcactcgatctcgccattcatacttcaacattcttcacttgatctcgcctcccattcactcgaccgcaagagcacctcagcctctacttcgatttctttctctcaactctctattctcaccgttcactcgaccaccggaccggcttcaccatctctcaactatccaccgttcactcgacctcggcattaattttgcctccgttcatctcttcactcgaccgctcctaaaaccgccaccgtctcctctccgttcgctgtatactcgaccacgctgttaccgtctctcattcgtgttcactcgactgctatactcgaagccacaatctcactttactcgaccattttactcgaccgcgtacttgaccggtttagtgtgtgtgttttattcggactaacatattgatatttggttttgagttacattctttttcagggaatcaatatgagtaactacagtggcgaatcctccatggatgcgggttacaacgtcgatgaagctgaaccttggtcaactagaccagagagagagcaacaggcttatgagagcttcagagccgagacccaacgctcagtagctggacgcaatgaaaggagagctgagattgctagaggaaagagagcgatgacctgtagatatgagttgatcgacgaagatattgacgtcgagtatgagcctgagtcatggcacagagaaacgaagctgttgaacaagcctgatgaagttacaatggaggagtacatcagacttttcgaggtgaacgacttctggggaacgaggtacccttgttatgagactctagcccagctggggatactggaggacgtacagcacttatttgagaagtgtcatctggagacactgatgtcttacccgtacgtcacctacaagaaggaaacaatagagtttctctccactctgcaagtggagaggtatcagggacttacagcaaatgagctggagagtgaagggttggggttcttgactttttcagtgagcgagcagcgttaccagctatctatcaggagcttggaaggattgtttggtttccccagtggaaagggaactaaacccaagttcgagagggaagagttgaagaatttgtggttaactattgagaacgatatggcgctcaactctgcgaggtccaagagcaaccagatttgaagccctgtgatccgctactatcaacgctctgtagcgaatgttctgtactctagggaatctacatgcaccgtgtctaacacatacatggagatgattgattctgcactcaagggcattctccctagaacaaaggggaagaaggtcctgaagggcgacctcaatgatgcaccagcggttatgcttatgttgatccacctgtgtggatacaggaagtgggcgcacaccaacgggaagaagagggtgcgaggagccctttgtgtaggtggtgttgtgacaccgattctgattgcatgtggtgtacctctcacgtctccagggtttgatccgaagatgatggatttagatcatttgcgtcgttgtgagtttctggagcacgacatggttggcgatttctatcgctacaaatccgagcactccttgacccgaacagccaacattctgcttccctgcaccgaggccacaaccatacttcaggtcaaaaacattgacttcaagcctgcgcgtgattacctctactttgagagcgctccaccgactgatgacaatgtccctacaacagaagctacagaggatgagattgcttacacagatgaggatagggaggcggagtttgacacgagcatgtatcatttcagtgagcatatacctccagcgaggaaaagcaagagtttgagcgaagctcacaggaacaacagcaagctgcagaagtggtgcaagaaacaggataagttactcgccaagtgcctcagggctatcaagtttctgaaggacaagatcagctgctcctcttccactacaactattccgcaatgacagctccctcaggacatgccttcgaggagatatgacgcgcccgagccaagtcaccactggcctgagccaagtcaccacaggcctaagcctagtgacctagtagtctcacaagtccctgcgaggcattcatcattcgagcctcgggagctcgggagaaagaagaaggctgcagtggctcgatctagcagcaggattacacgacttctccagtcccgaagcttacgcgaccgtagtgctggccgcagtagaagaagagaggtcgagtaccatcagagcggtgctggctgcgacaaaggagcagaggtcgagtacccccagggcgaagctgagacacaacagggagattcttcaatggccttggagcaatcacatgcaactattgacgaccaactccgctccttcttcaactgagctaagcatctcacttcaccattgtattataccatctcttgtttttattttgtttctgtgatgatttttgtcc

SEQ ID NO: 166774 - DNA, 275 bp, Arabidopsis thaliana landsberg
ctggccttaacatgtcaagaccatgtcttagtcggcggcaccaccacgagagacattatagtcccgaagatttctgagtggcaagtcacggttgttaacggtttgacaactggtgaaactcttttcatccattgtaaatctaaagaagatgatctaggtgaaattaatctgaagtttagagatagattttcttggaacttcggagaaaatatgcttcactcaacttttttttggtgctatatgaacaaagataatggtcatatgaatgtaaacgt

SEQ ID NO: 166775 - DNA, 1717 bp, Arabidopsis thaliana landsberg
ccgtttgtggccttacaaccaaaaccaagggttcattccaaagcagcagtttcaaggaggatatcaacaacagcagccacagcctggtttcacaccacaacaacaacatgcacctacgcctcagaattcagacataatgattatgctccagcagctcattcaaggacaagccacatgagcaatggatatcgctaagaagctgtctgaagtaaactacaaagtcgaccgacaaggcgtcgaacttaacaacaagttcgaatccatgagcactaggatgagatatgtggaatgcatccttgcatcaccatctgttaacaaaaacccatgccagcttccagggaacgcaatccaaaatccataggagtatgccactgcccatgccatcactatcacacatgatcgagagctgctaactcgatatatccctacatcaaacactgagggcactgtaattctagagggggaggatttctatcaagatgatgttttggctaacaacacaatcgaagagcccatactcaccagtaatccactcgaccacaagcttccccagctactctctttgttgaaaaaccggaagctgcaaagaccaaagacatagtcttcgtgccacccccttacaaacctccgctttcattccctagtcgtttcaagaaagttctggttacaaaatatcgagccctccttgaaaaacagataaaggatatgcctttagtggactatcttgcgctaatacctgacgagcacaagtacgtgaaagacctgattacagaaaggatcaaagaagtccaaggaatggtggtattaagtcatgagtgcagtgctatcactcagaagaaaattgttccagaaaagttagaagatccaagatcttttactctaccatgctccattaggcaattgactttcagcaattgtctatgtgatctaggagcctcagtcagcataatgccactctctgtggcaaggaagctgggattcgttcagtgcaagccttgtgacctaaccttgattcttgctgataggacttcaaggagaccttttggcctgttagaggatgtgcaagtaatgatgaatggagtagaggtccctactgattttgttgtgcttaagatggatgaagaatctaaggatcctctaatcttaggaagacctttctatgcttcagctggagcagtcatagatgttattgagctatgagatgtcaatagactcacacaacaaagtaccaggatcagagatctttaaaggtgtcattgcgttagaaagagaggatgttgcattgaacgaggaaggctcaattgatactcgactagagtgctcaaccaaacagctaaagtcaagcatgagggcatcaaatgattggttagaattcaaggagaggtctaaatggcacgacagagctataagagagctaacacacactatgaaagagctgaaggatcaagtcaaagagctccatgggaaagccaaccaagcaccactcgacatcaaggacgtcccaaatgatgaagttattcctatggttagaaaagaaggatgtgaattcacattagaatagtatagaaaagatgattatccagatgatgaataaggagcttaccaagaaagggccattgagtactcaattacatacttgtcacgagagcatgctgaatttaatgttgtatctactaaggaaggagaggagacgtcaattctactctatcaccctcct

SEQ ID NO: 166776 - DNA, 3228 bp, Arabidopsis thaliana landsberg
aggccatcaaaagcttcatacaacattaccctcttactttcgagaaacataattgtccttttttacgtaccaaatttttgtggaatacacagagtcttggtattctgaagcagaaatttcccaacattcccgtgttagctttaacagctacagcaacagccagtgtgaaagaagatgtggtacaagcccttggccttgttaactgtgtcgtgttccggcaaagttttaatcgtccaaatctatggtaatctacaactacctaaacccatatatgtattccagaatgctgcttaccaagaagtttgcaggtattctgttgttcccaagacaaaaaagtgtctggaagacatcgacaaatttattaaggaaaaccattttgatgagtgtggaattatatattgtctttcaagaatggactgcgaaaaagtctctgaacggttgcaggttggtcatttgtatattgaaccgttatcaagttctgtgcataccacaaatattatgttgaaccatagaattggatactattttcaggagtttggtcataaagcagcattctaccatggcagtatggagcctgagcaacgtgcctttatacagacacaatggagcaaggacgaaatcaatataatatgtgctactgtggcatttggaatgggtactggtttttgctaatgttgttctaattcattgaaaatgttgctgcccattaacattgcacatttcaggaatcaacaagcctgatgtccgctttgttattcatcactcgctcccaaagtctatagaaggctatcatcaggtatttttaattatacaatcaatcatgtaaatcttattaaactgattccacataaggctagatactgttatctcgtctagaaactcacataagctatattatttgtaatcaaggaatgcggtcgtgctggcagggatggccagcggtcatcttgtgttttatattacggttatggcgactatgtaagtgcatataaaccaacatattgtatttttcttatccgctttggtagcctggaacgatgaagttctttcatctttccgctcttgatcatgtttatgcatataaaatataatttcagatacgagttaagcatatgattagccaaggaggagttgaccaaagccccatggcaactgggtataatcgtgtagcaagttcagggaggttacttgaaacaaataccgaaaaccttctccgcatggtacttaatgtgaagaatcctacttttttgctttcaatggtatacttgctgagatatttctcctattttattgctgcaggttagatactgcgaaaatgaggtggaatgccgacgtttcctacaactagtgcatttgggggaaaaattcgattccacaaactgcaaaaaaacgtgtgataattgttgcagtagtcagagtttgattgacaaagatgtcaccttgatcacaaggcaactggtacagaaatcattagaatgctcactatgtatgtgttatttttggtcacatctcactatcttctgtgcgttgcacaggttgaactggtgaagcaaacaggagaaaggttttcttcagctcatattcttgaagtctacaaaggttccttaaaccacatggtatgcacaaataataattatccatacttccttcaagctttatgagatatttctacacatatattttgtttttcttccagattatgctaattattaaaacctgtttggcctcataaaccatagtctcttttctatacttggtaaagactaattaataatgaaagcgtaatccaaccagtgtgggtcgatctcttgaaaaaataactgttttctttgcatttaggtcaaaaaacacagacatgagactatgcagttccatggagctggaatacatttatcgaaaattgaagtctctcgtatcttgcattatctcgtaacagaggatattcttgtggaagatgttaggaaaagtgatatgtatggatctgtgtcatcgttgctcaaggtacttaattgtgaattatttccatttcgcttctccctctcattaatgattgaggatgatagtaagctaactggaaccctaattgtctctatttacctatttgtatctaggtgaataacgcaaaggctaccatactattttctggaagccagactatagtgatgaagtatgactttgcgcttatatctttctttatggtttataggaactaggtttaagcaaatcattgcaattacctgtattttatgtgttaacggcttgttaaaattactttagttaagacttccataatctgttgcaggttcccttcttctgtaaaagtattaaagccaagtaaacagggggcaaccgcagcaaaaggtccgctaacatcagagaagcaaagtactcttccacttacaacagaagatgctcctccaaaagatgtggtatagttctgtttagttcagtctctttttttcttgtcgacatgaatctaccactctgaattgctgaggttggttccttgatctttttctctagaatctctctgccaacatgtacacagccttgaggaagcttcgtacagctcttgtcaaagaagcccctgatggtgtcatggcatatcatatattcatgtatgtctgaaaaaccattccgcttttcattttccaagctttgtacttgatcatggtcaattcgattctttcctcacagtctctgtgtttgtggtggcagcaattcaacgcttcagcagataagcagacggatacccagaaccaaagaggaactccttgaaatcaatggccttgggaagtaagtagttctttatcttaaaacctctactcaaaatgaagaaaagtccaaaagtgtatgatgatggtgtgtatctttaaactctctttcagggccaaagtaagcaagtacggtgatcagttgttggaaacaaaagaaacaacggtgaacgagtactatggaaccaataagaaagactccatcatcagcaacgatagtcccgattcagggaagagaagaagagacgagaacattagtccaaatgtagccgaggatgatgatttcgaagtaagcccaagccagtcctgcaaaaaaacagtgagaaacaaaagcaatgaggttcttcatggtgaatgtatagatggagatagaagaggcatggagcttgattttgatttcaaagacgaagatgggtcagagatacgaccggagggaagagtattaccgtggtga

SEQ ID NO: 166777 - DNA, 2137 bp, Arabidopsis thaliana landsberg
aaaaatgaaaaagaaattcaaaagctaaataaagaaaatcgagattctccgttctctcttcttcgtcgtcgtgttcttcttcttgcgtcgacgttcatcttcttcgtcggccaccatcgattccggccgccgccgacttgaaatccgtcgtaaaaggcaacgaattaggtcagtttcttctcatatttcctttgacattggtgcattgtgattttagattgggattttgaattatatataattcccagattcaatttgatagtttgatgattggtttgcaaagtaaagagtaatcgattagaggttgccgaaacgttatttgaggtgatgagcaaaggaatgtaggttgaatgtgagttgaatttgaattccgagatttcatattaaagatttggggggtttgtgtgtgcaaagtttagattaaccaattagtttaacgaataggtatgtattaacattggaaatcaattgaaaggtaacgaattaggttcagtagaatcgagtgcgacgagtgattgatttcaacgtatgataagagtacatgtggtataactattaaaatgtttgattggagttgaactggttgtattttcaggagcgatgaagaagaagatccacactaaggtacattttgactttggaggatactattctgaagtgaatgagtggattggtaaaaattcactatatgctatatcgtttaagacgaatagtttggagaagataacatattcgatgttagttgacaagatcatgaagaaggttgcgattgatgaaacttctgtgaagttgaaactgagttacaatctgtctaaagttaggagagagacatatattgtagatgatgaggatgtcttcatatttttaacagaatctgatggagagagtcggattcctgttttgcatgtggaggaattaaatggtataggagttgagaggagagagaaaatttctgtaccggagcgtcgaagttcagttggtgtaaatgtaagagaggatgatgttttaaatgaagtatgtgagatggtgcatgatggatatgataatgatgtgaatgattgtgagaatgtagtaggtacggagatcgtggctgtcgaaaggccgatgaattctgttgaggaagaagatgaggatgataggattgattatgatgatattcacgatattccacgaagtgtagaagttactccgcaggttatagaatgggatgatggtatgggtattgaaattggtcaagaactttgttcaagggaggctgtgtgggaattggttaacagagctgcaaagaaagaagtttttggagtctatactattaagtcagacccgttgagacttatgctacgatgccgccaagcttctaaagggtgtacttggtatctaagagttgcgagaactaagaaatctcatttttggagtgttagagtgcatagaaagatgcatacatgctctcggagtgttgagactacaagcaacagtatacagcgaggcacaccaagattaatagcatcggttttgcattgtgactatcccggaaatttagagaccccaactccaaaaaacattatgtcgattgtaagaggaagacttggggtgcattgttcatactccactgccttaagaggcaaaatgctacatgttagtgatgtgcgagggactccggaaagaagctacacgatgttattttcttatctttacatgttagagaaggtaaatccagggacagtaacttatgtggagttggaaggagagaaaaagttcaagtacctcttcattgcattaggcgcttgcattgaaggttttaggggaatgcggtaagtgatagttgtggatgcaactcatcttaaaactgtgtatggtgggatgttggttattgcaacagcacaagatcctaatcattatcattatccacttgcgtttggaatcattgatagcgagaatgatgtaagttggatttggttcttagaaaagctgaaaactgtatattcggatgttcccggattggtctttattagtgataggcatcaaagcataaagaaggttgtcaagacggtgtacccgaatgcgcttcatgcagcttgtatatggcatttgtgtcaaaacatgagagatcgtgtgaaaattgacaaggatgaagctg

SEQ ID NO: 166778 - DNA, 1896 bp, Arabidopsis thaliana landsberg
ccaaaaaaaaaaatgtcatgtggaatgttgttaatttagttaaactgatcttatcatatttaatgtatggtttttaaacggttgtatttctagtcatcatggacctaattatttaggtatgtctgggcatttggatattcgggtcgggttcgtgttttccgggtttgggcattttcaatttagaaatctaagacctgaacccaaaattttgtatcaaaacatatttaaattacttaaaaatacacaaaaaaattctaaaaacacttgagtattttactatctcatctatcaaaaagtagataaagtacccaacaatatacaaaatatcttaaaataaaaatattttaggcacttaaatttttgtaaatatgattattactaataaattatttctatgaatatatattttggatatgttggggtacttgatcgggaccgggttcgggttttgaagtgtaggatccgttcggatattttaaaattttgggttcagatcgaatcgggtatttcaggtcgaattcggttcggttatttggattcggatattttacctaaacctaattttagtaatagatcctagcctttgtctcaagacagacctcttgtttaaaggatcggaagaaaacttgaagtagctccttctatttcgttggagacaatctcattattatcattttaaatgtgaactatgattgagttgtactatatagccatgaaaaatgttaagttataatctaaaaaccttttttcctttaaaatgtgttaatcactttttatgatgttaatctggtatgattttatacatatctttttcatttctgtctacatggttctgaattgaaaagcaggtaatagtaagaccatccttattacaagtctcttactataagtcttaagtataatataattaaaataatatgtgaatagtttagaagtgtttcttaggtaagagataaaataaagtttaagagcttcaaatcattacaaaaactcttagctataatgtttttcaataaaacaattcatcataatagttaaaaggctaccattaaggttcttctaatggctcttatgagttcgtgatatacatcagtgtttcaatgttttttccgtttttaaatgtaaccataaactaattttaagttctgatggtacgttttttttttttttttgcttcttttaaccaaatgttgtaaaagcatcttagaaatgataagggataacacgtctcgctatcttaataaatcttgtgtcttcggcttatagatgttaaattagaaataaaaataatattaagaaactaagtttctaaatgattagaaaactaagtttctaaatgattagaaaactaaaactgagtcgaacaaccaatctgcagatgggggaaaggggtttggttctcggaagcaacaccaaaattttccttcatcacttggcttgcaatgcatgatagactaacaaggggtgcaagaatgagaacgtggaacacacaagtggatattacctacaaattttgtgcggaactggtaagacaaaaatcacctttttcagtgtccttattcaaaacatgtgtgggagaagctcacgaaaggcctacttcaaagtcattacacttcttatttggacctcattgtttcgctcctcacaggttcatttgttgggaggaaaccacttctgcttctgaaatacacgcttcagatcacggtacacaccatatggagagaaaggaacaatcgaagatacggagaggagaaccctatcacaattgtggccattggaaaaaacatcgacaaaaacattcgcaatcgaatcactcttcttcagaaacaagaagcccaaaatatgatgatttgtttgtattttggctttccactaggttttaattggcatagctaa

SEQ ID NO: 166779 - DNA, 1940 bp, Arabidopsis thaliana landsberg
tttaaagctcatgattttggcttatctttgtaatgaagctggtctgacacattttggtgacagttgtgctatccttctctctaatagaacaagcaaaaaggatttgttgactgaattatctttctgtacttggcagatgacaacagcaattgcaattgaagatgttcgcagggaggtgaagttactgaaatcattatctggacacaaatatttaatcaaatattatgatgcatgtgaggacgccaataacgtatacatagtcatggagtatgtcttgtttccatttttttttatcagatatttgatgttctctcttcctcaggattttggctgttacttaaatgttgtaacacagaacatcacttctgaactgcatttctttgaacatatctctgtaatcagacacaccttgtaaaccagttacttaaatcgatgtttggttctgcttgaccaggttgtgtgatggtggagaacttttggacagaattttagcaaggtatgtctgattactcttttaggtgtttctctgcatatgcctcaagttaaatgctgagaatttattcatatctatgctcaaacactgcattctcttgtctcaggggtggtaaatacccggaggatgatgcaaaggcgattgtcgtacaaattctaactgttgtttcattttgtcatctccaaggagttgtgcaccgtgacttaaagccagaggtctgtttttacaaagaaaactttccctatctctacctccagtagcattacacatcattactaaacactcctgttaccttgttcaacagaattttctatttacatcaagccgcgaagactcagacttgaaacttattgattttggtctctcagactttattagacctggtaagacttttcattctttcaggccttgtcactatactttccttatagctgcctactagtgaaatttgattgaattcctcaatgcagatgaaagactgaatgatatagttggaagtgcctactatgtcgcgcctgaagttttacacaggtcatatagccttgaggctgatatatggagtattggagttattacatatatactcttatgtggaagccgacctttttgggcacggacagaatctggaatctttcgcactgtactaagaactgaaccaaactatgatgacgtaccttggccttcttgttcatcagaaggtaaagattttgtgaaacgacttctcaacaaagactataggaagcgaatgtctgcagttcaagctttgagtgagttttttttttctttttttgacacatcattgagttatattattttgaacattacagaactaatgatatgtttattttcagctcatccgtggttacgggatgatagtcgtgtgattcctttagacattttgatctataagttggtcaaagcctacttgcacgcgacacctcttagacgagctgctttaaaggtatgactttcttcttcttcttcttttggcacaaagttggtaagagttgatttagaagattgaagcatatgtttaataattgaatctaggcgctagcaaaagcattgaccgagaacgagctagtctatcttagagcacagttcatgctgttgggaccaaacaaagatggtagcgtctctctcgaaaacttcaagacggtaagttacttaatctgaaggaaggcctttggtcaatagtcacatcggcttttttaaactaaaaaggtttaataagctccatcctcgcaggcgcttatgcaaaacgcaacagacgcaatgagagaatcaagagttactgaaatacttcacactgtgagaacctgagaacaaatttgagagaaaaatgaatcaatcttttggtttctaatgatcatctgttttggcagatggaatctctagcgtataggaagatgtatttcgaagagttctgtgcagcagcaattagcct

SEQ ID NO: 166780 - DNA, 362 bp, Arabidopsis thaliana landsberg
atggggcaattttcactagattctatttgctcggagatatttgtgaggaaaagggtatttcactaatcggttatgccagagggggtttttttttgccacggtcaccggatattgttttttaatttcaatgactggtcacgtgattttaaaatccccggtgttagtttcatcggaagaatcaacgatgagaaactcttctccttcgacgacgtcgttaaacatggacagacgaaaagccgcataggtaccctcaggagcggcggccgaatgtgcagatgtgaggcgatgttgaccatgcgcggaggtgaatctaacggttttagccgcgtataaagctccggccgtggataggaaaaaaacct

SEQ ID NO: 166781 - DNA, 890 bp, Arabidopsis thaliana landsberg
gcgatggggacatcggagatgagcatacaaacggaaaacgggcaaatgggaatgccgagtaacgtttgctgtgtcgtggttgagtattgccccggcggcgctctcaagtcattcctcatcaaaactcgccgccgcaaactcgccttcaaagtcgttatccaactctcccttgatcttgctcgcgggtacattatttgattcatcaactacttccggtttaacccggtttaccattttattaaatcttgattacttatgtatatgttttaggttgagttacttgcactctcagaagattgtgcatagagacgtgaaaacggagaacatgcttttagataagtcacgcaccttaaagattgcagattttggtgtggctcgtctagaggcttcaaaccctaacgacatgaccggtgagaccggaaccttgggctatatggctcctgaggtgctaaacgggagtccctacaacagaaagtgcgatgtgtatagctttgggatatgtctttgggagatttactgttgcgacatgccttatcctgacctcagcttctccgaagtaacctccgccgtcgtccgccaggtctttcaaaacgacctttttaactacccttttcgtaattgattttgtggattaccacctataaagagtatatctatcaatctcttctttgaatgatatatagaatttgagaccagagatacctagatgttgtccaagctcgctggcgaacgtgatgaagaggtgttgggatgcgaatccggagaagcggccggagatggaggaagttgtggctatgttggaggctattgatacttccaaaggcggaggaatgattcctcctgaccaacaacaaggctgtttctgtttccgccgacaccgaggcccatga

SEQ ID NO: 166782 - DNA, 727 bp, Arabidopsis thaliana landsberg
ctaacggagttgcctaaagacgataaagtttacgagcttatctaccgtcattgccaatctaagctaacttctcacttaagcaatcagtttgagattgtatcaattctcaagaacggatttcaaacaccattaggacaagctaagcttaaagcctttcaaatatacgctgagtctgttgcaaagaaaagcggcagctgctgtggaaacaaagctgcggtggctgaagcggcgagagtgaaatacggttgttgcggtgtggagaaggaagagttaaaagcgattctaatgtatggatttagcaacaatgccttatgtctctcaccagacaatgctcctcttcaatggtaaacaacaatatactttttttttttcattttgcgtttataatcttcaatgagtactctttatcattaatgttttgttttttctttgtataagtatgatagatccttcatcatcttgtaacgaagacgggattagcccccagccgcatccaagaacaatcaagggaaaatcagaggatgcgagctcgacaacacaaccgaatccgagctcaaaggagtcagaatcaggcgcagacagtttgacatctccaaacaagtataccatttggagcacacacacgaacactcatgttttgcctgagcttgaagttcgcatcaaaactccatccatcttgaaaagaagtcagcactcaaaaaggcctgccccccccttcttaatccag

SEQ ID NO: 166783 - DNA, 2682 bp, Arabidopsis thaliana landsberg
actatatgatcacgtaaaagtaaaccaaacaaatattattattttttactttaaaaacacaaaaatcaagaaagattagagagatacctcggtttgattcgaagttcgtttgcaattccaacacccccaaaatttattattgtacctgagaaacaaaaaagaagtgctaatcaaaatcaagtaaattctcacaaatataaaaaccaaacagctacaaaaatcaaaacatgtaatcgaagaaactataaagcttgggtaaacaactcatcaccaattggcaaagatgtatgagatcttagtttccaagtgaccataacataaaaaggtttccaaaaaatcaattaaaagcatcatagaaaagacctagattgaaatacaaaaaagaactataaacgatcttgctattgctttgcattaaaatcaaactacgatatttgtgtttgagagtagggatcctatatttataggaattttcagcataaggttttagggttttacatacgacagcgtaaattatacgagcataatatctttgtttgaaaagcataagcccgttagggttgttgggcaacttatgattgagtaggtttgattaggattaataggcgatttaggtttgattaggggcgccagagaataggaaatttagggttgagagtgaattaaaccttttttttttctacacattaaaatataaaaacaaaataataagttatctcattagttagtaaaaatattaatttatccttaaaaaccttaagagagggagggcaaatccatcagttcattttctgagagcgaacatgaaagtttttgacatctgctttaatatataagattctccaccgcttatgtttgggccgctacgaattcaagatgttctgattgaatgattgagtgattatgaaattttttacaaaaatgatcgataggtattgtgttgttatgggttttaagaaatatttaaatacttttttagagacggtatgcttgatcttttgtaatattatggtcgaattttcaaatttcataactatattctatcattgaaatttaattttttttttaaatactctagttggtattaaataacattctttagttttgactcgtttgagctctaattattaatcggatgacaaaaaaaatagttaatattaaatagtgaaatcttttataaaaggaaaagaaaacatttatttactagtggggataatgtttctaaagcccaataaaggcccaaacgttctctgaaataacaccctaattatagcttctgaggcccaaatctctctctctcccctccggaaatctcctcgattcctccgtcaccaccgtaccgtaaccgagactggtcgcaatgttgtcgctcaatctatctttgaaaccccaacatctcaagctcttatcttgttacacggattcgtctgctccttcaatcgcgaaaaaggtacctacacacttgcttctgtttcttagttcacttcatatcttgaattttaggtatctctctactttgtacagttgatcaaggaatcaaagctatctagggacttcagtcaaaagatacaaatcgtagactacgctccattagttcaaactttaagccagagaagattacctgatgtagctcatgagatttttctccaaacgaaatcagttaacttgttaccaaattacagaaccctttgtgctcttatgctttgttttgctgaaaatgggtttgttcttcgagcacgtacgatttgggatgagattataaacagttgttttgtacctgatgtctttgtagtctctaagcttatatctgcttatgagcaatttggttgttttgatgaagttgccaagatcaccaaggatgttgctgcaaggcactcgaagcttcttcccggtgtgtcttcacttgctatatcttgttttggtaagaatggacagttggaactgatggagggtgttatagaggaaatggattcaaagggagtgttgttagaggctgagactgctaatgtgattgttagatactatagttttttcggtagtttagataagatgcagaaggcttatggccgggttaagaagtttggtattgtgatagaggaagaagagataagagctgtggtgttagcgtacttgaaacaacggaagttttatcggttacgcgagtttttgtcagatgttggtctcggtagaagaaatcttggaaatatgttatggaattctgtattactgtcatatgcagctgattttaagatgaaaagcttgcagagagagtttattggaatgcttgatgcgggtttctctcctgaccttaccacctttaacattcgcgctcttgcgttttctagaatggctctcttctgggatctacatctcactcttgaacatatgagacgtttgaacattgttccggatcttgtgactttcggatgtgttgtcgatgcatatatggataagcgactagcgagaaatttggagtttgtatacaaccgaatgaatctggacgattctcctcttgtcttaactgatccacttgcatttgaagttctggggaaaggggatttccatcttagctcggaagctgttttggagttcagtccacggaaaaactggacgtatagaaagctaattggagtttatctcaagaaaaagttgcggagagaccagattttctggaattactag

SEQ ID NO: 166784 - DNA, 293 bp, Arabidopsis thaliana landsberg
atggcgacgaacattgggatgatggatagtgcttactttgttggaaggaatgagattctgagttggatcaatgaccgccttcatctcaatctctctcgtatcgaagaggtacttttataaaaaaattgctggattttgtaatctgcatgtttgtttccatggatagatttctccattgtgtgcattgtcatggaactgatttataaaggacgtgcctttcgctttaaaagggttttgtttttataatgtcgggggcttaagaggattgattctgaggaatgtgttgttgatct

SEQ ID NO: 166785 - DNA, 1096 bp, Arabidopsis thaliana landsberg
cgttcctcagaattcgaaagtttacttagttaatatctgtctgattgtctcccactcatcactaaactgccccagcatttcatactaattgcaatctttctttcagaatgatcatgtccagtcggatcaacaggcgtttcactatatagagaatgctgttgatcaggtatgaatgcatttttgcagctcagagacttgtatgaacgtataattcggaaatttcatagtaatctcaccttgagttggtaacttgcagctacatccaggtgccctctatcttttaggaatagtgtatctgacaggagactgtgtgaagcaagatgtggattcagctatatggtgtttccatagggcttcagagaaggtaataaacttcatgtctggcgatactgctctttcttattttgtctgtagatctgtaccgctgaagcagtgtttacaaagagccagcttctgttttcgtttcattactgcctcattagtgtaaattctgcgctatagttatcatcatatgttctacttttgaatatcgacgaaacatgcattgtcttatgtcaaaattttatgtaaaatctgtaagagtctgtaaagtggtatcttcttgtagtttccatagtctgacatcttcttgtaaacgttcagggacatgctggtgctgctatagcatatggatctcttttacttagaggttagtaatcctctttcagcacagacttatcttgcttcttttacatcagatcctcatggctatccaaagtggatttgttttttggtcactcctggctttctagatcttaggaacacaacaatatcgttatgtttcttgctttcaaggttacttgcttaagatatcaactatacaggtgtgcaagtcccagaatctctaacaaaattgaacgtcgtgggagtttcacctcccaagagagcaagaaagaacctggaaaatccggagatgaatccattagagatggcaaaagaacagttccaaatcgctgcaagagcagggtgcgatctagggctgaaatggctgcaaagggtggagcaagaagagaaacttcttatgagggaacaagataacgaatgtgcctatgtatga

SEQ ID NO: 166786 - DNA, 710 bp, Arabidopsis thaliana landsberg
cttacccatttgcttatatgtgggcttgggctggttttatgttgaccaatgcttgttgattcggtcatcgctcattatactcaaagacccaaactgatttggagcttcaaggtaccaaaagtttcgaacttgtgaatctcaatcaagaattagaattatgttgtgttgaaagttttgtgctttatttcgtttcaggagaagacaaatcgaatcagaggtcagcaacaactgaaacttcgattggagatagcattctattgatcgtagctctctgttttcactctgtcttcgaaggcatagctattggtatttcagagactaaatcagatgcttggagagctctctggacaataacactccataagatatttgcagcgattgcaatgggaatagctcttctccgtatgattcctgaccgtcctttattctcctcaatcacttattctttcgcattcgccatctcgagcccaattggtgttgccatcgggatagtcatcgatgcaacgactcaagggtccatcgcggattggatattcgcattgtcgatgagcttggcgtgtgggatatttgtgtatgtgtctgtgaaccatttgttggcaaaagggtatcgaccaaacaagaaagttcatgttgatgagcctcgttataagtttttggctgtgttgtttggagttgttgtcattgccattgttatgatatgggacacttga

SEQ ID NO: 166787 - DNA, 1490 bp, Arabidopsis thaliana landsberg; identical to SEQ ID NO: 57724

SEQ ID NO: 166788 - DNA, 3134 bp, Arabidopsis thaliana landsberg
atggcgaaacctgttgccgccagtttcttgacgcaggccaatgcattgttcaagaaaaacttaacttatcaggtttggccaaataatatacatgcgttatctatatatacgtggaaaaaatgtaattatatcttgttaccattgatgtagaaacggaacatatggagcaacgtaaggctgatcgtgatccccttgtacctctgtgtggttctagtatgcattcaagctgtgttcgattcactggttaacaactctgttgataatcaatgtggttgtcgatgcgccgacgacgacaaaaatggagatggcaaatgcgaaataaaaagttgtggtttacaatattcatctcaaaaccaagccgtcttttgtgctttccctaaccctccaccgttgcttcctttgttacatattcctccttctgttaatcgtgactcgtgccaacgaaccggatcttgtccagtaaccatacttgttactggaaataaccaatcccttggaacaagtatacatactttccctctttaatttccatgttttttttggatatatatatctatgactatagaataaattcttgttgccttcctaactaatcttcactattgttagctttatctgagaatctgcttagtacttctttcacggtcaactcctcttctgaccttttcttgcgtaatctcgcctataatgtcttggcaagtccttctctgtttgaactctgattgtttccattattatcaaagtctctatgtctctcgggacttatctcatgaatatatatgtatttgcagagcacaatatcagagacagactacaccaattatcttgatccagggattcactcagatcttcccattttccaaatccaaccttattgcaccccaacaaccaacttgtcattctcatttcgacaaccacctatcacgtttcataaaggtactaagttcacaaaattatgttaggtgattatttttaaggtaccaatttgttttgtaaattaattacaacgtgtcactaaaaagcctagtggtaatatagtgaacataattaagatatgttgactttacttgagcaaattttctgtttaagtttaaatgcaatctgagtgcattccatgttgcaagttttattaaaaataatatttcttgggcatcactcaaagctagcttctggaaaacagtcttggagctgattaacttagttaatttgtcaaaccagaggtgagatgcgttcaaggattgaatctctggagaaataactcagtagaggtcaatgatgagatctttaagggctatcgtcaaggaaatcatgaagagatcatcaatgaggtcgctgcaggttattacacttctcttatcaattatcatttttctctgtgtttacaatgcaacttctaactactattagtttattgtgtgtggttctttagcatatgatctcatggataccgatataaacaacttcaatgtgaccatttggtacaactctacatacaagggagatttacgagataggcgtgtaaagtatgtccgagttccgcgctcagtaaatttggtgagaaactaagtcattcaagacattctcaattgttttatacctagttaagactggtctcttgatcataaaactcttgaaaaaatatgcaggtttcgaatgcttatcttcagtttttgcgaggcccagggacaaagatattattcgactttgttaaagaaatgcctaaacaagaaactaggcttcgcatggacatggcgtctctcattggccccattttcttcacttgggttattcttcttctgttccctgtaagttcctttaatgtggagtgtggactacttcattctcttacaagtatacgatgattcctaaaacttggaagccgtttggtcattatatgattaaaaccctatcatgggaactaatttaccctgcaatggtctgcgaactcgaagagtgtatggacctaatccttgattaataggccttttcaatagttacacccatttttatatgtaggtgattttgacctcattggtctatgagaagcagcagcgtctaagaattataatgaaaatgcatggcctaggagatgctccatattggatgatttcctacgcatattttctagccatatctactttatacattgtatgcttgatgatatttggatcagcaataggtaatcattgccgtatcttatgttattattttcttatgtatatatagaacaagttacaaagctatatagtttgttacaggactgaagttcttccggttcaatgactacaccatccagttcattttctattttctctgcataaatctgcaaatctccatagcctttctagttgcctcagcattttcaaaggttggtgcagcaccaggtactaacttaagtctcacgttaactacatgtagctcaagaacatgaaggtgttaattaaaaggaacactcgttctgttttatggctcaactgtagttgcggctcactaaaacgtgtttggatctgggctcttgggcgcattcctcttccagtttctgatagaaagtttatcgtttcctagtaagctatcaagaacaagttgaagataacatattctcaaaacagacaacaatgctactatatataatcctttactttttaccaggacgtttgatttttgtcatggaattgtatcccggcttctcattataccgcgggctgtatgaattctcccaatatgctttccaaagaaacttgaatgggagggatgggatgaagtggaaagatttcagaggtagtgcaatggatgaagttttcaccatcattatcgttgagtgggttgtcgcactcgttgcaacatactatatagaccgagtttcttcatcgtcaaaagacacttttgcattcttgaaaaaccctttcaagttatctcctactccacaaatgtttagctttcaaaaagagagatctgatgtttccgtagaaatggagaaacttgatgtcattcaggaggtattgaagaagaactcaccacccattccatgttctttgcgtttttcgagttgttttgataaataaattttgttcaaatcagaaagaaacggtcaagcagttgatatttgagcggagcaaaaatcatgggattgtatg

SEQ ID NO: 166789 - DNA, 1204 bp, Arabidopsis thaliana landsberg
atgattaccttcaaatctatagctctaacgataatcttcctatcatattttgtttcttgtgtctcaagtcaacgagagaccaagtttcttaaccatggcttcctcggggctaatctcctcaacttcggctcctccaaggtctacccaagtggcctcttggagttgacaaacacttcgatgaggcagataggtcaagcttttcatggctttcccatccccttgtcaaaccctaactcaacaaattcggtttctttttccacaagcttcatcttcgccatcactcaaggaaccggcgcaccaggccatggcctagctttcgtcatttcaccctcgatggacttcagtggtgcttttcccagcaattatctgggcctcttcaacacctccaacaatggaaactccttgaatcgaattcttgcaattgaatttgacaccgtgcaagcggttgagttgaatgatattgacgataaccacgtaggcatcgacctaaatggagtgatctccattgcgtctgcaccggctgcatattttgatgaccgagaggccaagaacataagcttgaggctggcgagtgggaaaccagtaagagtctggatcgaatacaacgccactgagacaatgcttaatgtcacattggctcctctagatcgtccgaagccaagtatacctcttctctccagaaaactgaatctttctgggattgtatcgcaagaacatcacgttggattctctgcggccacagggactgtagcgagctcacattttgttctaggttggagctttaacatcgaagggaaagaatcagactttgatatcacgaagcttccttctcttccagacccgccaccaacattgtctccatccccaagtcctccggtttcagccaagaagaagtcgagtaacacgatgctgatcataatcgtcgctgcatcagcaacatttgtaatcttgatcttgagcttcttagtattttggttcttccgtagagagaaaatattcttcaacggaggtgcaaggaaattctcctaccaaacaatttccagcgcaacaggaggttttgacagctctaagcttttgggagagagaaactctggaagtttctacaaaggccagcttgctcccacagagataattgccgtaaagaaaattacttgcaccacaaggcaacaaaagacgggatcctctagagtcgacctgcatgcat

SEQ ID NO: 166790 - DNA, 464 bp, Arabidopsis thaliana landsberg
gtcaaaacgcttaagtttggatcttttattagccaaaatttgtaagttcggatatttttcacttttcccatttaactatagataatatcgttagtttttactaggttagtttcatttggcaaaaggaaatcatcaagacagattaatctggcattatactccttcaggcgattatacggtgaagtcgggatactggttcctatctcatgacccaacggatattcgcaccaaaccattgataccacacggctctgtaaatttaaagaacaaggtatggaaactccctatcattcccaaaatcaaatatatgttatggagggccatatcgaaagctttacctacatgttcgagactggttacaagaggcatgaacatcagtccatattgttcacgatgcttaactgaagaggagtcaatatgtcacgttcttttcacctgtccttacgcaatgaggatatggagac

SEQ ID NO: 166791 - DNA, 479 bp, Arabidopsis thaliana landsberg
  unsure (1)..(479): unsure at all n locations
atcatcagtccgattgtcgacttcactttcagcaactggaaaaagatgctggcgattcatctcgatggcgcgttcctgacgacccgcgcttgcatgcgcgagatgatcaagcacggcaatggcggcagcatcatctatatgggctcggtgcattcgcatgaagcatccccgctcaagagcgcttacgtcgcagccaagcacggcctgctcggactggccaaagtcgtcgcgaaagaaggcgcgaaagaccgtatccgtgccaacgtgatctgtcccggcttcgtacgcacgccgttggtcgacaagcaaattccggaacaggcggcgcaactgcatatcagcgaagccgannnnnnnnnnnnnnnnnnnnnnnnnnnnnnnnnnnnnnnnnnnnnnnnnnnnnnnnnnnnnnnnnnnnnnnnnnnnnnnnnnnnnnnnnnnnnnncgacgagtgcgctaagcggccagccaatccccgt

SEQ ID NO: 166792 - DNA, 2524 bp, Arabidopsis thaliana landsberg; identical to SEQ ID NO: 20092

SEQ ID NO: 166793 - DNA, 971 bp, Arabidopsis thaliana landsberg
atggcgatcttgttctgtttcttcttggtttcgcttgttactctcgtatcatcaatcttttttaaacagatcaaaaacacaaaatttaatcttcctccgagccctcctagtcttccgataattggaaacttacaccatcttacaggattgcctcacagatgttatcataagctctccatcaaatacggtcccgtgatacttcttcatctcggctttgttccagttgttgtgatctcatcgagcgaagcagctgaagcagtactcaaaacacatgatttggaatgttgcagccgaccaaagacggtggggaccggaaaactctcttacggttttaaagacatcagttttgtgccatacagtgagtattggcgggaaatgcgaaaactcgcggttaccgaactttttagccttaaaaaggttcaatcttataggtatataagagggtaagagatcgaatttatggtgaagaaattgtcagaatcagctttgaagcaatctcctgtggatctaccttcttctccctcaccgcaagcataatttttagagtagccttagggcggaatttccacgagagcggctccattatcgatcaggaggggattgaagaacttgttaccgcggctacaacagctataggaagttttactttctcggacttcttcccaagtggacttggaagattcttagattgcttgtttcgtacgcaaacaagtataaacaaagtctcggagaagcttgatgctttttaccagcatgtgattgatgatcacttgaagccatcaactttggattcctccggagatattgttgccttgatgttagatatgataaagaaaaaaggacataaagatgatttcaagctcaatgtggataacatcaaagcagtcctcatggtaaagttcaaattttggttcatataactttttatttttcaaaccattgaataaacacttagtttaactactagctta

SEQ ID NO: 166794 - DNA, 501 bp, Arabidopsis thaliana landsberg
  unsure (1)..(501): unsure at all n locations
catccctaagctatataggggggtatatcactttaagttttggggtatttggctctgatgttgaatattcaaaactcatatatctacccatactataaaacaaaatcacatttgagttttgtttccaggaaggatcgaactcggaaaaactcaaaatgagcaacttttttggtagcctccgtcaattccaagtcttctctgacctccccggtgcaagctccaccgagagactcgatatcctcgacgacgaacgccacatcatcggtttcagcgttgttggtggtgaccaccggctctctaactaccgatccgtaacgacgccttcacccttctccgatctccgggaccgtcgttgtcgagtcttacgtcgttgatgttcctccagggaacacaaaggaagagacttgtgacttcgttgacgttatcgtacgatgcaatcttcaatctcttgcgaannnnnnnnnnnnnnnnnnggctgagagcaagaagaagttgtctctg

SEQ ID NO: 166795 - DNA, 2927 bp, Arabidopsis thaliana landsberg
gggcaagatctgccggtgcttacagacgcactcctcaccgcgaaggtcataacggccggtcatcccacatggagcgatcccctcgacgtgactcaccccggcccacttcccgaactggactcagcagcgagccaattgctgacctgattcggaagaagagagacaaaccatcccgcagtagctcctcccccaaaagagacaagacgagggcccgaactgaccgctctcctcgaccgtcgccgccacccgatctatgggtcctcctcctccagtcaccgtatctccttcgtccggatcaggaggtgaaaaggcagagcggagtgctaaccctcggcgggatgaaactgaggtccgagatgccggaactaaagttgttttggttcctcagaccaagtcgctcacgggttagaaatttccctcccattttttgttatcacatttttaccatttcgccttattgactcagcattgttcgaccggtccgaccttttttaacagcgatggaaacggagggaaacgtctttcgatgtttcaaaacccgaaaagacaccatcctgccagccttcgatagatggcgttctgcaattcgcgagcgattcctactccacgcccataactcatctcgggttagttcctttttcccacaatagatcttttaatctttgctcctttactctatcgctaaccccttctcgttattatctgatccaggcgaactgcaaactcaatgacatgattgagtactacgaaaggctactgcttgacagagaaaaagatgttatggcgtggaaggataagtcttcatctcttgagtctgatctccgctcttcaaatgataccaggctgaaattggaggatcaattggacaacctctcaaccgaaatcatgaagtccaacggcgagctgcaggagcagtaccaaaggtacgacaagatccaagaagaactctcaacttctcgggacagactttcggaatccgaatccagtgcctacgagttgtccaaccagctatccgagttgcagcttaagtacaaagcggtggcaaactatcgggacgctgagttggcgaggtcggcatcaaaggccaggaaagaggtgaaaggtcgcgggatgaaattgatccaaggggcaattgtcttcatccaaaccgaaaaggctagaacggagctggaatcagacatcaaggagtaggagagtaatctcctccttttggaccaaactcatgaagatgatttttccgaagaacgagagagggacgagttgaaagccgtcctggaagagaagcgaaatcgtttagcttcccttccttcctcgtcgttcaacccccagcagttcgaggagttcttcactgaatcgcctcctttgagtgaatccggtttagactgggctggtaaatcccaactcttctccctttttctttaaaaaatcgatccacagtgaactactcttatattaatccgagataattgcctcaggtgtcagcggttccgtggaacccaaagtgcctattgccccggcatcagttccgcggcgataatcacgttgcctgaaattcctccatccacgaactcggagatagtggttatcgaggatgatgatggttcagactccgtgattcctggcgagcagcccgctactgacgagccgagtgagattgagacaactgccgcagatcctgagttagttcaaaccgaacccgagatacccgagaacccgtagtggctgtgtccacttaatggggattgtctcttaaactcgaaattcattatcgttgtttttctttttgaattactttatctgcctaagtaggctttaaacaaatactttgcctgaggaggcttttaaaccttttctttaagattatgatcccgagagggctttccttgtgctaattttcagtatgaatttgcaaagtccatctctttaaatagtgtttttgtttaaccatgtggtcaagttacgggatttgttggttgatcagacctatccctaaaaatgcggacttgaatccgcgaactctccaactccccaactcgagtttagtcagttcgattatttttgcgggttctgagcctttactatttactctgcatttaatggcccacttatcttaaatgtgacagttgccttttcgtccttggaaatctagaaaagtgtcacgctcctaaggccataattgcattttcctcgattcccaaaaatggataaactcattcggacacgcacaattattaactttgtggtttcgagtaaaactctaaatcactataaataagggcataaactttcttaactctcgaaaaacatgatcgcagaaatttacttgaacaacacctatagaatggaacgcgaaggagcatccaccgtctgtcccctcgaccccgggagtcccttgtttttgtctgtcgatggcttcgagcccgccggcgtcctctttccacacgcttgtttccactttccttcgaaggaaaagaaagaggcgtacgactttatggacaaggtaaagtctctcttgttttctttttcggaacgagttctacttgttttctaaccagtccatactttaggtcgtcgacaagcatcgccgcctgtgcgatgaaaggcagcgtttaggcctcaagaggcaaacgcttgaggcccaaattgcttgcatcgagaggaagataagggccatggagagcgacccttttcagtgggagtggaggaacttcgactgcgtggcgaagatctcgcacatgcttcggatgtacctccgtgctcgaggccaagttcccggtcctgtaaacgctccggttctagtgatcccgtctgacagtgaagacggtgacagcgaggaagaggacagtaactcctgcaagcgcgtgaagaatgaacccgacatggacgacaaaaacgaggcgtccacttcgaaccccgaacggcgatga

SEQ ID NO: 166796 - DNA, 1271 bp, Arabidopsis thaliana landsberg
aaaggctagcgaaaaagcttgagctaaaacaattgatgatttaaagacagaaactatagccatacaaagcttaatccaagacaaaaggaggtttgaacatagagactaacaagcatatcattgagcttcttaacaagttcaagaagcttcaaggtcttgaagctaccgacattctctaccaacccgtcatcaataaagcaatcaccaagtcaacgtctctaatattacctcatgagtttttgtgtcctataacactcgaaataatgcttgacccggttatcatcgccactggacaggtaattgaacttatggtttggttcaaacttccttggtacgtacttgaaactaacataataatatgtttgttttatagacatatgagaaggagagtatacagaaatggtttgacgcaggacataagacttgtcctaaaacaagacaggagttagatcatctctctcttgcacctaacttcgctttaaagaacttgattatgcagtggtgtgagaagaacaatttcaagattccagagaaagaagtaagtcctgactcacaaaatgagcagaaagatgaggtctctttgctggtggaagcgttatcgtcaagccaactggaagaacaacgaagatcagtgaagcagatgcgtttgctagccagagaaaatcccgagaaccgcgttttaatagcgaatgcaggagcgattcctttgttagttcaactcctttcttaccctgattcaggaatccaagaaaacgcggtaacgacattgttgaatctatctatcgacgaggtcaacaagaaactcatttcaaatgaaggagctattccaaacattattgaaatccttgaaaatggaaacagagaggcaagagagaactctgctgcagctttgtttagtttatcgatgctcgatgagaacaaagtaactatcggattatcgaatgggataccgcctttagtcgatttactacaacatgggacattaagagggaagaaagatgctctcactgcactctttaacttgtctcttaactcagctaataaaggaagagctatcgatgctggtattgttcaacctttgcttaaccttcttaaagataaaaacttagggatgatcgatgaagcgctttcgattctgttgctgcttgcatcacaccctgaaggacgtcaagccattggacaactctccttcattgaaacacttgtggaattcatcagacaaggcaccccgaaaaacaaagagtgtgcgacctcggtgctgcttgaactag

SEQ ID NO: 166797 - DNA, 2831 bp, Arabidopsis thaliana landsberg
ttaagccccaaagctacttgatttgtcgaacaacctctggtctctctgatcatttcaagtctgaattttgttcatccccaacatgaataccattatatatccaagtctcttaagcaaaacccgaagattcagacaaatcctgggttttcttttgtttatctattcctggaaattcacaactaaatcgaaacagtgtagtgtagtgtactgcagatgttgcacacaaggtgttcgacgaaattccccaatactaaaaattgttttttctttttctttaaaccaaagccttatgtcacgtgacactcacgttataaaagccagatttttcttcgatacaattctgttattttctcgttgctcttttttcccgcttcacaatttctctctgaagcaagaaaagccctcgagagacacaagaaagcttaaagaatcttgagaatcgtcttcaatggagtcttcttcttctatcaaggaggggaaactctacaaagatgctaaagatcacatcgctaaaggaaactacatcaacgcattgaagatacttgaagatttgattcgaatccatagagaagatcaaaacgcatggcttattcgtatcaaacaaggtcaagtattcttaaaactatcgctagaaacagagaactctgatatggaattcacatacttgttaggttctgtgggatgttactcggaagatgagaggttatcaccattttgtgcaaattcgcttcacatgttggccaacaagcttggatctttgatgtactacaagaagtgtttggtgaaagcaaaacaagctttatctgttactttccaggatatcacggatcctgttgttcggcaaatacgattcaatgaaaaacagaagcagatattgagaataatcaaagatgcagagtctaagattgcttctccggagactctagttgcttctactatgaaacaagtctctaaaccaaaagttttggagtcagagaaaattccagagacacgtgagggcgtggtgaaaagattgaggtcgttttgggtgggattggatgtgaaggtcaaaagagactttatgaaagtaaacattgcaaagcttttatcttttgtcgagagagtccgttacagagatggacgagatgttttggagaacgttcttgcttctgcaaggaaagacacgatatggacattctggatgtgttgttcgaagaggttctctagtgctgaggaatgtaagaatcatcttgaagaagtacatgctgcagattttaaacctggtacaaaaaaggataaggtccagagaatagggaaggactgggctcgtaagatatcaaatggaagttgggaaccagtggatgcagcggctgcggttgaaatgatcaagaatcagctcgcagatgtgaaagcgtttgcatctaaatgtaagaatgggtggtccaaagaatggcctttagctgcggatgaagagcgcggtaagttacttaaagaaattcagtcgcttcttttgttgtttcaggaacgtaaaattctctcttgtagcattcgagattggatgatgcagttgacggttaagcatcttgcgcaattagaaatttctgagcataatcttagctccaagtgccgcttagtggaaacacctcagagtatttgctttttggaatgtcatgaactcaatcaaatcctagaccttctcaaacgcattaactgtgaacgggttgatggtacagaattggtttccaacgcaacagacagtttatgtggtcgtttgcgagttaaagaaaagattgaatttgatcatgagttttcatttatgcttctggataaaagactgctgagaggcaagattgcttcatttgatgatgaagggataatagatgtttgtgatcacaatgttcactacaccaagacacatcctcagggtgacgataccataacctggttacttgactaccctttgatagatgagagctttgaatttccccgatctatcagagcacacaatcttgaaatatgtgtggctgttctgcgagccattcacttcacttgtgcgactttgggaaccaaatatgcaaagaaattgcagatcctgaattatgatgcagcacttattgacgccaaaaacttatgtatactcgaagatgaaaggagaaaaaatgttccagaagatcaatggcacacatatgcatctcttctgtgcgataaatgtgaagaacgtttggtgatagacgccggagattctcacactacaaaactatgcttatgtgcagtacgagatgttcttgaaaaagcatcacatccgacatttgaattctccgacctagaagattgcatgactcttatacatgggcataaaaatctgaatgatgacacagtgttgaagtccatagaccttctgaaatcagtggtcaccaacaaggttctttccttatctaagttttaatttacaacagtataacataaattatctaaattatctaattgacttgcaggttccggtagctgattcaaaaattttgctgattgagaattcaaggactaatttgctaaacgacctcgtcaagctttctgtttttgactaccgctcttatatcctgcacctgctgaaacgatatcaacgggttggtttgtaactttggttttatacaaggagctgtcatattcctctcttttcatatattaaaactatatctattcttctaggatgagttggatgaaattgttgatatggatgccaaaaccaagttagctgcagcacaagccgaacatttatccgaggaaaaacaagagaaggggaagaagtcagggtcaaataagaagaaaaatagaagcaacaaggtcggtgaatg

SEQ ID NO: 166798 - DNA, 1108 bp, Arabidopsis thaliana landsberg
cacaacattaatattgtacaagctaggagagaaggcgctgaagcggtccactcagtgaatccgaatgttcttgttattgtctcgggtttaaattacgctactgacttatcgtttctccgagagagaccctttgaagttagcttcaggaggaaagtggtgtttgagatacattggtatggattttggaatacttgggaaggagataacttgaacaagatttgcgggaaagaaaccgagaagatgatgaaaatgtcggggtttttgctcgagaaagggataccgttgtttgtgagcgagtttgggattgatcaaagaggaaacaatgcaaacgacaataagtttctaagttgttttatggctttagcagctgatcgtgatgtagattggtcactatggactcttgcaggaagctattatataagagagaaaagtattggatcagatgaatcttatggagttttggattttaattggtctagcataaggaactcaaccattttgcagatgatatctgcaattcagactccttttataggtacacaatttgttttttcaaacttacttttgttttatatgatcttgatcaataacaaatttgcaatattcaggaccagggctaatggaaactcaaccaaagaaaataatgttccatccttcaactggactttgcattgtaagaaaatcattgtttcaactaaagcttggttcttgcaatagatcagaaagctggaggctttcttctcatcgagttttatcactagcagaagaacaaatcctctgtttaaaagcttatgagaaaggaaagtcagtgaagctacgtctgtttttctcagaatcttactgttctaaatggaaacttttttctgactcgaagatgcaactctcttctataacaaagaatggattctctgtttgtttggatgtggatacggagaataacaacattgtgacgaatagctgcaaatgtttacgaggaaactcgagttgcgatccgagaagccagtggtttaagcttgttactagcacgagaagacggtctagaccaaaaccttttcttcaaattagtctatactccaagacatttcttcagaaatctttatcagtttaa

SEQ ID NO: 166799 - DNA, 546 bp, Arabidopsis thaliana landsberg
atgccggcgccacagcctctcctgcattcgcttctggtcgccgtgctagcggtggccgccgatgttgccaactccggccacgccaagcccctgacgcctggcgggcgcgtggtacaccacaaccacggcaagttcacggccgggccgtggaaacccgcccacgcgaccttctacggcgggcgggacgggtccggcaccacggcgggcgcgtgcgggtacaaggacacgcgcgcgcaggggtatggcgtgcatacggtggccgtgagcactgtgctgttcggtgacggcgcggcctgcggcgggtgctactaggtgcgctgcgtggacagccctagcgggtgcaagcccagcgcggcgacactggtggtgacggcgaccgacctgtgcccgcccaacgaccagcagtccgcggacagcggcgggtggtgcaacccgccgcgggagcacttcgacctcaccataccggcgttcctcaagatcgccgaggagaaggccggcatcgtgcccatcacctaccgcaaggtggcgtgcgaaaggaaaggcggc

SEQ ID NO: 166800 - DNA, 748 bp, Arabidopsis thaliana landsberg
tgccactcttcttcatcttcatcatcttcctctatcaccggctgccgaaaaaccctagttcattatatgggtcgatctccttttggtggtagaaccgagtgggtaatgcatgagtatcgcatcttcgacaacaatacttcactaagatcactaaacgtccacgtaacaacatcataacaccatccagatgaaaaaataaaaaacttgattcatagtttaccatttaccaattgatcattttcatttggtattcttccgctctttagggagacttcgcgctgtgtcgtgtgataaagaggaatgagcatacgcttaagaaatgtgaaattatctcaccagaggtttcagatgagtcattaagcaataatgttaacaatttttgtcaagcaagtgacctagaaaagggttcttgtgatgcaagtaacacacgtttgtcttctcctgatttcatccttgaatcatcttttcaggtttagctacttaaatccaaactctgcgaaagtcccattcgtttatcaatatcactgtgtctcaaacttcattacattgttttttgtagggaaattcacattcaaaaacagaagaagattccggtttccaagtatttacattacccgaattcgaatatccgctagaggtttttgcagatttgaatttcgatttggaaatggaggatccattcatgttcgattatcatccagagcctcatatgaacaatgaagtcatgagccatcacattcgtgggtaa

SEQ ID NO: 166801 - DNA, 1381 bp, Arabidopsis thaliana landsberg; identical to SEQ ID NO: 11919

SEQ ID NO: 166802 - DNA, 1366 bp, Arabidopsis thaliana landsberg
tcttcacttctcatagttctcctctttctcctctcggtctcatcttcctcagctcaaacctacaatatcctctcttacggagccaaacccgacggcaaaaccgactcgaccaaggccttaaccgtcctgtgggccaaagcatgtgcatcggtcaaaccggtcaccattttggtacctaagggacggtttttgttaagaagcattatttttgacggttccaagtgtaaacgcaagtccgtcacgttccgtatccaaggtacacttgtggctccatcggattatcgagtcatcggtaaagaaaactattggattttgttccagcatctcgacggcctctctgtctacggcggagttcttgacgcccagggagcttctctatggtcttgcaaaaagtccggcaagaattgcccgagtggcgccacggtaagaacttaccattttaacgtcttgatgttatttgttaattatgcatttataattttaaattatgccaacctacaaaatattgttgccatagaaattctaatcaataagtagggaaaatggtaaaaaaattgttacatgtataaaagtccatcaattttgtcttattgttaaacttatattgttgaaatcatttaaaagcattttcttagtaggtatattttgaaaatgaattatcgccgttttatcgatgcgcttccgcaaattccgcaattttttctccatttttctgctaacatagagttacattcatataaatattatgtgtcgttgacttctcacgttaattaacgtagaatcctcattcacatgtaccaatcatagagtcattgatttagtgataatctttattatatacttcctattgttttcggataaatgaaattgacacgtgagcaacaaattgcaaacagagcatagggtttcagagctcacgcaacgtggtgatctccgggctgacgtcacttaacagtcagatgtttcacgtcgcgattaacggctgcagtaacgtaaagctcgacggagtcaaagtttctgcagacggaaacagtccaaacactgatgggatccacgtgcagtcatcatctaccgtctccatcctcaactccaaaatctccaccggcgatgattgggtctccatcggtcccggcactaacggcctctggatcgagaatgtcgcttgtggccctggccatgggatcaggtattgattattaataatttacttggaacttcatttttatatttccataatttttaatttttactttttataagggttttttcttttcacttttggtttatatgaattatactagtaaacaaacggtttatccgtttatgaattaataatcaacacaacttccaagagagaacaatcttt

SEQ ID NO: 166803 - DNA, 728 bp, Arabidopsis thaliana landsberg
ttagaacaatgtgaagaatagctaaaggctttatttttgctatgattttccaggatttcaagtttacctagttggaggttgtgttcgggatcttattctagatagaatccccaaggattttgatgttatcactactgctgaactcaaggaggtttaaatcagcttatgttcttactacagacttgtatttttttatccttttttatgatgaactcaatcttgcctcacaaatttacgttttgaatcatcgcttgtgtgtataggtacggaaagtatttcccggctgtcaaattgttggaagacgatttccaatatgtcatgtttatgttgatgatattatcatagaggtttgttcaacatttcacttattttacactttttccctctctccctttctccatctttctctcaagttcgtaaaattgtatcctaagggatgatggagtttttctttttaataggtgtcaagttttagtacttcagcaaggactggtaaagcgcccaataaaagctttagacggcctgcgggatgcgatgagcgggattatattcgttggaagaattgcttacagcgtgattttacagtcaacgggtaaacagtacctctctatctgtatttctcttatatttgtgaatagaaatccatatgcagcatccgttaacattcatatgttggtttttcaggttgatgtttgatccatcggagaatgtagtgtatgactatatag

SEQ ID NO: 166804 - DNA, 3931 bp, Arabidopsis thaliana landsberg
tggaactactagccaaaagacacgaaccgaccaagcaaacgcctcggaccgataaacctcaacccagtgctctgaaccacaagaaaggtgcccaaggcgggacattcgttcaccatgaaggacgaaatttctccggagcccataattaccaagccgatacaccccgaggcgaagccgcccgaggccaagggcgaggccgctgtcgaggtcgcggtcaagaatcctacacttggacaaaggatcaacccgcaggaaacgagcaagaatattgcgagttgcataagagttacggccatcatacttccagatgtcgtagcctcggagcaaggttggctgcaaaattcctaaccggagaaattggttgaggtttgaccatcgaagatttagaagcagaaaaaggtaaaaccgagcaggtcaacgctgtggccaatcccgagcaggcagctcccacggcgaaccctgaaggacccaaaagaggccgaggtaatcgcaaaacagacgacgatgagccagaagctgctcggggaaggattttcacaattttaggggattcggctttctgtcaagacacggcggcatcaatcaaggcatatcaaaggagagccgacgcgaatcgtaactgggcgcggccatttaatggaccaaatgacaaagtaacctttcacgaaagcgataccaacggtttagaccgtccacacaacgatcccttagtcattacactgaccatcggtgatttcaacgtcgaacgagtcctagtcgacacgggaagcacactagacatcattttccttacaactctgcgagaaatgaagatcgacatgacgcaaatcgtgccaactccacgacctgtgctcgggttctcaaatgaaaccactatgactctcgggaccatcaaattgctagtccgagcaaaaggggtaacaaaaatcgtcgatttttctgttaccgaccagccgaccgtgtacaacgcgattatcggcaccccatggttaaatcaattccgagctgtcgcctcgacatatcatctctgcctgaaatttcccacaagcgacggcgtgaaaaccatctggggaaatcagaaaaatgctcgaatctgcttcatggcagcacacaagctcaggaaccccgtcactgaatcgacggccgacgcgaatcataagaaggccaagcttggccgagctgaaaagaagtcaatttccgagcagttatagcagctaaggatcgaggaggctcgggaatctacaacaccaactcccgatccggtagtcttaatctgccttgacgacgaaaagcccgagcgatgcgtagaaatcggaggagatctaggagaagaactaacagctgaactcactgccttcctcaaagaaaacgtcaatacattcgcctggtccccagaagatttacccggagtaagtgttgacatcgtatcgcacgagctcaacatcgatccgactttcaaacccatcaagcagaagaggaaaaaattgggtcgggagcgagcagaagccgtgaaagccgaggtagagaaattattgaggatcggatccatcaccgaggcgaaatgtcccgattggatcgcgaacccggtcgtagtaaaaaagaaaaacggcaaatggagagtctgcatagatttcacagaccttaacaaagcctgcccgaaagacagcttcccattaccacacatcgatcgcctcgtagaatcaacttctggaaacaagctactgtcattcatggacgcttttgctggttactaccagatcatcatgaaccccgaagatcaagaaaaaccgctttttacacagaacaaggcatcttttgttaccgagtgatgcccttcggactcaaaaacgtcggggcaacctatcaacgcttcgtcaacaaaatctttgcattacagatcgggaagacaatggaagtttacatcgacgacatgttagtgaaatctatggctgagaaagatcacatactccatttacgcgaatgtttcaagcagcttaacctatacaacgtcaaactcaatcctgcaaagtgccgcttcagagtaagatccggagagttcctcgggtacctagtcacgcaccgcggcatcaaggcaaattcgaagcaaatcgaggcatggttgggaatggcgttaccttagaacaagcgagaagtgcagcgcctaaccggaagagttgcggcccttaaccgttttaactctcgttcaaccgacaaatgcttggccttttacgatgtgcttcggggaaacaagaagttcgaatggacgacccggtgcgaagaagcttttcaggaactcaagaagtatctggcaacaccacccatcctcgcaaaacccgtaatcggagaaccactatacttgtatgttgccgtatcggatactgcagtcagcggagtgttagtccgagaagacaaagatgaacagaaaccgattttttacgtctcgcaaacattcaccggcgcggaatctcgctacccgcaaatggagaaactcgccttagcagtcataatgtcggctcggaaactgcgaccctactttcagtcccattccatcatagtaatgggatccatgccgctccgcgctatcttacacagtccaagccaatcaggacgcctagctaaatggacaatcgagctcagcgaatatgacatcgagtatcggaacaaaacatgtgcaaaatcccaggttcagccgattttatcgtcgaactgcccactaaggaggcctgggaaaatccactcaataccacctggctattgcacgtagacggctcgtcatcaaagcaaggttcgggtgtaggcatccgcctcacttcgccaacaggagaggttctcgagcaatcattcagactaaacttcgaggccaccaacaacgtggcgtaatacgaagcgcttaagttagcttgggggctgaagatctcaaaaatccgggctttttacgattttcagctcgtcgcgaatcagttcaacggtgagtacatagctcgggatgaacaaatagaagcttatatagctcatgtacaaaatcaagcgaagcaattcgacgagtttgagttaaccagaattcccagaggagaaaacacggcggccgacgccctagctgctctggcctccacatccgacctgaacctgaggagggtgatcccagtcgaattaatcgaaaagcctagcatcgagctcgacaaagaggaacatgcttttcccgtgcagagtgccgcgaattgcgaagatgccttcgaagtcgaatgacgtctcagacttggattgtgattcagaatggatggaacccatcataagctatatatccgaggggaaattgccttgggataaatggaaagctcgttaactcaaagctcaggctgcacgtttcgtcttaatagggaaaaaactttacaagtggctattatccgaacctttgatgacctgcgtggaaggagaagcgactcgcaagatcatgaaggaaattcacggcggttcgtgcggaaaccattctaggggaagggctttagccatcaaaataaaacgccacggattcttctggccaacgatgatcaaggattgcgaaaaaatttcaaaacgatgtgaaaaatgtcaaaggcacgcgccgacaatccatcaaccagccgagctcttgtcatcaatctcctcgccatatctcttcatgcgatggtcaatggatataattggaccaatgcatccttcgaagcaaaaaaaagttagtcctcgttctaaccgactatttctctaaatggatagaagccgaatcttacgccagcataaaggacgctcaagttgagaactttgtgtggaaacatattttatgtcgccacgggataccgtatgagattgtcacagataacggctcgcaatttatatcgacccgtttccaaggcttctgtgataaatggggaattcgacttagcaaatcaacacc

SEQ ID NO: 166805 - DNA, 1114 bp, Arabidopsis thaliana landsberg
atggttgctaatacagagagagatcacgaagaaggtcatattcgattatgcaacgattacttttcggaagaccccgtttaccatgatcgcttgtttcgtcgacgctttcgaatgacgaggccattgttccttcgtattgttcaaagtctttctcaatttctatatttcgaacaaagggacgatgctactcggaaacaaggtctatccgccctacagaaatgtactgccgcaattaggcgtctgacatatggtcttgcaaacgatgcgatggacgcatacctccgcatggacgcaaccactgtgagtcaagcactagagaactttgtagatggcataataaatttattccaagatgaatatttgaggcggcctacacgtgagggtctagaacggttacttcattctggaaaggaacgcggatttccgggaatggtaggaaacattgactgtatgcattaggagtgaaagaattgtcctacaacttggaaagggcagtattcacgcggacatgaaaaacccactatcgttttagaggctgtgacatcacaagatctatggatttgacatgcttttttggggattccaaatacgtgtaatgatataaataattttgaccgctcaccggtggttgatgatatattagaagttcgagctccacgactcaggtatgaagtcaatggacatcaaacaaaatgagttattacctcacagatgatatatatccgaagtgggcaacattcacccaatcaattacccgtccacaagaactgaaagcatcattatttgctacttgtcaagaagaagtgagaaaagatgtcgaacgtgcttttggagtcttgcaggctcagtttgctattattcgaaatttatgtctgttttgggataaagagcgaatgggcaagataatgagagcatgtatcacattgcacgatatgattatagaagatgaacgagacgaaaatactcagtttgatttatctgatttcgtagaaagcgaagaaagcgggacttctcaagtagataactatttttctacagagacaactacaaatgtgaacaatttgatggcctatcgagccccaatacgtaatgaacaaatacatcgaaaatcaaa

SEQ ID NO: 166806 - DNA, 453 bp, Arabidopsis thaliana landsberg
ctctcctctctctctttgagttgcgactatgtccggcgaaaactggattcgagtggccatgtctgacgattccatggtggcggaggcgcttcttcggctccgccactccgaaccgaagaatagcgtcgacgcgtcccctctcaagctgaaatggagcgtgcgtcaacggagatcgaagaaaggagaccagacgcgagcaagccccaccacaccgctttcctggagcggtgccacgtctcttagcggcggaggcggcagcggtggaagcggcgccggtgctaccaccatggaaggcctcgaggagtctagcgccgccgtaaaaccctctgagccatttagatctaaggtttggccgatcatttcactcatttttttgtttatccgatttgaaactccgcgacgggcatatctcgtaagtcttgtttttgctatagccctcgtgatgcggcgttt

SEQ ID NO: 166807 - DNA, 3775 bp, Arabidopsis thaliana landsberg
  unsure (1)..(3775): unsure at all n locations
atgtgggaacaaaggatcaaagaggagtcaattcctgtatgtgacagatttcattgcccaaatccaaggtgctgggctttgatgtcgaagacggagctcactgaatctactgaagaagatggagttaggagatgttgctataaatgccgcaaacacttttgtattaactgcaaagttccgtggcatagtaacttgtcgtgcaaggaacacaagagttccggtcgtgagcctattacaatagtgtggcgtcaatgtagaagttgcctacacaagataaaactatcggaagaacgcatgcctgtaacttgcaggtattatctataatcaaattctatagtcattatgatttccgaatcctatttggaattggattatgttttgggctactgtaatgttcgtggttgatgtgtaggtgtggctataagttttgctatgcatgcggagctcaatggaagcaaggaggttgctctcatcgagcaatgatgcatacaacgtatactattttagtttttgttctcattttaaataattgttttcttcttgttagaataataaaataacctgtttgttggttgttcatgttgctaaattttctactttgcttaatacatatgacacacaattccaaatgaaaaaaaaccccaccttttttagtttttttcttcaacgattctatatgaaagcgttatgtagtaaattatcaagtcgtcaaagtaacttgttatttttcttctccttttttttatttgtcgtttggaatttatatgagatttgtagcatcataaatgcagaaattaatagcaaagtaatgagaatctgtagataatagatgtaaatcttcgaaaaagaagaaaaccaatcaatactaaccaaaaacggttgcaaatattactaatttcggagaatatattatcagcttctcaagtacggctacaatattctctcctttttcctatatatattcactcattaacattcccataaatcttgggaactaaagataaaacagtcatggatagagatgaagtaggcactatcagtgaagaagctaagagatcagaaagttcgattgaggaagaagaagtacaatcgacaaaaggtaaagtaaacctaactcaggaagaagacaaaagagctttggacacaactccaagcccaatacagaagacaaggcccaaagacatggtttggaagcccaaggtaaaacaagagcccatcttgatccaaaaggagcaacggtcatctgcaaaagaagaagacaaaagtgatgagctggtgattaaggaagcttcaaggaagatgctcaatagctccagctgtctcagtcaagaccttatcttgacaaataggttcaagtgtttagaggggttaacctaatcctctatgactatataagagaggctattgtaatcgaaaacagtaagagagtaataagatgaagaacacttcaatctccttcatactttacctttaaatctctctacttttatggtatcagagccatggttaatcaatccatggatctatattcatatcctgcattaaacatcacaaactgtgttactctaaagctcactcagaaaaattacatatcatggaaatcacagtttgagtcattcttatctggtcaagatctgcttgggttcgtgaatggttcaactcctgctccattagctactctgcaaatcccacaagttggaggaggtcaagctctatcagttccaaatccagactataacgagtggttcagggcagaccagattattcgggcatggctactaggctccttatctgaagacatccttgcagaagtcacaggcactacaactgccaaagatctctgggttgctcttgccaaacatttcaataaggtatcttcttctagattggttgaactacaaagtaaacttcaaacggcagaaaagttcgatagacctatggatgagtacctaagagatattaagagtatatgcgaacagttagcttctatagggagtccagttcctgaaaaaatgaagatatttgctgtgttaaagggtctaggaagagagtatgaacctatcaaagttacattgaaaggaatgatagatatgtatcctggtccaactcttgagaaggtatcttctaggcttaaaagtttctctgtcagacttgctaggtacaatgtgggtatggaagtttcaccccacctggctttctatgcaaattgctctggtaaagggaaaggtaatcagtatggcattcctggtggaaatcagggaaagagtgggaattactcaacaaaaggcaggggttttcctcaacaaatctcttcaagtacttcaggttcctacaacaacacagagaatcgagttgtgtgtcagatctgtgggaagccaggacatccagctttgaagtgttggcacagattcaataacagctatcagtatgaagagttacctgctgccttgactgcaatgagaatcacggatgtgacagaccataatgggaacaaatgggttggtgacagtggagcgacagcacatgttacaaactctactcacaacctgcagcaatcacagccatatggaggatcagattcagtcatggttggaaatggagattttctacctatcactcacactggatcaactactctaccaggaagctcaggtaaattacctcttaaagatgttttggtttgccctaacattggaaaatctctattgtctgtttcgaaacttaccagggattatccatgctccattgattttgactctgattatgtccgtgtcactgataaggcaacaaagaggcttctggctcagggaaacaacagtaatggcttgtatattctgaaggattcaccagtgcatgccttttattgctcttgtcaacagactgcctctgaagacatttggcatatgagactaggacatccaaaccaagaaattcttcagtatctgcacaagaataaatctgttaacatcaacaaaannnnnnnnnnnnnnnnnnnnnnntgtcagtttggtaaaagcacaagattacctttttcaagctcttgttctactacttcaaggcctcttcaaaagatacattgtgatctatggggtcctgcaccagtaaagtcagtacaaggcttcagtttttatgttatctttgtagacaactactccagattctgttggttctatccattaaagcacaaatcagatttttgttcaatcttcatgaagttttagagttttgttgaaaatctcttgcaaacaaaaattggaacttttcagagtgatggagcaggagaattcacaagtaataggttcttacaacatcttcaagaatctggtatacaacattatatctcttgccctcacacaccacaacagaatggtttggcagaaagaaagcatcgacaacttacagaaaggggtcttacattaatgtttcaaagcaaagcaccacagagattttgggttgaagcattctttactgccaacttcctcagcaatcttcttccaacatcagctcttgacagctctactacaccttatcaggttctatttggaaaagcacatgactactctgccttgagaacattcgaatgtgcctgcttccccacactccgtgcatatgctcgtaataagttcgatctgaggtctctcaagtgcatttttctaggttatacagaaaaatacaagggttatcgctgcgtctatactgacactatccgagtatatctcagtcgccatgtctaatttgatgagagctcctttccgttcattgatacttacaccag

SEQ ID NO: 166808 - DNA, 1509 bp, Arabidopsis thaliana landsberg
  unsure (1)..(1509): unsure at all n locations
agatataaccttatcatagttgtttctgttttcgtattaccatctgatttatttgttcttttagaaaagacacatatgtaattgcgagtctgctgcatgagaatcttgaacttctttaagtactggattaaggatannnnnnnnnnnnnnnnnnnnnnnaatgtattgttaataaatggaccaatcccataaccctggtgttagtcgaatattgagagtagcgtttcttatacaatgcttacattattagcggctgttggtgattgttttgttgatttgcagcagtcctgaatttttgtgttaacacgtgagtttgtttatttttcatttaagacagaatgccagtaattcttggtgataaggattcaatcgacacatggttagatgatccctcgacgacgaaactgcagcctttactttcaccatatgaaaaaccagatttggtatgctttttacttagttccttgcatataagagtggtctttcctttttcacatacttgagattgaagcttgaactttcaggtatggtatccagtaacctctgcaattggtaaaccaacgtttgatggaccagagtgtattcaacaggtccggttaaccacattccctttgttagtagtgtacaactcaaatctcaagttgcatctcaagtcgcattaaacatattgtcaggattactatgtatttgtacagtctgtatatgcttattgtcatttcaaataaggattatgccacctgcagataccgcgaaagacttcacaaaatagcttgatctcgaagtttttctcaacaaagctgcccaaaacagatgaaggagacaaagaaaccaaatcaacagatgcaaatatcacagttgatttgaaagaggaacctacggctgaaaaggacacattttctgacagcattaagaaaattgaagaactagacagggtataatgatatatcgaatgtagccaaaaatctggagtttcaagagtgtttgaaaacagaaccatttgttgaagataactcagcagttgcgccactccccaagcctgtaaagaatgaagttgaggaggttacaaaggaagaaggcaaaaccctaaagactggtcttactaaagaaacaggtgagagtaatgccagcataccggctgagccctacaaccttgatctccaaagaatctcaaaagaagaacccgagactcaaagccatcatttctttactacagatgagagattgaatcagccgcatgaggctgtcgaagatattccaggaaatgaaaaccagaagacagttttaactagcccgacgacgaaggaaggtggcttagtgtttagcgaaaagagtgggacaaagcgagactatgaggtattctcagctcaagaaaagccacagaaacactatgagaggttgcaaaatgttaaaagcagtgggaaacaaggaaagatgcatggaatggggaaatctaacatcaagaaatctaaggagacgcagnctacattacatttctttttcgatgagaaa

SEQ ID NO: 166809 - DNA, 1153 bp, Arabidopsis thaliana landsberg
taccataaggtgagcggcttggataatgccaagcagatttagggacaccctcaaaatctcacatgaggggaacgacatcaccatgctcaccaagatggagttggtggagggcgaacttgggagattcgcaatgatcaggggcgaggagccaacccaaacgtacaaccggctcaagaccctcgtcaacaaaataaggagctatggaagcacgcgatggacggaccacgacgtcgtccgcctaatgctaaggtcttttactgtccttgatccacatcttgtgaacaatattcgtgagaatcctaggtacaccaagatgacgcccgaggatatacttggaaagtttgtaagcgggcggatgatgatcaaggaggcaagatatgttgacgatgcgttgaacggcccaatccacgagcctcaaaccgttgctctcaaagcaacgaggagcaaggaagtgctacctagcaaggtggcacaagttgaggcagcgggactcaatgaggaagagatggcctcatcattaagcgtttcaagacggcgctaaggggtcgcaaggagcatccaacaagaccaagacgaaggggaagcgctcctgcttcaaatgtggtaagattggtcattttatcgctaattgccccgataatgatagtgaccaggacaagaagagtggaaagtgggaaaagaagaagaactataagaaggcaaagggcgaggcacatcttggaaaggagtgggattcggattgctcctcgtccgactccgacaacgaaggactcgccgccactgccttcaacaaatcattcctcttcccaaacgagcatcacacatgcctcatggcaaaggagaagaaggtatgtactcgaaataatactactttttttcaagtgaggatgagtctagtgatgatgatgaaatagactattcatgtttattcaagggcctagatagaactaaggttgataagattaatgaattaattgatgccttgaatgataagaataggttgttagaaaagcaagaggatcttttgtatgaagagcatgataaatttgtagaggcacaaaattctcttgcattagaaattaaaaggaatgaaatgctttcttgtgaactgtctacatgccatgactctatttctagcttaaagagcataaat

SEQ ID NO: 166810 - DNA, 470 bp, Arabidopsis thaliana landsberg
atgacccgcagcgtgcgcgtgatgagcgcccagcgtcatgtgatcgagctggtgccgctgttctcggaagatgggcatcaccacatccccatcattgacgaagagcagcggctggtcggtatcatcacgcagtccgatctggttcgcgcgctgtaccgcgccgtgaaaccggacgcctgaacggagtttccgacatgtccgaaaccgaacgttaccttcagcaagcgatcgaactcgcgcgcagcaatatgcgcagcggcggccggccctttggcgccgtcgtggtcaaggatgacaaggtggtttccactggcgtcaacgaaatcctcaacagcaaggacccgaccgcacatgccgagatgatggcaatccgcgccgccagccagacgctggactcggccaacctgagcggtctgcgccgctacgccagcgtccatccttgccccatgttcatggcggcgatgcgcttt

SEQ ID NO: 166811 - DNA, 706 bp, Arabidopsis thaliana landsberg
agcatctgtaactctttttattacctctggatttagtgtttaggattttaagcaattttgagtgtgtttgagtcatatgttaggtgcgtcaaggatcttgttttagactagtgtagcttgtgaatggatccattacctttgttatgtgcaaagatcttgaaaacatctgatatgtaaaatctttgattctgtgacattttttagcattcattctcaagcatatgtagagttaaacaatgtggacttttcgtgtctatgttcttacacctggaagatttggttgcagctatctaatagcaccaatgggattgcaagtcatatggagtattggtcttgcaatactagacacattcgcattagtgagaaagaaaacgcttcttagtccagttttagtcagcctctttgtagttggagattgggtaagactagaccctctctctttctctctagtataatgacacaagaatcatcaaaatcttaaaaccatcttgttctgtcttctccggtttaggtaacatcgacattgtcactagcgggagcatcgtcttccgcggacataacggttttatactttggagatttagaaagctgcagtttcgaagcagagtgttggaagtaccaactctctgtagctttagccttcctttgttggatcactatcgccatttcttcacttactacactttggttacttgcttcagcgtaa

SEQ ID NO: 166812 - DNA, 3311 bp, Arabidopsis thaliana landsberg
atgttaatcataattttagaatgaccacctttatagattatgtatgaaattgttttatttgtgctactttcatgtttacttctgtctacagataggtcagaggaattcgatgatcatatatttgactgtagtagtcaagaagagtatgagttagacaaagattcaccgaccgatgaagttgttggaccaaataatatgattgacatgaatgatttgttaagaaggaatttaaacaaggagtttgctgcagcagcttcgaacaaagaacatggcagttcaacaactagcggtgataattttaaaacatatattatatatattagaaacaatgaaaaacaacatgtattgatgtttgttcgattcaagttatcatgacgaaggtgatgcgaatcacacatgtgtgcattgtggtgcaattttctggtatggtgaaagactaaatagaagaaggaggagtagcaatccggtttatacaggatgttgtatgcaaggacagattgttctacctatgttaaaagaatcacctgaatatatgtggtggttgcttacaggcgaccatgaagatgctaaaaattttagagcaaatatcagaccatacaacatgttgttttcattcacgtctattgggggcaaggtagatcgctaagtaagaaagggacgtggtccatctatgtttgctctacaaagagaaaactatcacttgataggcgcgttgaaaccaaaatctggcgattatgcaaaatttcaacagttttatatcatggacactgataataaatttgaccatcgaattgaagttatgaggtaagtgatagttttataaataaactttatgaaaaaaatttattttagaagcagctaatacattgtatttattaaatgtcttttgtaattatacaaaattgcagcaaaggtaataatggtggaatggaaggtgggaaacaaaagttcaagaaagaaacagtttcagctttgctaaagatgttggaaaatataaaccctcatgttgcaaatttaggattgcccgtgatagattcaacatagagaaagaaaagacaaattttcatatgaggattatatctaaccgcgagacagatggaagctgaagttgctgcattgatacctggagatttcgacgacaatctagataaaagagatatagttctacaaatgaagtctggaaagttaaggaaaatacatgaatgtcacgtttcatatctagctcttcagtatccattgttatttccaaaaggagaggatgggtataggcttggaataaaaaaaactcctaccaaaacttcaaaaggaaagaagaagcaggaagatgttagtatgaggcagtggtttgactaccgtttacaagcgagaaaagatgagaagcacatcctccttcgctcaaagcgtttacttcaacaattcatggttgacgcttttaccatgatagagtctaatcggttaaggtatataaaaaaaaatcaaacgaagttgcgcagtaccaacaagcaggcagttcaagatgcttctgattctggaaataatgatttttctaataaaggaaaaagttgtatcattcctccatctttctctggtggtccaacttatatgcaacataactacttagatgcaatgacgacctgtaaaaattttggctttctcgacctgtttataaccttcacatttaatcctaagtggcgagagatcacaagatttgttaaagagcgaaatttgaatgctgaggacatgtcggatatcatttgtaggatttataaatgaaactcgacaacttgatggatgatctaacaaaaaatcatctctttggaaaaaccaaatcaggtacgaaatgatttcatgttttttaaacatatatttcatgaattttaatttacaagtgacattaactcataattgttatgttgaacaactatgtatacagtaggatttcaaaaaagaggtcttccacatgctcacatcattctttggatggatcctagatacaagtttcctacagttgatgacgttgacaagattatctttgccgaaattctagataaagtaaaagattcagagctatatcaagttgtgtcggaatgtatgattcatggaccatgcagattggttaatcctcattcgccatgcatggaaaatggtaaatgttccaagtattatccaaagaaccatgttgagaacacgtctcttgacaatgaaggttatccaatatataggcgcagagatactggtcgtttcatcgagaagaataagtatcaatgtgacaaccggtatgttgttccatataacgctgtcctattacggaaatacagggctcacatcaatgtatagtggtgtaaccaatccgtctctgttaaatacttattcaagtatgttaacaagggacctgatcgtgtaaccgtctcagtagagcctcatcgaaaagaagttgtctccgagcaaaacaatgtaggagaaacaattaatgatccacaagaacgaaatcaagttcaggattattttgattgtaggtacttttcattattttatttcattttatcttaaacattcttaagagactatttgaaatataaaacttaatgaaaaataactcaaatgtcgttttacagatacgtaactgcatgtgaggattgtggaggattagagggtatcctatacattatcgacaaacatcagtaactaaacttacgttccatgaaaaaggcaagcaacctatttatgtcaaggaaggtgagactgctgaatctgttttgtatagagtgaacaatgataaaactcagtttactgcatggtttgagcttaataagcgtgatccggaagcagcaaatcttttatatgaacaaagacctaatttctatacgtggaatggtaaagataaggattttcgcagaagaaaaatatcaggttttgctgttggtagaataaatcatgtacctccaaagatagatgatgcatatcaccttcgcatccttattaacaacataagaggttcaatcaaaaccgtcgagggtgttgttcataaaacatacagagatgcatgctatgctctaggtttgcttgatgatgataaggaatatatcatcggtattgaagaggctaatttttggtgttctcctaagtatgttcgcaagttgtttgttattatgcttattttcgaaagcttgagttccccagctgttgtatgggaacacacatggaagatactgtctgaagattttcagaggaaagtaaaagataagttaaaacgtccaggttagttaaattatttttaggaatgttatatacgtatttaaaaatgatatttt

SEQ ID NO: 166813 - DNA, 3842 bp, Arabidopsis thaliana landsberg
ctcctatcaaccggcaggatgcctttttacaggcacctacgaacactctcgtcaaaaactcggcaacaggaaacgagataagcacaacgcctgccttcccaaggctatcggtcccacctttactaccgatgggctattcgcccctaggtacacgtggacgagaaaccaaacaaccgcatctagttctcgcgttcccgggaactcaacgcaacaacggacctctatcgcttatccgccatccattccccggataccaggaagtgacctccttaacagtccaaccgatcccaaagcaccggtcgatacgcgtaacgtcgtggatatggatacattccgcaatcacgcagctcaaacaaatgcaaacatggctcaaatgcattcacgaatgcatctagcagtgagcgatgctcccgtcatagatcgcgtcatcgaagaaactaggcgcaccccattcacggataggatcgctcgatttcgcatccgagacctcgggagactccgtttcccggagtacgacggatcgctccattgataccttcgatcagctcgccgccgctttcttaaaatagtgttcggtacttatcgaacagaggacgtctgaggccgacctctggagtctcactcaacttcaaaacaaatccctgcgatcttacgtcgaaaaattcaaagcaattaattcgaagattgcgaacctaaacgaggaggtagccatagcagcccttcgtaacggtccgtggttttcctctagattccgtgaggaactcactgttaggcaaacagtctctttagacgatgcccttcacaaagctctccacttcgccaaaggcgaagaggagctcgctgtgctggccttaaggttcaaagaatctaaaacgcaaaatgctcctcttgcaattaaaacccccttcaaaaaggaaaaccaaacgcaagggcagcataccttattcgcaatagaagaggcagctgaggacgagagtccagaacttgacctcggaaaatattgcaagtaccacaacaaaagaggacattccaccgaggtaaccttacacgaactcaacgtcgatccgacctaccgacctataaagcagaaacgtcgcaagctaggtcccgaaagggctaaagctgtgcacgatgagatcgatcgtttgttcaagatcggatcgataagagacgtaaaataccctgactggctcgccaacccggacctcgttaaaaacaaaaccgggaagtggagagtatgcatcgactttatggacctgaataaggcatgtcctaaagacagtttcccactaccacatattgaccgactggtcaaaggcaccgcgggacacgaactattgtccttcatggatgcattctgtgggtataaccaaatactcatgcgtccagatgaccacaaaaaatggctttcatcaccgatcaaggcacttacttctacaaagtaatgcctttcggtttgaaaaatgatggtgctacctaccaacgcttagtgaacagaatgttcgccgaccaactcggaaaaacaatggaagtttacatcgacgatatgctggttaagtctgcccatgaaaagaaccatgtctcgcaactaagagaatgtttcaaaatcctaaacaaatttgaaatgaaactaaatcccgagaaatgatctttcttggtcccgtcaggagaattccttggctacctggtaaccaaaagaggtatcgaagccaaattaaagcagattgccgccttcattgaaatgccatcacccaatacaacaatagaggtcaacgactaactggtcgtatcgccgcctcaacaggttcatatctagatccaccgataaatgcctcccgtactatcaactcttttgaaaggacaaaaaggtcgattggaacgaggattgccagttttccttcaagcaattgaatgtatacctagccgaaccacccatacttgcaaaacccgaagaaggagaaccaatgtacctgtacacaacggtttcttgaaccgcaataagtggtgtcctggtacgagaggactacgaaggacaaaaaccaatctattatgtgagtaaaacactagtaaacgccaaaacccgttatccaacaatagaaaattggcactagctgtcattatgtcagctcgtaaacaaagactgtacttccaattgcaccccatagtggtgatgacatcccaaccaatccaaaccattttgcaccatcccactcaatcaggaggtctcgctaaatgggccatagaactgagcgaatacgatatagagtatcgtaccaggactagcttgaaagcgcatgtcctggccgacttcgtaatcaagctcctgttagcaaacttggatggaaccaacatcaataagaaatggctcctccacgtcgacggctcctccaaccgacaaggaccgaagtaggaatacaactcacctcccccactggggaagtcatcgaacaatcgttccgacttggattcaacgcattgaacaacgaatcagaatatgaagccctcctctctggcataaagctagctcaaggaatggggatccgtgaatacgaggctaaagacgaatgcatggaagcgtacctcgaacttgtcaaaacgctgtccaaacaattcgaatcgttcgagctgactaggatccctaggggagagatctcacttccacttcagatccttttgtcaaacaaataatcacagtcgaaagaatagaacacccgagcgttaacttaacggttaaacacgctgggacagaacctcggcaacgtgcaattttacacagcgtttccggcccttacatggtatgcacctagatgcagaagataaagacctcatgaagagcatgcacgagggacagtttggtaggcactgcagtggacgaaccctcgccctcagaatcaagaagcaaggttacttatagccgacaatgctagccgattgcataactcactcactcaaatgcgataagtgccaatgccacgcacctaccctacaccaagaacccaaggaaatgtcgtcaatctcgtctccctacccattcatgaagtggtccaaggatgtcgtaggacccatggaagcttccgggggaaaaaagagactaaaattcctactggtcttcactgactactctaccaaatggattgaggccaaagcctaccaacaagtaaccgagaaacatgtcaaggtttttttgatggaaaatatcgtatgccggcacagtatattgtacaaaatcgtcaccgataacggactaacctcacctcgggaaaaatcaaagcattttgcgacaagtggaagatccgtcttaccatatccacccccgttacccacaaggtaacggacaggcagaagccgccaacaaagttatacttagcaacatcaagaaaagacttgattcaaaaaaatcaatgtggtccgacgtgctccacggagttctctgggcctaccgaaccacacctcgcaaatcaacgcaagaaacactgttctcccttacttatggtttagaagcagtaatccctgtcgaaaccatggtaccaagcgtgagaagaaccgcctgtcctgctaacccggacctgaagacgcaaatattacaggacaacatggacttcatcgatgaacgcagagatcaggcaattatccgagttcaaaactatcaacaagctgccgcccgctactataactccaatatcaaaattcggagattcgaagtgggagagcttgttttacgaaaagtgttcagcaacacgagagagctaaacgacggcgtttataagctcgtaaaagttatcaacggagtacctgagttacggccttggaatgccattcatctcaagaaataccacgaatag

SEQ ID NO: 166814 - DNA, 513 bp, Arabidopsis thaliana landsberg
cagccccccagcgcgttggtgaccggcgcgtcccgcggcatcgtccgggcgatcgccgggcgactggccgccgcgggctacgcgctgacgctcagcgcgcggcgggcggaccggctcgatgaggtggcgcgggccctggcggggaccgcggccgccacggacgtcgtgcccgcggacatgactgccgaacaggacgtccatcgcctcgcgcaccgccacgcggagcggttcggctccctggacctgctggtgctgtgcgcgggatccggtaccagcggccctatcgccggctatcccctccaccgcttcgaccgtcaggtcggggtcaacctgcgcgccccgttcatcctggtccaggactgcctgcccagcctgcgccaggccgcggcgagccacccggcgcgcggcgcgcggatcgtggccatcgcctcgctcaccggggtggcagccgagcccggcctggccgcctacggtgcggccaaggccgcgctcatctccctgtacagtcggtca

SEQ ID NO: 166815 - DNA, 681 bp, Arabidopsis thaliana landsberg
aacgacaacctcaaagaagatccaactataaaagtgagagatttacgctttgttttactccgtcaacgttatcaatatcatgtgtatgggatatgcgatggtaacttcttcatggaagactttgatgtaggaggcatggtttagaacccgttgttgagaacgactaaattgattgcaaaggatgagcaaatatgtggcaagagcatgggttacgatggtactaaacccgaaaagagttacaagattattggacggtgctttactaatgcgatctatagagttgcagtcttggaacttgcaaccaacgcgtggaaggttactcattgtcccagatctcacgaagagttaggatcacacgacggtagttctagtgtctccctgaatggaaatttgtattggacaggttacaaatatcccgacactggtcagtgtttcatcgaaatgctcgatctttcgaaagaggtaataaagatcttttgtattctaccgtgtaaggcgaataaaagtacttccaatactcgtatcctctcgatttacaagggagataggttttcagtgttacaacaaagcaaaagaacaggcgagattaacatttgggtgacagagaaggaaattggtaacggggataatggagacgatgtggtgtggattaagttcatgactgtctcaagacctgacttc

SEQ ID NO: 166816 - DNA, 7465 bp, Arabidopsis thaliana landsberg
atgggtaaacgtaagtagaagtttctaacacgggccggccagcaatggacattagttttgatggaccaagacaggccggtccgctaggaccgcgagcaaagaaactatgtccaagcatgtcccggtaagtccgacgagtttgcggactgacccgtggactagttttatatttaaaataaaactataaatacattttacatactaatttaaaatattttataaatagttttgtaaatattaaaattttaaaattgaatgttttcacatttttacatattttaaatattataatttcataattaatgaaaaatatttatgtttgcaaattatttatttattttattaaccatttatatattacatttatatagtccgaggaccgacccgcaaatcatttttattaaaacatttatagtcttacaaatgatttagaaatgtttcattaattgatctttcataagataaaaaccataatgatgagagtttaaatacacaacctaaagattaaaatgacattgcaattataattaattaatcagatagaagcctctcctacaagtagagtctttcctgtttttctcattcgtcaacacttagtgtaaaacatgactccataacttagatgcactatttaatttgagcttaaaacataaaccaatgatgaggcccaccctggccggataatctcattcctggttggatcttcattccatcactattactacattattatgttgctactgctacaaaaattctgtcgccgcatctattaattccgccgtacacacttaaactgtcacaaatggtagctacttattactcagttataaactcgaaaatggtaaccaagggttcttgccggcgattcaccccagaactcgatttgcatcttattcttcttctccatcgggaacaaaacaatgtcagctagtcagagcttaaaatctgatgccaacaacaacaagatgagtttcgggcagggaagttatggacattcgagctggggtctgtgagagtccaaacttgcacaatcgaaattgtatttagagtttcttcaaagaacagatctttgcaagactctcaaagaacaacagaattatttgattaccgcggacggtgttctagatattattgttgaaaagatgatgatatgatcgtacaagtgttttgagaaatagaaaataagtgttttgccttcaaagttagagcgtattgatagcctgaagttgagagcgtttttgtgtgtgtccttctctgggtttcttgaggcgctttatataagattttgatagaccgccctcgcgatattctcggaagattttcatttatctgtaagtcggcaacggaggatctttgctaaatggagattttccttattcttcgtgggcttcaagaaaacttccggatttgatgatatcctccaagattcttcattatcatctcttaagaatttcatttgaagttccgaaggaaaaaattcgaggtttgctttctctcctctgatcttcatttcctttatattttttttttccggcgaagctccgtcgtctcttaggtttgttttgattttcccggttagaaatttatgttttcggctttcgtctcgtcaaaactcctgcgccgatcatgagtctctctgattctactgactccatgcaccgagatgacctcccttcgatccataaaaggagaatggtttggagctcttctgaagatgccgagccgagttcaagtcaccagggtgatgcggcttcgtcgtctaatgcgcctgaagagccgagccctttcatggcccgggaagacactgctgctgatatagctcgggaactcgatcatctagaggatcacgagccatctcttgttcgaaggcttcgtgttccaattgctgacgagtctggaacgtccaattgatgggatgtgcccgaacctttcttccctcaggtgaaggtcgaggatgatcttttcttcaggccgaacgaggctgagggcatctttcaggtggccgagcggattgcgatgtgcaaagctgacaaagggaaaaagaaaaagaaaaagaaaaagaaaaagaaacaggttatgcccgacccgcctggttcaactctttgcaccgagcagtcgcttcgggatctggcttctcggtttcacttcggcgaagatgttatcctgcgtcttccgaccccgagcaaaagagtcgataaccctccggagggtttcttcgccctcaacgagaggtttttctaccattgtttcctctggttcccaatcccaaggttgattttggaatacgtgacttcctaccagatcgcgctttcccagatcactactcgttcactaaggtatctcgtcaggattatagtgcgaaactacgagacgtggaatgagatcacgctcacacacttgagaaactatttggagatttgccgagttcccaagtcggtggtggatagatactacatttccccggcgaaggatcagaaaatcatctaggagtttcctagcaaggacgagccctattcttctttgtggctctcgacgatgtcagcgttccttaagatctagtcgggaagattttgacgagatggggcattcttggtagttagacattggcgtctaacttgtttaagtgtttctttttgcagctcgttccattcgatttctcgagccgtgtcacgacgacatcgtttctattcacggagagctatctacttggcagtgcaattggctggatcacttttccagggttagagtcgaacgagccctaaagttaagctgcggtgtatcttgcacttctagttcgtagacttcggatcatcgattttctcccttcgtcgagatgtagtcaaccaaagttactctaagggaggtttccgcgaaaaagaaagaagataaggagaggcgtttggcagaggagaagcgtctcgccgaggcgggagtgatctcaccgcgggctcccccagacgcgattcaagacatggaagctattcccgaggtgacagtgccaactgcgtcggtgtctacgggttgatgagttttgtgatggtggtttgcaggcaattgacaagagcatgatcctaaagaaaatgtgagttcccgtgttttcaaacctcatctcctagtaaagatttttgttttccttgaggaaaagcaaagatctaagtcgggggagttgatatgttgtgtttttggtgtcttaagtcccttagttttgagtcgtttgccatgtcatagtccgtcttttgtgtattttcggttgtgtcttgagtcatttgcaggttttaggtgtttaagcgggacacatatgctttcgagacttgtcaggctcatttggaccagaaacaacaatagaaatgaatgttcagacccgccagctcgggatcgatcgatcccaggaggagaccgatcgatccaggtcgtctgccagatgaaggttcaaacccgccaggatgggatcgatcgatcccaaggccagaacgatcgatccaagtcgagaacaaatggagatttagacccgccagctcgggatcgatcgaccccaagggggaatcaatcgatccaaccctctcgacgaccagaccggttttccttaaccggaattatctgcctttttctgtaattgggtataaaaacccgagagacctaattttatttctactttttcttttacgcttctttttctgcaacatttctaagaaccattttttaagcacatttggattagagattcatccactttgacactttggagaagatttctgaaccttatctcatttatttaattggaattatgttttcttttgtgttgttcattttgctatgagtgagtagtctcttaattgggtgttagggttctaagtaggggattcaatgaattgatggtttgattgttgtttggagttcttaatctttaagttctttaattcacatgttcttaatgctagaataggattgatcaccatgttttagattctagatttttctatgcatcaaaagtgttcgatagaatgcccgaaccaatgtgatttgagcaatgtatttctagccaacgagagttgatgctagaatgcattgtgaacctaatgaacctaattgtaatgcgaacttgactaggaaattacatgcgaaagtttagtaatcgagtagtcaaatttagtgattaatgtcttgagagagaattagtctaaacttgtgttcatgttcgagaacggttctttatgctgaattccttgtttattatttctattaatcattgttctctgaaataccatattgcccaatgtctttaaatcttggaagttaaatcgtttaatttatttgcatttttattttacaatctgataactcaaacaaaaaccatctttccgctttagctaagaacgagtctcggaaatctttagagtatctttggtctttgtggatcgacctcgaatattctacttcggttaaatatttcgggtaattactcgagcaatcaagttggcggcgttgccggggaccaattgcgttacgtaaggatttaggattagtttctagtctaaagcattttttaatttactgttactgatatttattttcgtattttctctggtgttttcaggtgtatgacccgtagcaaaggctcatcacatctagtaaactaccacgaggatatcggaaggtttgaaaaagagaacaagaaaaggaagcagttagctgttcagagagaagctgagatggctaatgttgttgatgatgatggactccaatttgaaggagaacatcatggtgtgtttcaggatctaccacctcctgatggtggaaatgctgctaatgctgctgctgccaacgctgcccgtgcagctgctgctaatgctgctcttgcagctttgttgaatgctaggcctgcgcctgctcgacaaactctgagagatcatgatgctcctaatattgaatttttcagagacaggaaccaacagctccctatcaacaagaatgattttgagatcaagaccgggttgttagctcttgtgaaacagacatcagtttttcggtcttccctccgagaatcctatttatcatctggatagttttgaagatatttgcgggacaacgagaatgaatggagtgccagatgatcttatcaaatgcagattgtttatattctctttggcagacgaagcccaccgctggtttaaatcgatggattctgcaaatctgagaagttgagaagactacaaagctgcgtttttggggcagtatttcatgcagtccaggacagctctactgaggaataagatcagtagcttccaacaaggaagcacagaatcattccatgaagcttgggagaggtttaaggactactacagggagtgtcctcatcatggttttccacgggctacattgatcaacactttctatcggggagttgacaaggcctacaagatggcattagacactgctagcaatggggacttcatgaccaagactgagattgaggctacatagctaattgagaaccttgcagctagcaacagcaaccacaatgttgactatgacaggtccaatagaggtggaggaggagaatcaaaacagcttgctaaattgtcagctaaggttgagcaactactcaggagagatcagagggttgttaatttctgtgatgacactggggaagctcaggtgtaccaggagtttagtggcaatggtcggaaagataatcaggctgaattgaactacatcaacggtcagggcaactaccagaataggggattcaatccgaactacatgaaccatcataatctttcctacaggagtactaatgtagagaatctacaggatcaggtgtacccagcgcaaacaggatcacaaggtcagcagtttcagttcaagccttttgtacccggacatggaaatttcagcaataagtcattcgtgcctaagccacagacacagggcaatgggtataatcagggaggttttcagcaaaaacctcagtttaacaacttccagggaagttacaaggcacctccaggtgctaattctgcatcttcttcaggagacaatgagatgaagctcatgatgcagcaaattcttgagggacagaaaaagaatgctgcagatattaatgtcaaggttgataacatgtacagtgatcttcatgggaaattcgagtcactagcttaacatgttaagacacttgaacatcaagtagcttagacagcttttacttctacaagaccaatgggagttcttcctggaaagcctatcacgaacccgaaagactacaacaatggtaaggattatgttaatgctatctcactgagaagtggcaaagagctcaacccaatcctgaagaaggaaaaggttaaggccatttctgatgactcgggaaaggatgatgttgagaagaagatggatgatgaaccattagttgagaaagttgaagttgagaaaaaagtccctgagaaggagcaggatgagaccgttgtaccaccaccttatgtgccaaagctgccatttcccggccgtcagaggaaaattcagagagaaaaggagtatgctttgtttgatgagattatgaggcagctccaggttatgcttccttttctttgagttagttgagcatgtttctatttaccgaaaacatttgaagaacattttgactaacaaaaggacccttgaagaaggagctgtgttgatcagtcatgaatgtagcgctattctccagaatgtctatctttagtgacatgattaaggattttatggttgatttttctgtgcatggctcgtctttcgctacttgtttgtctaacttgtccagggtacttcggcgctgcgaggacaaacacttggtcttgaactgggagaaatgtcatttcatggtgagggatggtattgtgctcgggtacaagatttcagaaaagggtattgaggttgacagtgctaagattgatgtgatgatgagtatgcagtcgccaaattcagtgaaaggaatcaggagcttcttgggacacgcgggtttctacaagaggttcattaaagatttttccaagatcgctagaccactcactcagttgctgtgcaaggaacagaagtttgagtttgatgacagctgtttacaggcattcaatataatcaaggaatctctggtgagtgctcccattgtgcaaccaccagattgggaactgccttttgaggtgatgtgcgatgctagtgactatgctgtgggtgctgttttgagacaaaggaaagataaaaagttgcatgcaatttactatgctagtcgcactcttgatggagcacaagtgaattatgcaacaacagagaaggaacttcttgctattgtgtttgcttttgagaagtttagatcctatttgggtaggtctaaagtcattgttcacaccgaccatgccactttgagatacttgttgtctaagaaagatgccaagccgaagctgttgagaaggatacttttgctgcaagactttga

SEQ ID NO: 166817 - DNA, 799 bp, Arabidopsis thaliana landsberg
atgactctaataaatcgctcaaaaccatttgtacttctcgtaggcttctcaattatctcaagtttgctattatgggtctcacaagcttccgttgtttcatcaggagattttaacaaagacttctttgtgacatggtctcctacccacgttaacacctccaatgatggtcgatcaagaaccctgaaactcgatcaagaatctggtattttcatatatacgtgacgtccaaatgtcctcgttttatttttctgcatcaagaacttatgttttgataatattaggagcttctttttcttccatccagacgttcttgttcggccaaatagatatgaagatcaaacttatccctagaagttctcaaggtaccgtggttgcttattatgtaagaaactgtctctatctcttcatcttaacgggttgatgtgaatgaatctcataatttccaagatttatcagatgtcctcagatcagccaaaccgggatgagattgactttgaattcctcggaaacgttaatgggcagccttacattctccagacaaatgtctatgccgatggaattgataaccgcgaagaaaggatccatctctggttcgacccaaccaaggactttcacacttactctatcttgtggaacattcaccaaattgtgtaagattcttcaaccaaaaatctcttccattacatactccaagatgtataagaatgatattttggtggtttcagatttatggtggatcagattccaataacattgtatagaaaccacgcggatttaggcgtagcccacacaccattgc

SEQ ID NO: 166818 - DNA, 585 bp, Arabidopsis thaliana landsberg
  unsure (1)..(585): unsure at all n locations
ccgcgcagcgcgaacggcgctgggatccggcccgtgccaaggatacgccgcgcgatctgcagggtcatacggtggtgattgtcggcctcggtaccattggtgcgacagtggcgcggctatgccaaacgctggacatgaaggtgatcggcatgcgccgcagtccgaaacgcgacggcnnnnnnnnnnnnnnnnnnnnnnnnnnnnnnnnnnnnnnntcacagcagccacagtccgactggctggtgctggcctgcccgtatacgaaggagacccatcagttggtcaatgccaaaccactggcgctgatgcccagacacgcgcacctgatcaacgtcgcgcgcggctcggtgtgcgagcagaaagcgctgatcgccgcgttgcaaagcaagcagatcgccggtgcctatctccacgtgttcgaaaaggaaccgctgccggcggattcgccgctgtgggacatcccgaacgtgatcgtgtcgccgcacaacgcgtcggcctccgacggcaatgacaagcgcgcggcgaaagtgtttatcgacaacctgcagttgttcgccggcggcaaaaaaatacagaacgagcagg

SEQ ID NO: 166819 - DNA, 586 bp, Arabidopsis thaliana landsberg
  unsure (1)..(586): unsure at all n locations
gattcctcattacgctttcgcatctttctcttcaattatcgatnnnnnnnnnnnnnnnnnnnnnnnnnnnnnnnnnnnnnnnnttaatttactgttaatttcttatgttcttgaaaatcatctaatctatttgaataaatttcagtgatatttaatgatgttctattttttgttgtatactagacttggttggggcgattcatgatgtaggagaggtggagaataataggcctacacaaaacgatgtcaatgatttaaggatttgtttcaaaactcaagaacaaagagtgagattatttatgaatattatgaatttgttgttggttagtataaaaggtctaatatatatatatattttttatgtacaaccgtgtgttggaatgcttggctactggaaagcaggctcttgatttcaatcaaaattatcgcagtggtggtggtggtgttattgtggccgtgcatggatggtggaaggtagatcgttattttgatggtaaaaaaaatgttcagatttgcacgttcggtgctctctccattgttttccccgatcctaatatccctcagaaccgatgagctacgtgagatg

SEQ ID NO: 166820 - DNA, 2714 bp, Arabidopsis thaliana landsberg
  unsure (1)..(2714): unsure at all n locations
gctaagacttattcacaacctcatagcatatctcacataagtttaacaatctaacaaggcaagtaagccctcgaatcatatctcaattcatcaagtaaacttagtcaagttcgaattcacttagcctaatcatgcaccagtccattccattccttagtgatatcaagttcgtcaaatgcccatattcactttacgattcaagttctaacttaatccaaattccgattatttaagtctaagtgagtaagcatgcatatgatctaaagacaagctctagaaaacatgcaaacaaacaaacaattcgaccacaactcacagattcggtaagtttnttagtcgcgggcagaatctcttaatcacggtcgacgacttctcactaggatgagttctctcgaccacatgcgattatttcgcacttacgatcagactttcctagaccacgggcaagatttactgaattcgggcaagttttcttggtttcggacgagttatcggtcagacagccttacagtctctctcgccttcaaaaatgaaaatggactgagaatagcatcattttatagtccacccaaggtcggccatgtagcaccgcccgctgccacatgtctagacagttgccgcacccacatgcgactggtgtctcgggcgatggcgtggcgacaggtgtctacgggtgtcattccattgccccatcagcttcggctccaagactcagccgaattcgactccaaggttggtgacttgattcgcatgtcaccgcaagtgaggtgtccacacgtcggttccacggccaacgtggcaaacttcgcccgcggtacgccaaacttttcccatctttgcccattcgtgcccattcttgtccatgtttgccctttgacagtttagcattttttgggcacatgcggtgcattggccatgcattcgagcaactttttctcattcggtcctttgccgtacccgatgcccttatgcgggtcactatagggttattgctcggatgttcagagaagaagcaagaaggcgcccttctttgtggtggactgacatcgaagatgagataatgatgaggtacacaatctctgtctctaagtggatatgccagaaagcaagcaggatggctttaaatttggtgatagaaacgcagaaacaacaatttgcaaagctatacaattatgaggctgaactgcacatatctaatgagcgtatccacatagacatcatgaccattcccaaagctgatagtaagcagcaatttgacaagttttatatctgttttgatgcgttaagaacaacttggaaaaattgcttttggcctagatgggttcatttttgaaatgggaattgaagggtgagattctagcagctgtggggagggatgcagataatagaatctaccttgtagcttgggctgtagttagagtggaggataatgagtcatagattcaagaagggtttgggtttagctttaggtggagatttgacagtgatttcagataagcaaaaaggattgctcaatggagttaaagacatgcttcctcaagctcaagttgtgaggatgttagcaacaacttatgtgagagtttcaacagaacaatcagagaagcgaggaagaaacctgtgataaatatgcttgaagatgtaagaagacaagcaataaagcgtctttccaagagacgggataagactgctacatgcaagacaaagtttccacctcatataatggagatactagaagcaaactacaagtcagccaaattcggttatgtcctcaaaagtagtgagcacgtttatgaggtgttggaaggtattggaagcttcagagttaacatcctccacatgacttgtgcttgcaacaaatggaatctcacatgaataccttgtccacatgcaatctttgtcatcaatgaacataaccgagatccaagcataagttttaatcaactcgactctcattgagttgtaaatatgcttgctgatatactttgttcttctatgcagctatgttgatagccgctttctgacaactgtctggcaatccaactacaagaaaaacataaaaccattgaatggaaaaatgttgtggaagaagacaggaaaaggaacaattcaagtgcctgataaaaggaagaagagggcgtcctaagaactttgctaggatacttgaaccaggtgaatcaacgacttatctgacaaaggaatcaagagaaggaggtactgtgacttgtactaactgcaagtaatcaggacatagtaaaggatcctgcaaaaatgccacagtacagtcagctcctccacgcaaaagagggagaccaaggaagagtaaggtaattactcaagaattttccctataatttgtctactcttagctatgtttgatttgcgttgttgacttgtcataggataatgatgatccatggagcatacacaatgcaccaaggaggtggcagcaagctcaaagtcagtccacaccaacttgttctcaaagtcagtccactcaaattctgcaacattcaagtgctccagcagctaatcaaaagggaagatgacgtgctcgaaggcgtcctctaggaaccaaaaatggtgaaggcaaagatccttctaaagctcgtggcaagggtcgtggcaaaggcaaagaggaagcacccaagcagactgttttcatgatgtctccatggactaacaaagtgtttgatgtttttgcagcctgacaagaa

SEQ ID NO: 166821 - DNA, 429 bp, Arabidopsis thaliana landsberg
ttatttaaattttactaatgtacaggtgaacgtataagtggagtcagttactgtcaggagacgatatcgaatgtttacgagtctcccgacacttctgtctcttatgacaaaatttatgttcgagaaaaatctccaaccgaaccatcctcatccaactgtggtaataagaacaaaagactaatcgcgaaactagtgtacccatttggattggtgaaaccaggtggtcgagaaaatgatgtaaccctaaatgatatcaacgagagaattttgatggctccatctcgaccggttcgacatccggtaggagactttgcctctcgaccatgtgtctctggccgtggaccgggcctctccggaaaagctgtggtggctcttactaagatccaaacacaagggaggggtacaattactataatcagaactaagggg

SEQ ID NO: 166822 - DNA, 891 bp, Arabidopsis thaliana landsberg
atgcctactttttctgctattgctttggatagaatgctagagccaggggcttccacgtctgtcgagagtgttccaagcacaactaatttgttttattcaaagccaccgatatcaaaactggagaaaggtaaaggtaaattacctaatgagaggacagttactcgtcctctgatgtcacctgctctctacgccacacctgatgcgattccgcttcctaattcgccatcgtctttcccaccgtcgccttatatcatcaaccacaaatcacgtggacctccacgtcttcttaaaagctcttctgaggctaatgttgtgtcttcttcccaccagaagacgctggaagaggaaactattactgctgaaacagatgtaaaggtttcccctcggaggaggtccacttccttctcgtttcctatcactgaggttactgaagatgattattccaatggagttcatgctcgtacggttggaaactataattttgatggtattgttgatggtcctgttggaaattggagtccgcttgatgggaaaagtgggaatgggaagtcagagttggataacgctgctaatggtttagaacgggtaaatggtctgtctgagccagtccctattaaaacagacaaggagagtgagtcagaagatttctatgacccaggtgaatcagcaagcttcacaagtaacacagacgtagagggtgatgctggggacgaaagttcacaaagacttgccacacctgtgggagagttttatgatgcttgggatggtacttatctaaatcttattctcttactaatcatttccttatgagatggctgtcaatgcttatgatcttaacgttcccaggataatatgattagtcacattttagagtcccttctttttaacctt

SEQ ID NO: 166823 - DNA, 2190 bp, Arabidopsis thaliana landsberg
tgtaaattcttacacgagccatcttgatcttggaggcatgatagcagaggagatatcagataattactggaattccgcagaaactaggtcaatttgggatagtgcgataacgaggttgttaacgaggaatgtgggtgttgttaacggtagcgccgtgatctccaaccaagagtgaacgagacagttgaaggaccgagaaggtaaacctaaatgcagggataaggatagaggaaccgatagacgcaacgcctctttacaacatcggtacccaagccgtccgttgacggagataaacgaaatgcaacagcaagagagaaaggcaaaggataagttatcgagtcaacattgcctcaacctgtgctaactactggtttaccaagtattaatatgtttgacgcagcacaagcttctgcagaagcggaatttgaggcttttagaagaacatacgttgcgaaaatgtggcgaagtatgtgtgctacagagatgactctaggaggacagcaaatggggacagctgaggcaaccgcgggaacaaaaacagctagagcattgaatttcggggtaactatatcacaacaaactctcgttgaagatgaaaacctacggctgacacttgctggagcatcaatggcaacaccgcaacccatagtcgtaacgctgtcaaccgagttcccgttcaaccagcgtatccttctcaatggacgagctaatggatgaagagacggacatcatatcgccaaccggtgtaataggttagttatccaacaagtattgtattatgttgttaatatatttgaaaatgaggtatttgtttgaaaatatttgacatgtacaaacacaatagcggacttttacaacaacaagaccgtgtgtttgactccaagagttcccatattggtgggaggaacacaatatattccggttgtggaaaaatgatctggatcatgtcaagggcgagaacttccggagggagacagacgactggtggtccgagataccccagttccaacagtcatgtatgatcgtgatgcacatccgtattttgatgacccgggtgaagaaggtatgtagcacgtaattattcttttatcgtaccaataatcgataggtagcaaattagttaaggtccaagttatcgtactaatattcattgactataggtaatttatgtagtaaccattaatgatcaagttattgtcatttgtagattatttgcaaagagtgctaacatatgttgattacgaaggggacaatattttcgtggagaggttgttcaaaaacaaagatgactgttgcacaaaactggcaattcatgcgattcgccttaagttccactttattcatgcgaaatcatatccaacaatggtcatcgcggtttgcgtggggaccacttgtctttggcgggtttatgcaaccaaattagaaaatagtgattggtttgaagtgagaacgatattaatgcagcacacttgcagcgtggacgcaagaggcaacctctacaagcaagcgtcaacaagtaataggaaagctaatgagaacacggtatgttggggttggaagaggacctagacctaatgagttaaggaaaatgctgagacaagaattcagcctcaatgtttcgtactagaaagcgtggagagcaagaaagattgctatggacaatactatggggtcggcaatggggagttttgcattaatccaaccatacttcaaactactgatggcaacgaacccaaactcaattcccgcgctagaaacagaaacggataatttgggagttatctgttttatgtatctgttctttgcatcaaacgcgtcgatcaaggggtatgcttacatgataaaagttgttgtaatcgatgggactcacttgaggggcaggtatggaggttgtcttgtggctgcgagcactcaagatgcaaatttccaatgtttcccactagtctttggaattgttaatagtgaaaatgacgaggcgtggacctggttcatgaacaagctaagtgactttgtccctgacgacccagacctgatcttcgtctcggaccggcatacctccatctacgcaagtattagaaaagtacatattagcgcgataccaaatttattagtgagtaatttctataataaaggtaaatatattgttagtccaaatatgatatattagttaggtaacatcatcaaaagatg

SEQ ID NO: 166824 - DNA, 900 bp, Arabidopsis thaliana landsberg
ataaacatgttgggatggaaacctcggtaacttgcaacttcacacgagtaacccgaagcaccaccgccgcagctagagtctcgcagaagccgcggaggcaagtgtagcggagggagagccaaagctcgaaaaccccaaacacccgagcatcgacctaacggtcaaacatgctgggatggaaacctcggcaacttgcaacttcacacgagtaacccgaagcaccaccgccgcggctagagtctcgcagcagccgcggaggcaagtgtagcggagggagagccagagctcgaaacccccgaacaacctgccttgtacgaacctaaaatgtacaacgactggagaatcctaatcatcgattacatcgaacgagggatcacacctcccgacaagtgggaggccagaaaactcaaagcccagagtgcaaggtactgcatcatggaagggagacttatgaaacgcagcgtcgcagatccctatatggtgtgtacctacgggcaacaaacaaaagacctcatgaaaagcatgcccgaaggacaatgtggtagccactgtagtggacgtaccctcgccctcagaatcaaaaagcaaggctacttctgaccaacaatggtagccgattgcataactcattcactcaggtgcgataggtgccaacggcatgcacctacactgcaccaacctcccgaggaaatgtcctcaatatcttctccttacccgttcatgaagtggtccatggacgtcgtaggtcccatggaagcctcaggtgggaagaagagattaaaaaacctgctggtcctcaccgactacaataccaaatggattgaggctaaagccttccaacaggtaaccgagaaacaagttgaggacttcctgtgggaaaatattgtatgccgacacggc

SEQ ID NO: 166825 - DNA, 1190 bp, Arabidopsis thaliana landsberg; identical to SEQ ID NO: 58774
  unsure (1)..(1190): unsure at all n locations

SEQ ID NO: 166826 - DNA, 659 bp, Arabidopsis thaliana landsberg
tacaaaagccatttagatctgggaggactgacatcataggagatatctgataagtactggaattctgcgaaaactaggtcagtttggaatagtgcgataaccccggttttaacacgaaatgcatgcgttgataagaatagtgcaagcgaattccagccacgaggaaacaaaacggttgaaggaccgagaagggtaaacctaaatgaaggtgtaaggatagaggagccgttaaacgcaacacctattagagcatcggtacccagacagtctgataacacagagaaacgaaaggcaacaaccagcgagaaaggccaaggacatgttaccgaggcaacaaagtttcaaaatgctcatgctaatggattaccatgtaacaacatgtttgaggcagcacaaacctccacaaaagcggaagttgaggcttttcgaagaacctatgtcgcggaagtgtgccaggatttgtttgctaaaaaggaacagagacggcgagagcattgaattttagggtaacaatatcacaacaatctcctgttgaagacgaaaacctacgactgaccctttagggtgcatccattgcaacaacccaatcaaccatcttgatgttgtcatcatcagactcttcatttggcacaccaaattccccttcaactagtatttcg

SEQ ID NO: 166827 - DNA, 663 bp, Arabidopsis thaliana landsberg
agcgggggcggccggtgaagcggcacctgatttccgcgggcgacctgacccgcgaggacgcgatccagatcctggacaccacggcggagctcgccagcgtggcgggccggccgatccggaaactcccgacgctgcgcggccggacggtggtcaacctcttctacgaggactccacccggacccggacgtcgttcgaggcggccgccaagcgcctgtccgccgacgtgatcaacttctcggccaagggatcgagcgtcgccaagggggagagcctcaaggacactgccctgaccctgtagtcgatgggcagcgacgccatcgtcatccggcaccaggcctcagcgcttctccactggatgccagagtgggtgaccggcaacgtgatcaacgccggtgacggcacacacgagcaccccacgcaggcgttgctcgacgcgttcaccatccgggagcgcctggtcggcccggggcgggacggtgtcagcctgaacggcggagaccagcgcggctccggcctggacgggctgcgggtcacgattgtcggggacatcctgcacatccgcgtcgcccggtccaacgtactgctgctgtccacgcccggcgcccgggtgactctcgtcgcaccacatgacaaagatgcccttctcggtagagacctggcct

SEQ ID NO: 166828 - DNA, 1018 bp, Arabidopsis thaliana landsberg
ttttctacagtattgtatgttcactagacaacatttttctataaaaaaaatatggtattgagatgtctacagctccaattgttagaaactcgggggaatgtggaattttgtacgttgcagagcctcttgaggcatgctcggatataaccaacatggcggaaaaaagatcaaagtataggtcctcttatgtattgatcgtccttggtggctgtagttttgaggaaaaggttagaaaggcgcagaaagctggatacaaagctgcgattgtctataacgatggatatgatgagctcttagtacctagtaagttctcaatgttcatgtgagtatataaacatctttaatcaatggttgttataatcttgaaaaaattcaaaaccatagtggcaggaaattcatctggtgtggatatacatggcttgcttgttacaagagcatcaggggaggtgcttaaagggtacgcggatcaagacgagatgaagctttggctcatcccgggattcgggatttcatcgtggtctatcatgggtattacattcatatctttactcgccatgtctgctattctagccacttgtttcattgtccgtaggcatcaaattagacagagtgttagggatttaccacatggtggccaaggactttcttgtatgccaagagacttgttgcaaagcatgccgactgaagtatatagcggtgttcttgaagaaagttcaacttcggttacttgtgctatatgtatcgatgattatcgcgttggtgaaaaactcaggatcctaccttgcaaacacagtaagtccattttgttttgttcaactaagagttgattaattatcttagagttgatcttaagttcttttttttttactcgaggcagaatttcatgcggtgtgtatcgattcttggctcggacattggagatccttttgtcctgtttgtaaacgcaatctaagaactgaaaatggtgttccagaagcgtcagaaactacacctctgatttctcctagcccaaactcta

SEQ ID NO: 166829 - DNA, 497 bp, Arabidopsis thaliana landsberg
atgagtcgcataatgggattgttcgatctcgagaaacacttcgccttctacggtgcttaccatagcaatccgatcaacattctaatccacatcatcttcgtttggccaatcttcttctcagttttacttctcctccactcgtcgaccccaattttcgacccctctcaattagggttttctcaatcgttgaccctcgacggcgttttgcgatttaacgttgggtttatattcgccttgatttatgctctgttctatatcggtttggataagaaatctggatttgaagctgctcttatgtgttcctctcgctgggggggccccaggcttcttgctgttagactaggatcttctcttgccttaaaggttagactgttcttctctaattgctagttagggttattgacaaaacttcatttttggagaatatgattgcgcttaagcatgttcatgaggagatatgactatgtgcatccatgagtagctctatgtgtatatta

SEQ ID NO: 166830 - DNA, 3390 bp, Arabidopsis thaliana landsberg
  unsure (1)..(3390): unsure at all n locations
atgcttttcgccaaagagtttcatgagaaactagaattagggcagactcgtcctcgagtacaaagaagagttgatgagcagcttgagcaaagagatgaagctacagatcagtactatgggcataggagctctttatctcgcaatagtcaaaggagacaccatagacgtgctaatgaaggtagagatcttttgcaagacaatgttggaggtcttaagcttaaaattccaccattccatggaaaaaatgatccagatgcttatttggaatgggaaaagaagattgaattggttttcaattttcaactctacaccgcgatcaatagggtaagagttgttgctaccgaattttatgactatgctttgagttggtgggatcaactagttacttcacggaggcgtaagcaagaacttccattggaatcttggtccggaatgaaagctattatgaggaagaggttcgtccctagtcactaccaccgtgagctgcatctcaagttgaggaatattacacaagggaaccgttatgtcgaagagtactacaaagaaatgtaaactttgatgttgcgggctgatatttcccaggatagagaagcaactatgtcaaggtttcttggaggtttgaacagagatattcaaaacagattggagactcaatactatgttgaaatagaagagatgttgcacaaggcgattttgtttgagcagcaagttaagacaaagagttcttcacgatctagttatggttcagggaaccattgctgagcgtacttaccaaagagaggagagaaccagcagctataagccgactgtcagttcaagggctgaaagtacatcatatgctgcagttaaagatcacataggaaaggctgaaatttgtacatttagagttcgtgatgttaggtgttacaaatgtcaagggaaaggacattatgctaatgaatgtcaaaataagagagtcatgattctcttggataatggagaaatagagcccgaggaggagattccaaattcaccttcttcattgaaagagaatgaggagctgccggctcagggtgagttgttggtagctaggagaactttgagcgtccaaaccaagaccaatgagcaagaacagaggaaaaacttgtttcacacgcgttgccatgtgcacgggaaagtttgcagcctcatcatagatggagggagttgtactaatgtggcaagtgaaactatggtcaagaaacttggattgaaagtgcaaaaacatgcgaaaccatacgatctttagtggcttaatgacagtggaaaaatgagagttaaaaatcaagtggttgtgcccattgtcatcgggaagtatgaagatgagatcttatgtgatgtgttaccgatggaagctggacatattcttcttggaaggccgtggcaatctgatagaaaggtaatacatgatggcttcactaatcgtcattcgtttgagtttaaaggtggaaagactattcttgtccctatgactccgcatgaggtttatcaagatcaaatacatctaaaacaaaagaaagaacaagtcgtcaagcagcccaacttctttgcaaaatctggtgaggttaagagtgcttattcttctaagcaaccaatgttattgtttgtttttaaagaagctcttacgagcttaactaaccttacatcggtgctgccgagtgaaatgacttctcttttgctggattatgaggacatgttctcactggataaacctataggactaccatccatacatgatgtatctcaaagtcacgtttggagaccaggagattatctagaacgttcaaatcttacaccacatgagattttagtcattttacttcacatgtttcctgaagagcctaaaattgatctttcgtcacttgattcatttcatacttatcactggcgaccaggagagttttagatacctttagagagaatgagttggtcacaagcaatgccttatccaaaaagaacccccggatccaacaccacttccattagtcataatgataccaagcaccgaacacactgtgaacctttctcaggtaagtaactctttaactcgatttgtttctcatgtttcaagaactggtactatgagtttatcatatttaggaaacattgagaaagagttggatttatttaaagaatatttggaatcaaactcttgtcttaggataaaagtaaaacatgaacatttcaagaatggtgcattgattaaagttgagccatgtttacttgtttataatgatttcatgactatgataacgcacttgctttttgccaaaggtgttgacaacattgtaggtataaaagaggagacaccagacttttagaatttctcatgtccaatctctttaagaggactggaattggagttgttttgaagccaaagatcgattatccatccaaccgaacaagaagaaaaagcgacaatgcttatgaacttgagttgcaaggtaagtataatgtgagttccaatttcaatgattcttacttggtagttntcattgtaggtgaattggatttgaggtcaaatccttttcaagtgggagaggatgatgtgataatggaaagcacaaaagacatggaatttgatcaagagcttctagccgaggaagagcttgaagcagaggggcagcttgaacctgaggagcattttgaaccagaaaacgagtttctagttgagaaagagtataggaaagatgttatcttaacctcgttggttttgatacatgatcatcaaatgggcatgtgtctcatttatactcttttttccttgtcaagttttgtcccaatggtttttcttgacaaggtttttaatgaggcaaatgattcacattcaaatcacctatttgatgatccaaaccatggtataacattcacaagttggcccaatggaatatatatgaagtccagcctattttatgaccatcacaagcccaagaagagcccaaaccaagtgggtaatttgctggtcaagaggagtgacgaaaatagcatttcaagagtcattttggagcaaagaagtggaacggttatttttaaactttcaaactagtctttatttctttctattttccaaggtagtcttgtgagtgtgttccaagacttccttcttctttataaactccttgtatctcttatgagaactcatcatctttttatcaaaaactctctcttaaaaatagatcatggatccgttttcgtatgtcaaattttgatctttctcgacttatcaaaaggcttttccacatccttttgtggcgtcattcaatccatcatctcgtcttggagtcgtgtgtcgtctccatttcgagaatatccactccagatcttttaagtgccgaaattgggattgattcctcaccaggatcatatcaatag

SEQ ID NO: 166831 - DNA, 547 bp, Arabidopsis thaliana landsberg
  unsure (1)..(547): unsure at all n locations
atggataaggatgccgatttcaggatacttgcttatggtaaatccgatttgagtaagctgaacaagccttttgtttatacgccctacgaaaaggacaagcctatgccctcacggatgatcgggccgtcaaacccgaattatacgccgttagaagatatatcgccatacctgcgcaatgcagtaatgacggccgaagaccccaccttttataaaaaccacggctttgtggaaaaggccatccgccaatcaattattaccgacattaagaaacatcagtttaaacgcggcggcagtaccatttctatgcagttggttaaaaactctttcctgacccgtaaaaaaacgctgagtcgaaagatcgaggagatactgattgtctggctgatagagaataacaacatcatgaccaaagaccgcattttagaggtttactttaatattatagaatgggggccgggtatttacggcattgccgaagcagcacattattattttggcaaaacgcccgccgagcttgatctgggcnnnnnnnnnnnnnnnnnnnnca

SEQ ID NO: 166832 - DNA, 1176 bp, Arabidopsis thaliana landsberg
  unsure (1)..(1176): unsure at all n locations
gagctgttaaccttctccgacttggtcagaccgactgggccacttttagcagagatagcattgtagctgnnnnnnnnnnnnnnnnnnnnnntcccgcaattgtccttccagcaacacagcaggatccccgaggcagacctgcctataagtacgagtttcatcattttttttttgtgtacgagtcattgcgcgatcgagctataaaataacaaatgtggtgctttgtttgttcagttcctcctgactccagctctacttcggacctcccgctcatttccagaggaagaatgaggcgaccaagtcttcgtgttcaacgagcacacaccggggctcctgctcgtgctggtgatctgttggccccggtgactgcggctcggaacagtctagctatctccagcacatctgcctcagtgtctcatccgtcgtttcttaagatcaataccgagacctctactgcagcaggtcaagcggataacaatcaggtcgctcaggtgtctgggccatctgcagttgttcgttctgatggtgcaccgtcctctccgaagagagctcggacccagccggagtgcatctggcggctgagttggtcatgagagaaccagggggtcgcctcccctagagaggagaggatggaacctgcggctgctatttcggaggcagattcatcgcttggagcagaggagggaagagctctccaaaagggtgatggacctcactttgactgcgcaaggagcgaagaaggtggttcacaatgcttaggttgagctggctgctgcgtattcgaagttgctggctgggatcaaggaaaagtgggtcgccaaaaaggagtacacgatgctggagggtcaagcggtcgaggtggagtcgaacttggttttgaacgaccagatcacaaaggctgctatcgatttgaccgtggagagacctcggctgcaagcagagctggatgacctagaggcgcagtgcaaatcgaaggaggtatcaatctttactctaagcaagttggatctcccgcatgtttcagagatttcggtggtacgtctgatggacgtcgatgagcaagggacgccaattggcttggatgagttcgggagcatcaaagatgcgtttccgggaggtctcacggagggttccagtactgtctttgccacgccagccggggaactgagggagtga

SEQ ID NO: 166833 - DNA, 3198 bp, Arabidopsis thaliana landsberg
  unsure (1)..(3198): unsure at all n locations
acttgttgaagaagaaggggtttgtgtggtctgaaaaagctacnnnnnnnnnnnnnnnnnnnnnnnaggcggtgactcagctagcggtgctcatgctgccagacttccgacaaccattcaccattgaaactgatgtgtcaggcgcaggaataggggccgtgttatctcaaggcaagagacccatcgcctacatcagccaaggattctctgagaagggtaaagctaagtcagtttatgagagagaattgttggcaattgtgtttgcggtgaccaaatggaaacatcactttgtgggtcagaaggtgatcatcaaaactgaccaaaagagtttgaaacacttgttggaccaaagagctatttcgggagatcaacacaagtgggcatataagctgctggggctggactacaatatttggtacaaaccaggggttgagaacaaggtggctgatgcattgtctaggatgctgggggagcaggtttgtatgttacagatgactgcactcaagtgtgtttatttggttgagttagctgagcaggtggaacaggacccattgtataagaaaattatacagaggtacaaggctgggattctgactgacaccgggtatgagatgagagatggacggttctatatggaaggcagactcgtgatacttgcaggatcgaaaattacccgagagttaatggaacagtttcatagcagtcttgtgggagggcatgaaggtgttcttaagacattcaagaggatgtcaagggaagtatattggaaaggaatgaagaaggatatcacaaagttcattaaggaatgtcaagtgtgtcaaaccaacaaatactccacactgtctcctgccggcttgttgtctccttaaaaccaacagatgcttggtgcaggataagccaaagaactgggtgaagttgttaccttgggctgaatattggtacaacacgtcctaccattctgcaatcaagatgaccccttttcaagctgtgtatggacgtgaggtaccaagacttttgagatataaggatgtgccgtccactaacgctaaggtagagaagatgactgtggacagagatgagttgctaaaagagttgagggtgaatcttgaggcagcccagaagaggatggaagctcaggctaacaagcatcgcagagaggtcgaatatgtggttggagagatggtgtacttgaagcttaaaccttacaggcaggcttcggaggcatagagtaggaattagaagctaactcctcgcgacttcggaccatatgagatcattcagaaggtgggaaaggtagcctacaaactcaagctacccactcacagtttgatccatccagtgtttcatgtgtcattgttgaagaaggtagtgagaactggagaatcaatcattgatctgccagcgattgtgactccgaaaaatgtctgggacactaagccagagaaggttaaagctgttcgtcgagtatctcctgacagcgaggtggaagtgttgataggctgggaagggctgccagcatcagaggatacttgggaaccggcaacaccattttcagctcagtaacccaatttccaccttgaggacaaggtgagttctttagggtgggggtggggggggggggtaatgatacactcgtagtgccattggctttcatgaggaagggcacgagagctggcaaagtcgcaaggaagtatgagtagaagaagaatactctaagtggctaagagactctaattggaaaagagggttcaaagtagaatatgtaatgcgttgtcgtttcttatgtgtcgtgatatatgaataggaggatctgtgtaatactggtaatttcggggaatacttctatttttgtttctttctatactctgagaaatacagagtaatactatgacattactatttacaattgagtgatatatgaatgaatgtttgtttcttttaggatatggaggaagcgatggcaatgcagccacttggtatgtacttcctggcgtcggagtataccaagaagatgaagttagcaacgaggtgttatatctcgaaagtgttgaagaccttcgctgacttgaaacatgtcctaacggattttgagaagaattactttaaggagcatccgagtttcaagcacatctaccacctgccatccggatatatccacaagttaatggggatgtggatgcttcttcttcgaacgacatctattgagaagaagaaggaggtttggttcgttgttaatggagttcccatccgctttggtattagggagcatgctttgatctctggttttaactgcaagacctatccagctaatcatcagagtgccggtagtttgaacttcgccaacaggtacttcaaaaccggggtaattagacgtgaagacgtgagaacgaagcttagtgagatggaaccggctagatctaaggataagttgcggatggcggttctctagtttttaacaagcatcattgtcgtgcctactaagacctgagaaagggctagtccacttgatttctgtgttaggactatctcagggttgcgagtgatcttacgttttgtaagacatttccatgggggagatattcatttgagtacatgttaaaatcgatctcacacacattggatcattttaacggtgtcgtcccgaacactcagtcaccatggcctgttcccggattctgtgtgccgcttgaggtaagtcttttgttttatccttgttacattttcgtaattgaagctaacaattaaatttcatgtgtttttttgtaatttttagcatttgaggccattccatcacttagggaaagattcatagaagaaaaagagggtgcacatgccggttgtccaaggatgtgcaaggtgaatttcaagaggaccgagatgaaagggtttacccttgagcaaatcaaccatgtactcggaacaactggggttagtatttcctattattccttgagcaaatatgattttatttctttctaatatttcattgtctattatttccataagtcattgagagtataattagagagaaggctgaagaagtacctcttttggctgaaatcatgggagtagaggatgatattgataagcacgatgttgtagttgattgttggatgaagcgtcttggtcaaaggcgtgaaattagatttgaggaggtgtacaacgaggatgtgcagacacgaatgaaagccccataga

SEQ ID NO: 166834 - DNA, 616 bp, Arabidopsis thaliana landsberg
cgccgcgcaagctcaaataaagacatcgcggaatcgacggccggccgtcgttccctttcgcatcaggccggtggcggtactggagaagcggtacatgacgttcacgacccgggatctcaccccgcgcatcgccaccgaaatccgctcgaacaagaagacgctgctgagcggcgagcacagcgccacgatgcgcgagctgctcgagcagcgcggcgtactggtgttccctcagatcgatttcagcgacgacgagcaggtcgcgttcaccaactcgctgggcaccttcgccccggaaatggccggcgagatcatctacaaggtcacgctcgacaccaaggccaattcccgagccgattatctgaagggctcgctgtactggcacatcgacggcaccatgaacgacgtgccgatcctggcatcgctgctgtcgatgaagcagctgccctcgaccggcggtggcgataccgagttctgcaacacctacgcggcctacgacgatctgtcggatgacgaaaagcggcagctcgacaagctgcgcgtcatgcattcggcgtggaacacgctgttctactacgacccggagccgagcgtggagttgctgcgcagcatgatgcgg

SEQ ID NO: 166835 - DNA, 416 bp, Arabidopsis thaliana landsberg
  unsure (1)..(416): unsure at all n locations
atgaatatcaagaataacatacacaaaatatctcaaaacttgcctccgggatgcacgttagtggccgtgagcaagactaaaagcgctgccctgatccagcaagcgtacgatgccggacagcgacatttcggagagaataaggtgcaggaactcgtgccaaagtatgagacattgcccaaagatatatgttggcacatgatcggacaccttcagtcaaacaaggtgaaatacatcgtgccctttgtacatctcattcactccatcgacagtgagcgtttattgacggaagtagacaaacaggccgcaaaagtgagtcgtaccgtgagctgcctgctgcaggtgcacattgcaagggaagatacannaattggattttcgatcgatgaattgaaagaccttctgcgctccgtaaatgc

SEQ ID NO: 166836 - DNA, 3320 bp, Arabidopsis thaliana landsberg; identical to SEQ ID NO: 3543

SEQ ID NO: 166837 - DNA, 589 bp, Arabidopsis thaliana landsberg
tagaaggatgtttattacagaattgcttaatatcatatctatactttcgaaatattgtaatgaagataatttcacttagattttaggttatcttacagtttttgacttttgttcacaggaatagcgacataatttttcattttctatgtagaaaattgttactattcccacaacatctttaccaaaaaaacacatgttgtaacaaatttatctgtatttcgcttgagtaatatttctatataactttttaaatctctatattcaattgatgtatgtagtacaaagtctatctgcatcggaatgggattcacttgtgatccaatctaaagtcccggtaatagttgtattcatagccaaggactgtgccgaatgtggtagtttgatgcccgaactcgaattcctagactcagaatacgaatatatgttaaaattctacacagtcgacactgacgaggagttggagctagcaaaggattaccgcatagaatatcatccgatcactattgtctttaaaggcggagaagaaaaggaaagagtcctcggatattacccacagatgttaggtcagctcgccaataagtacctgtga

SEQ ID NO: 166838 - DNA, 1849 bp, Arabidopsis thaliana landsberg
atggttctgaaagtcctcgagctgctgcatgcgaagaaaggtgtttgggtacctctttgatggggagagagctttgttccgaatctttgacaaaagcgagcgcctgttcatcgtcaagaacaaaggttggagaaattcaaaaccaaaattcagtagattaggagattgaatgatggaagaaacaaataaatttgtgaaaagtttttgataagaaagggaagtgaaggagataaagagaggattgtagggattcgagatgaggatgctttggtatgggagatggagagtatataatagctgtgagcgctcaagatgccaattttcaagtgttccccattgcttttgggatagtgaacagcgagaatgatgatgtgtggacatggtttatggagaggctaacagacacaatatcagatgatccggatttggtcttcgtttcggacaggcacttgtcaatatatgcaagcatacgcaaggtaacttatctgctaactagttacgtttagaagataacacgtatgtgcgctaagtgataatttatctactagctaaattgactttagggtacgtttattcccctagacataattatgttacattcaatgaggcgcgataacataaacgttattagttaacttaacctagtctgtctcgtacgaactaatgttaacgtgtaacaagtattttagttcaaacgtcttctatatgaatttgtgtgtaggtggtttagttcgtagcaataacgccgcaacaaaaattttagaagttaacaatacctgtttccgataattcaattagcggatattgcgtctttgtttgttatgggggaatgtttactaaacctaatagattgtcaaaactctgcaggtatacccaatgtcttcccacgcagcttgcgttgtccatctgaagaggaacataatatcaatgttcaagtcggaggggttgagttatttggtcgccagtgcagcgcgggcttaccggctaagcgacttcaatcaaatctttgccgagataagagctatgcatgggccatgtgcagattacctaacggacattggttttgagcattggacgcgttcacatttcgtgggtgaaaggtataattgtatgacaagcaacatagcggaatcgctaaacaatgtgttaacgatggcaagggattatccggtaatatcactattagagatgctccgaacaactctggttacatggtttgcactccgccgagaggctgcacaagtcgagggtaatcttttacctccgaaggtgaatgaaatggttattgaaaatttcgaaaaaggtgcaggctatgttgtggtgaaaataggagattcattttatgaagttagagacagacaagattcagcatttgcggataacctttgggagaggacttgcacatgcagggaattccaattgctaacaattccatgttcgcatgccatagcaacggctataaaagaaggaatccgtgtagagacaatggtcgacatctaccacacagttccatacctaagattggcctacaagggccttattatgccggtcccggacatggatacactgaccccttcaccaagtgatgtgggaggcgggaagcttgcactaccgtacgtccgtaagctgcctggaaggccacggaagaggagactattctataggggcgagttcaaggtaatgactgatattgtgtatattgatattatttttgttaacgcttcaattcactaacctagtacataataccgggataataattcgtttacagagaaaggcgctgaaacgttgcacaagatgcagggaattagggcataatagggcaacatgcagaggaccatcacggtaa

SEQ ID NO: 166839 - DNA, 739 bp, Arabidopsis thaliana landsberg
  unsure (1)..(739): unsure at all n locations
gtcaaacgaagatgttagtaacaatgggctgaagaagaaggttctcactattgctgaccttacatcaagccttttggaaataataatgtcttatcttgtgttaaaagataacattcgtgcatccgcggtctgccgagcatgtcgtaaagccgctgaatatgttcgggttgtggagaagcatccatgggttatcagctttccgagacattacggcgtgactattctcttcgatccattggaacggaagaggtacacactgaatttacccgagttagttggaaccgatgtttgttactcgaaagacggatggttgcttatgcgaagatccagtttagtggacatgttcttcttcaacccgtatactagggagcttataaacttgccaaagtgtgagttgtcctttcaagcgattgctttctcttcggcccctacatcaggtacttgtgtggtgttagcgttaagaccttttacaagatatatcatccgtataagcatttgctgtcctggagcaactgnnnnnnnnnnnnnnnnnnnnnnnnnnnnnnnnnnnnnnnncccatacatgcatagcaaccttgtctatgccaacgatcacttttattgttttagctcgggaggtgttttagttgactttgatggaccttctggcacaatgagtgaacaagcatggaatgaacatagatgcgcttatatgcgtaatgataatgcagaatggtttaatcttccgaagagaatttac

SEQ ID NO: 166840 - DNA, 725 bp, Arabidopsis thaliana landsberg
atcgatttaccgcactcttcgaccggtactatcatcttcggtacaatcctccggtttaggaattggaggattcaggggacatctcattagccacttgcccaatgttcggctattgagctctgacacgtcatctccggtaagtgggaataaccagccagaaaatcctatccgaacggccgatggtaaagttatatccacttattggggtatacctcctactaagatcactaaaccggacggttcagcttggaagtggaattgttttcagccatgggattcatacaaaccggatgtgtccattgatgtaactaaacatcataaaccctccaatttcactgacaaattcgcatattggaccgttcaaactctgaaaataccggttcaactattttttcaggtaatttaatcagaaattttaaatcttcttcatttgttcttttatttttaacatgattttgttttttcaaaaattgaataatttgatttttgagtatagaggaagcacatgtgccatgcgatgttgctagagacggtggctgcggtgccgggaatggtcggggggatgcttttgcacttgaaatctctccggaggttcgaacatagcgggggatggatcaaagctttgctcgaagaggctgagaacgagcgtatgcatctcatgactttcatcgaactttcacaacccaaatggtatgtatatatgcatgcatgtacccttttagttt

SEQ ID NO: 166841 - DNA, 1760 bp, Arabidopsis thaliana landsberg
tgtccatatcaccatatgtatatacatgaatatggtaaatgcaggtggtcatgggaaatggtaaagtgaaagtgaccatatcaaaaccagatggttttgtcaccggaatctcttaccagggcgtcgacaatctactagaaactcacaacgaagatttcaatcgagggtacttagtgtagaatgtttgttatacatccatcagtctattactaaacttattacaacatatgaaatgttgtgtccaaactcaggtactgggaccttgtttggagcgatgaagggacgcctggaaccacagggaaatccgagcggtaagtatacatcgttccatcgagcttataatcaagtttttatataaatgtttataaacttggctgaggcaggatcaaaggcacaagttttgaagtagtagtggaaaatgaagagctggtagaaatttccttctcaaggaaatgggattcttctctccaagacagtattgctcccattaatgttgacaagaggtatgtcattttaatacaacatgcatttatgtgtgagtgtggcagagagtttgatttggatattgtatcattcaggttcataatgcgtaaagatgtaactggattctactcatatgcgatatttgagcatctagcggaatggccagcttttaacttgcctcagacaaggattgtctacaagcttcgtaaagacaagtaactaaagttcaatatcaatctttcccttaaaaccaatattagtatatactcatgtggaaagaaaacttgcaggtttaaatatatggcgattgctgataacaggcagaggaaaatgccacttccagaggatagattggggaaaagaggaagacctttggcttatcctgaagctgttcttcttgttcatcctgttgaagacgagtttaaaggagaggttgatgacaagtatgagtattcaagtgagaacaaagatctgaaagtgcatggatggatctcacataacttggatttgggttgctggcaaatcattcctagcaatgagttcagatcaggtggcttgtccaaacagaaccttacttctcatgttggtcccatcagtcttgctgtatgtttcttttctctcttcctccttgaaacatgttctcttatctatgatgatgggttcttacttaatgattgtgtaaacacagatgtttttgagtgctcactacgcgggtgaggatatggtgatgaaggtgaaagcaggggagtcatggaagaaagtgtttggtcctgtctttacttacctcaattgcttgcctgacaaaacctctgaccctctttcgctatggcaagacgctaaaaaccaggtttatccattaaccaaccttctaccttttgtgcatattataaaaaacttatctaacattgtaggaagtggtgtttgattagatgttaactgaagtccaaagctggccttacgatttccctgcttcagaagactttccagtgtccgataagcgcggttgcatcagcggtagattactagtatgcgacaagtaagcctcacattccaccatttgctctgcttttcttcgttttactatcattcactcaccgttgttttcttatgtttttttgttaaaattccttcagatttcttagtgatgattttttaccagcaaatggtgctttcgtagggttggctccaccaggagaggttggatcctggcaattagaatctaaggtcagccatgcaaattatactcttagaccatgtaagaatatacatgtaaacac

SEQ ID NO: 166842 - DNA, 1284 bp, Arabidopsis thaliana landsberg
gcatcgttcagatctctcgctccaactgcgataatggcgatgaaaccgttcccgagatgtgaaacgagaacgacatcgaagccacgaccatgaccgaaacagagagagcgatcgagagtttcgtgaacgtgacgttaaagctagggttaagaaattagagatggtaaagcgtgagaaatagattaacgcaatgaaagagcaatacttaggaacaacgaaacctaacaagagagtcatcatgaagccgagcaagaattttcgtttcgattgggagaatactgaagatacttcgagtggagagatgaatgttctttaccaaaaccctcatgaagctcagcctttgtttgggagagggtgtcgcgcgggaatagatcgccgtgagcagagaaaacttatgacgggtaagcacgagagagagaagcgtgaggaagaagataagcattggagtgagaagaagtgagagaagatgaatgaaagagattggcgtattttcaaggaagatttcaatatttctgacaaaggatcaaagattcctcatccgatgaggacttgcgaagagagtaagcttagttatgagctaatgaaagcagtaaaaagagcaggatatgacaaacctaaacctattcaaatggcagctatacctttaggacttgaacagcgtgatgttatcggtatttcagctacgggttctggcaaaaccgcggctttttttttgccaatgttggcttacatatctaggttgccaccaatgagggaagagaatcagacagaaggtccttacgctcttgttatggttcctacacgggagcttgcacatcagatagaagaagagatggttaagttttcgcgttacttggggtttaaggcgatctctatcactggtggggagtcaattgagaaacaagtctttaagttatcacaaggatgtgagattgtgattgctacccttggtcgattgctagattgccttgagagaaggtacgtggtcttgaaccaatgtaactatttagttcttgatgaagctgataggatgattgacatgggttttgagccacaggtttcagaagtattagatgcaatgtcttcgactaatttgaaaaccgagaaggaatatgaagagcttgaggaaaagaaaatttacagaactacgtatatgttcagtgccactatgcatcctagtgtggagcgtctcgctagaacattcttcaggaatcatgttgtggtcaccattggaaaaaccacaaagtttatcactcaacaagtgattatgaccaaagaatcgga

SEQ ID NO: 166843 - DNA, 4217 bp, Arabidopsis thaliana landsberg
atgacccacgagctcactgatggtttccagatttacacgacgcagatgaagttcttcgaggttaggtagaagatccagctgcgcaacacatccaccagcgggccttatacttccaccaaaactatctaccgttagagacctcaaaacgttgaagctacttgtgctatcaataaccaagttttccagcatctcgttgagaccccagcaatggttgatcactagggaagttgtattcactagcaaccacccaatgaatgcctctgaaacattgagactacttattgtcactctccttttgtcatgtctactaggtaaggagtttgcagttgggccaatatacaactggaatttcttcaacttttctatccaagaactgtattcaggggaaagaggtggaacacatacgaccctgatagagagaaccgacaaacgatggagacacgcaatgtcttcaagtgttgcttgcccttcttgagtttgtccttggacgccccagtggaaatgactaagcgtcatgtctagaacctctaaactagataaatgttggatcactccatctggaatgctttcgaggtgatgtgttcgagagaggtcaagtagtctcaagctgttcaaagtttccaaccctcttggcaattccctaatacgagtggcacagaggtccagaacttgaatttttgtaagactttcaagggaaggaacttcttcaaggtagtagcagtctctcaagatgagagatcggagctcaagaagcttgctgagggatagaggcaatgaacttatgcgtgtcccacttagattcagaatccgaagtgctggagaagatagcaagaaccccacaggtaatgcctcaaggtgaaaatttccttgtagcagtaaagccgagagttcaacacactctaccgcgtgctccaatacctgacggcaatttgaagacgcaacttattgatgttttgaagatttccaaattctgcctagaactttcccttatttccaaagaaggcccatcacgtttttaggtcatatatatagtttttaaggtcattgtttagacctaaggttagagaggctaatctccttatctcttttgtactttgggagcaaaaccctattcatcgattattcttcagagtttcattcagttttcaatacagtaaagagatcttttctaacttttctcttattgatttgtttatgctttcttactcaaatatgttgtttatttcaatcccatgtctgagtagtttgcttgttaggtttagagtttctcattagggattcatatggtttagtagatcgcccttttgttaggttatctataaaattcttcatctttaattgtttttaatgctagttctagagtaattaactagaaattgaatccagacaatagatatacccaccataggtatctatagttagactttttatttgatgagcctggtttataggtgtgtaataagaatcggcctatttacttaggtgaactgaattgaactcgtttataatgcatgcttaagtataagatttctcggtttctccggttattcttagctctaggcatagggagtttcgcggaacgccaccggttattccaaaattagagtttgagtttaagaatggttcgataataacctagctagtattagatcgactaaccaatagtatcctgagaataccctgttcctacctcttttcctaatcgcttacaaactaatcaatctgctgctttcttgttttgtttacttactatttcactcataccctgctagcttaatctcgatttttaactgactgtttgaacaaaagaactccgtgaattcgatcctaaaatactgcaattgatctcttatttgagagagtagttctaggtaattttgaaccataccaaatttagcgtcgttgccgaagttcttgggaatcattcattgtgtttagtttagagattttgtctagcttttacgtttattttgttactcacgctttttttgttttcttcttttctgtgtttcaggtgtatggctaggcaaacaaggagcacacaatagaaggagcttatcaacttgtctattttggacttgggaaaacttagagattagcaatggctgaaagagtcataggagctgatgaggatgggcaagcctacaatgaggctggtcaaagattggattatcatggaatcatcctacttgaggacgtcgatgcaaattaggcgcgcctcaacgcgcaattagctgccagagatgcagtagggctcgttgtcgatcgacaccctcgggagaagaatgacgatgcgattgatgtcgaacgaaacaacataggtgtcgatcaacaccaacaccagattcctgcagctattccttcagctgcgaaaccacgtcgtactcttggggatttcaactggcctgacctgttctttgctaatcgatcagcgatcgtacccacacccttccagaggaacaactatgagctgaagcctggctactttgctttagttggccagcattctttccatggcttatctcatgagcaggcaatggaccatatagagcgctttgaggaccttgttctgagcatcaaggctaatggagtctcagaggactacctactgtgcaagctttttccttattcacttgttggggaagcagcttcttagctgaaataacttaaagcaggttccctcaagacttggagaagcatcaagatagccttcttgaacaatttttacgatgatgctaagtatgaggagttgagaaacaagctgtctaccttcacacaaggtccagctgaagctttcaaggctgcttaggttcgtttcaaggagtaccaacgagattgcccacatcatggtttcagtgaggtacaacttttaggtaccttcttcaaaggagttgattggagataccagatacctctagatgcagcgagcaatggtaacttcaacacacgttatccagctgatgctacgaccctgattgagaacctcgcttgtagcaacagtaccaagaatgctgattttgagagaaaaaagattgctggagctatttcaggaaatcagatggcagaggtgaatgctaagctggattcagttcataacttgctcatagggaaaaagcatgtccactttgtagctgaagaagagactattgagcctgagcctgagtcagagaaaggagtattctgcatagatggtcagggatacaggaagtttgggcagccacagggcaacttcagtggcaacaggtttacagagaaccagggttcctccaactacactccaaagcctgctttccagaagacctttcttcaaagtagctttcagagaaactatggtaattcaacttaccaagccccccccccccccaccctcatcagaaacaagaatggaatcaatgcttgagcagattctggagagccaaacaaagcttgttttgaagtttaatgggaagtttgatgctgtctacacagatcttaatgggaagatcgacaatctgagctctcacttgaagaagctagatgtacaggtagctcaaactgcacaatctatcaagagacaagagggttttcttcctggtaatcctgatgctaatccaaggaagagctgtaatgccatcttgatcagagaaggagatgatgtgtgagaggaattggacactgaagacgagttggagattgcagttgcagagatggtgtcgaccgacaccctcctgtgtcgatcgacaccataggggatgctcttctcagagacgactaaatacgacggtgtcaatcgatacccctctagtgtcgatcgacaaaataggggatgctcttctcagagacgactcaatacgacggtgtcgatcgatacccatccagtgtgatcgacactggatccggactacaccttgtgaggtgcaagtacctatgcagcccgagcccgtttacactcttcatgtcccctatccgaggaggcgtcgttctaagcaggagattcacgctgctaagtgcacagccataatggagaagatcctctatactcttcctaaggatgctttagagacatcttccgcctcactcaacaggtatgtcaagcgacttgttgacaatggaattagcttagatgaagctaagctgcttaccagagacatcagtgcaatcatgctgcctcaggccaacaaggagaaggcacatagagtagaaatagctgagtacatccgcaccattactcctggtcc

SEQ ID NO: 166844 - DNA, 1288 bp, Arabidopsis thaliana landsberg
gcatcttgttcttgagctatctcctaatggaagccttgcttctttgctctacggtgatatataattctcttttgtttgatgttttcaatgtcatctcaaactatgatttggatcaaaaaccaaacaaacatccttgtaccattttgtagaggcgaaggagaaactgaattggagcatgagatacaaagtggcgatgggaacagcagagggactctactatctccatgaaggttgtcagagaagaatcattcataaagacattaaagcttctaacattcttctcactcagaactttgaggctcaggtaattattactaagaaaaacctaagatcttcataccctagtttattgtcttttgaagttattattatgaaaaaagatttattttgaagtaatttattgatttttttcgaacaaatgttgactatagatatcggatttcgggctagcgaaatggctaccagaccaatggactcaccatactgtatcaaaagttgaaggaacattcgggtttggaatctctctctttgttaaagatcatacacactgattcacaaatatcatgtgttttatatattatctatcttacataatctcttatgtgttcatcgatcagttaccttccgccagagtttttcatgcatgggatagtagacgagaaaacagacgtatatgcttatggtgtcctgcttctcgagctcattaccggtagacaagccctcgacagctcacaacatagcattgtcatgtgggtatgtgatgtggctacctcttcaaccatagctagatagaatccttatctcgtactttcttcaaaatcctagaaggtttaaaactaattgatctgtttttttcattgtgaaatccctaacatatctatgtctttgtaggctaagccattgatcaaagagaacaagatcaatcaacttgttgatccgattctggaagatgactacgacgtagaagagttggaccgtcttgtcttcatagcttccttgtgtatacatcaaacctccatgaaccggcctcagatgagccaggcaagcatatcaaaatattcaattccatcatcaagttacatatacaggtgattaatttggtcacatatacaggttgtggagattctgaggggagacaagtgcagcttagataagctaagagagcgagaaaactccaaactccagaggacttactctgaagaactattggataacgaagaatacaactcgacaagatatttaaacgatattaatcgacacatggagaccgttctcggaacatctaagg

SEQ ID NO: 166845 - DNA, 4353 bp, Arabidopsis thaliana landsberg; identical to SEQ ID NO: 24149
  unsure (1)..(4353): unsure at all n locations

SEQ ID NO: 166846 - DNA, 1074 bp, Arabidopsis thaliana landsberg; identical to SEQ ID NO: 25875
  unsure (1)..(1074): unsure at all n locations

SEQ ID NO: 166847 - DNA, 923 bp, Arabidopsis thaliana landsberg
  unsure (1)..(923): unsure at all n locations
atgaacagagaagtctctgagagaattcatattttgttcttccccttcatggctcaaggccacatgattccaattttggacatggccaagcttttctcgaggagaggagccaagtcaacccttctcacaaccccaatcaacgctaagatcttcgagaaacctattgaagcattcaaaaatcaaaaccctgatctcgaaatcggaatcaagatcttcaatttcccttgtgtagagcttggattgcctgaaggatgcgagaacgctgactttatcaactcataccaaaaatctgactcatttgacttgttcttgaagtttcttttctctaccaagtatatgaaacagcagttggagagtttcattgaaacaaccaaaccgagtgctcttgtagccgatatgttcttcccttgggcaacagaatccgcggagaagatcggtgttccaagacttgtgttccacggcacatcatcctttgccttgtgttgttcgtataacatgaggattcataagccacacaagaaagtcgcttcgagttctactccatttgtaatccctggtctccctggagacatagttattacagaagaccaagccaatgtcaccaacgaagaaactccattcggaaagttttggaaagaagtcagggaatcagagaccagtagctttggtgttttggtgaatagcttctacgagctggaatcatcttatgctgatttttaccgtagttttgtggcgaaaaaagcgtggcatataggtccactttcactatccaacagagggattgcagagaaagccggaagagggaaaaaggcaaacattgatgagcaagaatgcctcaaatggcttgactctaagacacctggctcagtagtttacttgtcctttggtagcggaccggcttaccnaacgacagctgttagaga

SEQ ID NO: 166848 - DNA, 559 bp, Arabidopsis thaliana landsberg; identical to SEQ ID NO: 20021

SEQ ID NO: 166849 - DNA, 3489 bp, Arabidopsis thaliana landsberg
aagttcccgcctggttttatgtcgttgctctgtctctgttgtagcagctgtttgctcttgagtaggcccaaccaaggcactatcaaatgcaaattggtgaagttcctcctctgagtcataatttgactcgttagtgtcctctgaattgaagttcttgtcagctacagcaacatgagaacttggaatagtatgttggacgacagtgacaaagagattcacctcctctatatgccgcctcatttgaatgaacattgtaacatcactattcactaatttattgaggaggagagtcgttcccttaatctatagccatccactctggatattggtatgccattttgattgtaatgtcttttccacgaaagccaagtttatttttcaccttctgagctagctctccgtacgtcatgttggtcctgaggcagatgaaggacgctcctttgacagtcttaggttcaaactgcgaggctaaattatcaaccctgaccaacttgccaattaccaacaatacttcatcttgtcctgccgtatacatggcgtagggaaataggtcattaggtattacaaagaatataataaaaaataattgtaaatctcaacccttaatgacagttttccaattaatttcagcgtaaacattaatttcgtactaaaacagaaatcgtgattcacggtttaattttagtaaatcctaacaagtcgtttaccagatctaaatcatggtaagttgtctattcgaaagaaaaagtcagtactttaacatggaaagtttatactagtcaaacgatggttctttgaaatagttatttagcaaaatatagttacttggtaaagaaattcagagttgaatatataattgtttgagatagtttcgcacagttattatatagagtttaatatatattagtttagtaaagttttctgaaaaatcttttcgacaaaaactgtcacatagagttattatatagatcttcatgtctatttgttttgtaaagatattgggtagagttattaagaaaatttgtcacgtagtaatgagaaaattcttagtaattactttctcatcattcatcttttctcacattcttagtaatttctcattatgtcacttcttttcttatgggatattctttcatatatatttgaaaattgttgagagttgtttcgtaaatttagtttatcacagttattatttacatcttatatattactatattttctaatcaagtattttagtacacttaattataagttttctcataaatttagtttacacagttattatatggatcttaactatatttgtttgctaaagttttatagtaaagttactatacaattttttttagtaatttagtttcacacagttattatctagatttctaagtatagttgtttgctaaagtttaaggtaaagtttatattttgaccaaaaaaaaaaaagtaaagtttattaagtaaagttagtttgtgaagttattatgtagagtcagttcgtgtagagttttttttttaatgaatggttattatgtagatatagagatattacattgagtttttgtgtagagtgttaaactaatttgtaaaccttttttctacagaaacatggtacatacaattgcagttttaggtgaatggatgttgaagaacggatgactttttacagttgatcaaaccaaaggctgcaaattactagttctagtggatgatatgtcatatgttggactacttcagatagttgaagaagaattccaattatataactcaaagcataatgtggaactcagttatgcactacctaagataatggtagggaatatgtcaaataaaacgcctcttcctatgtttctgacaagcgatagacaagtaaggagtttcattgaaatatacaaatctatccctgtccgactttgcaaaaatagagttgttgtgtgcaaaaataatggatgctcttgaagagtgcgagcaaccaaaaaggatgtaacaacagagtttttttggattagaaagtgcattgatgtgcgtacatgttgttctgaaaatagaagtttttcactaggatcaattatacaaaaaattataggccaactcatattggatcttttcggtggtattaacaatggattgtatccaagggatttggagaaaccactacggaagaattatggtttaaggcttacaatcaccaactttgggatgctttgtagcaagctcgtcaattgatgagaggttctcctgaaagtggttatgagcagctccctaagtacctctacaagataaagaaagcaaatcctagtacagtttcctacctagagcttgaaggtaaccaaagatttaagtacttattttttgcccttgatcaatgtttaagaggttttgagtttatgagaaaggtaatcgcagtggatgggacctctctcaaaggaaagtttaagggtaccctcatagttgcaactgttcaatatgaggataatgatatatatcctattgcatttggaattgttgattccgaaaataacgcagcttgtgaatggttttttactcgtttgaaatcagttatctctgatcatccagacttggtgtttatctcagacaggcatgaatatattgaaatagctattgaaaaggtgttcccctctgcaaatcgtgggatatgcttctttcaccttcagaaaaacatcgaaaccaattttggagcaaatcaattatttcacttggttaagaaagttggaaataaatttagtcgtgatgattttaacaatgtcatggatgagatacgtcttcttaatccaaagctgagcaaatacttggaagatgtggatattcaattatggtctacggctcatttccaaggaaacacgtataacatcaccacaacgaaagttgctgaatcaatcaatggacttttaaaataagcaagagaggaccccatcgtagcttttctcaatcatgtacggcctactctaactccctggttttgtgagcgtcaactaaaagctgcaaaacttgtcacgaacttggaccatatgctaacggtgaattgagaaaatacgtgaagaggaaaacacacttgcagtgtggcccataaatctaaatcaattcaatgtgactgatggctcacaagatgcaatagttgacatgcagaaattgagttgttcatgtcgggtgtttgatataaagaggattccatgtatgcatgccattgtagtggctacgaagaaacacattccatagcacacgctcttggatcctttctagatattctgagtccatttatcaggttccagggattcttaatgatacccaaataccccgcgaagttgaaaaagtcagtgtctacctcctcaaggtcgacgtcgttcaggtcgaccaaagaaaaaaaggattcgatgtccattagagattgcaatggagaacaagcgaccacgaaaagaacacaattgttcaagatgcaagcttcctggacataatagaaaattcttgctcaag

SEQ ID NO: 166850 - DNA, 1006 bp, Arabidopsis thaliana landsberg
ggtagatgaaacctcaagtattggttttattctgttcattagatctctttttcggtttttaagacacatttcattttgcatttcgttaggtaaggttgcagatgaatccaaacgcagttcccattgcagaagtgcgggatatagtctctaaagaaggcataggagctttatggaaaggagttggtcctgccatggttagagctgcagcactaactgcctcacagcttgcaacatatgatgaagccaaacgggtcatattctaagactactattttccactttttaaaaaccatgaagtaatttccatgatctgttttgaaattgagaaattgtcaagtaatcctgcttctcaaccatttattgattctaacacttcagcttctaaattttcttgtaattgcagattctggttaaacgaacttctttagaagaagggtttcatcttcatttgtggtaaaagtttagcagtaattactgctgtttctttttcagacaaaaatcaattgaagcgtcaaaaactaacttactttagcacttgaggaatgaagctcaagtgtggttgcaggtttagtaagcacactgataaccgcacccatggacatgattaaaacccgcttgatgttgcagcaaggttctgaaagcaccaaaacctacagaaacgggtttcattgcggttacaaggtaatgttttcaagcccttctattaatacattctcactgagcattgcttgtttgcttgcgttgatcgttaacgagtatgatatttcaggttgttcgcaaagaaggtcctctggcactttacaaagggtgaagaaaaaaaaaccgtcttgttcatgaagatatatttatataattcgtagtacataaattaataaaaatgtattatgttttcttacttgacacagaggctttgcaattttcgcacggctcgggccacaaacgatgatcacgttcatactatgcgagaagcttagatcactcgctggacttcacacaatgtagccac

SEQ ID NO: 166851 - DNA, 1214 bp, Arabidopsis thaliana landsberg
atctcgagtttactaatgccgcggcttccgtcgtctcgtcgcggtgtcgtgtggtttcgatggaagatactcatcactatctccaccgcattatgcatcctcgctctcttctgtatcaaccgtcagtctaattccactgcgacgacgacgacactgtcttcgtctctctccgtcgcgagatctcgtatccctctcgttaaatactccggcgatcgtcccaaactcgccttccttttcctcgctcgacgtgatttgccacttgattttctctgggacagattcttcaaggttcttaaaaaaaactttgattattcattgaattttgaaaacatttgctcattgttattgtgtgttttcgcagagtgcagatcagaggaatttctcaatctatgtacattcaatacctggtttcgtattcgatgaatcatccacaagatcacatttcttctacaatcgtcaattgaagaatagcattgaggcaatatctctttcgatgcattgattttagatagttcctttttgttctgaggattttgatggatgaattgattcacttgttcaggtagtttggggagaatcaagcatgattgcagcagaaagattgttgcttgcatctgctttggaagatccttctaatcaaagatttgttcttttgtctgataggttggtctctttattctatctctgactagaagatcttattgacgttgaagttaagccattggtttttactcttttgtgatgcagctgtgttccgttatacgactttggttacatttacagatatctagtttcttcaccaaagagttttgtagacaggtgattttgcgatttttgcgtttcattttgtttcgtaaaactatatagagcataagcagtagatataattgcctcagctagctgttgttgtgttataactgtgttgctctttgtttgcagcttccttgataaagataatcgctacactatgaaaatgtttcctgttatacggaaagagaaatggcgaaaaggatctcaggtctgtttcttatcatgtttgatctctggaatagaaaaaatgaacttccttattttgcttttgaaatgaacttttgtagactgtttcctttgcaagatattggaactttgagttgcttttggaaaataagctccacagacagtgacagaatttttattgcagttttgtgaatcagtttttgtttgttgcagtggat

SEQ ID NO: 166852 - DNA, 707 bp, Arabidopsis thaliana landsberg
atgaattcgaaatttcgatataacaaaccaaaaggaaagaagcaaaaaaaaaaaaaaaaagctctggattcggaatctcagataaaaaaaccaacgatgccgataaaggtattgtcgtcgcttgatgtagctcgaacacaatggtaccatttcaaagcgatcatagtagcgggaatgggtctattcaccgacgcatacgatcttttctgcatagcaccggtcatgaaaatgattagtcatgtttattacaacggtgactcaatcaacacagccgttctttcaacttcttacgccatcgctttactcggcacagccacgggtcagctagtcttcggttacctcggtgaccgagtcggtcgtcgccgagtctacggactttgtttgattattatgatccttagctcctttggttgtggcttttccgtgtgcaccactcgtcggtcttgtgttatggttagcctcggttttttccggttctttcttggtttaggtatcggtggtgattacccactctcggctgcctttttgtcggggtttggctggttggggggccccgtggcgcgtttttcgctccggtgttttcgttgctcgggttggggcttttggtttgctctgccgtgcccccggctgtttgcgtggcgcctccccctgtggcggtggtttggcggtggtttattatgctccgtcggttgctgtcttggcctggg

SEQ ID NO: 166853 - DNA, 659 bp, Arabidopsis thaliana landsberg
cattttctttcttctcggtagacacatttctcaatgattgccaatataagatgctttctttcttgttccacaagaatgtgaaattatattttgtttatcttctgtttcatcacaaattttgctgtggtggtagactaatctttggtcctgatgtatcatctctgtacctaacctccttcttgattggagctcctgcgcttacattttgcataagaatgctggtgtggatcaaaagaggagatcctttcttcaactataccgttctagcttcaggatttatcctcaccctcttggattttacgtttctaatgttgacatcagctagggatccaggaatcatcccaaggaacaaaacatcaatgattcttgaagatgattcagatagttccttgacacaatttatggaatgggtcaacaacaaaactcctaatctcaagattcctagaaccaaagacgttttcgtcaatggttacactatcaaagtcaagttctgcgatacttgcttgctctatcgtccacctcgagcatcacattgctccatctgcaacaactgtgtccaacgctttgatcaccattagaccataggttggtcagtgcattgcccgagtaaattattcatcaccacttcttgatcatatatataatatacccactcgtgt

SEQ ID NO: 166854 - DNA, 938 bp, Arabidopsis thaliana landsberg
aactagcatttttccttctcatttgcataaaaattatagaaagcctcatcacatcgaggtatacaactttctatgcaacaacttagttgttgaaaaccgcaatggatgcattctacctcaagctcgtgtatctgaaaagacgtatttgatgatcaacttcatctatggttaccttgaaaagcaatcgaatagcaaacatgtatttgtgcttccaaaatgaatgtttaactattggataaatagtttgatgaaaagaaagtcataactttaaatggaaaaatgacatcatgttgcttgactttatactcagcaattagaggttttaaagctatggattacaaggtggggattttttcttgagggcaagcaattccccaacatggtatttgattccaatgttacagaagtataaaatgattgtaaggacattctcttaaatgttccttcactagttatctttgacagaggaactagtccaaggagcaagatgacgatctttcctaagattgttgcttgtatcaagatgactaacatgttttacactcgcttggatattataccaagaaaacataagagatgtttattaacatttttatgttattttccacgagtatctggagtatatcctagctggggaaaaacattaagaaattcttgaatgttgatgaaaacactagtagaccttcaacgaatttgaagatgtcgttgtttattaaattggaagaagtttttcttagccaaaattctaatcatggagacaagattggttacttaaacaaactaagaatgttagcaaacaatgttatttataatcacaaagaaaagtttcttcttgaagtcgcatgattaatgcacttcatggtggtctacaatacttaatgagtgcaaacaaagttatctacaatattttaaaccagaggtcaacatgtgagattgaa

SEQ ID NO: 166855 - DNA, 326 bp, Arabidopsis thaliana landsberg
  unsure (1)..(326): unsure at all n locations
aaaatgttgtttcgcaagaaaaaacgcgagagattacgatctccaaagccgacgattaagggtgttttgatagcgttttttgcctctacagccgcagtattcctcttgttgctggccggtttatcactagttgnnnnnnnnnnnnnnnnnnnnnntccatgccgctcttccttgtattcagccctgttctcgtaccagcgggtattaccgccaccgttcttgctttaagtttaatggctggaggtactccggtctgacggctctcaccatcttaacttggctctataagtaagtaacactaacctacaaaacattcactttctata

SEQ ID NO: 166856 - DNA, 373 bp, Arabidopsis thaliana landsberg
ttctctcgttacattaaattttagatgcaagactcttcgtctcaacgtaacctccggtcaccggtgccggagaaaaccggaaagacctcgaagactaaaaatgagcagaaaggtgtttctaagcaaccaaactttcgtggggtcagaatgagacaatggggaaaatgggtgtctgaaattagagaaccaagaaagaaatcaagaatctggctcggtactttctctacgccggagatggcggcgcgtgcacacgacgtggcggctttagccatcaagggcggttctgctcaccttaatttccccgagctagcttaccatttgccgagaccggctagcgccgaccctaaagacattcaagaagccgccgcagcag

SEQ ID NO: 166857 - DNA, 940 bp, Arabidopsis thaliana landsberg
aagaagcatagacatactgataacaaactgtagtttgcattcgccttcaccgtctctaagtgcaatggtgatcaacaaattccatatgagaagcaatatcaagagctttaacctgtctgggatgggttgtgcggctgggattctatcagtcaatttggctaatgatttgctacaggctcaccgaggctcattggctcttattgttagcaccgaagcgctgaacacacattggtacattggcaaagacagatctatgcttcttactaattgtctcttccgaatgggagcagctgcagttttgatgtctagcaatgatcatgacagagacaatgcaaagtatgagctcttgcatgttgttagaaaaaataaagcgaaagatgatcgagcttaccgatgtatctatcaagacatagactctgatgaaaagcaaggggtgtcgataaccaaagatgtaatcagcgttgctggggatatgctgaagatgaatctaacttcactgggacctctggtattaccttacttagagcaattccaatatgtgatacaacacattctttgcaagaaactaaagatctatgagtcgaattcttcttatacaccaaacttcaagacagcgtttgagcatttctgcattcatacaggaggaagagctgtaattcaagcaatggagatgaacctgaaactgacaaaagtagacatcgagccatcaaagatgactcttcataggtttgggaatacttcttcgtcatccatttggtacgctctctcttacttggaagcaaaaaggagaatgaaaaaaggcgatagggtcttgcagattgcatttggaagtgggttcaagtgtaacagtgcggtgtggagatgcatccgaaaagtggagcccaacacagaaaacaaatggctcgactttatcgactcatatcctgtagacgtacctgac

SEQ ID NO: 166858 - DNA, 1328 bp, Arabidopsis thaliana landsberg
  unsure (1)..(1328): unsure at all n locations
gtttctccagactcagggtttggttcttcctcttctctactgtgccataaccacccttttgttccatataccagtttgtttgattctggtttacgcgtttggtcttggaagcaatggagccgccttggctattggtttgtcttactggtttaatgtcttgattcttgctttatatgtgagattttcaagcgcttgcgagaagactcgcggctttgtatccgatgatttcgtgttgagtgtcaagcagttttttcagtatgggataccatcagcagcgatgacaacgtaaaaacattcatcttcttcatcgttggtgcattcttttctttcttggcttgatttgtttttggtttctatatgcagcatagagtggtcattgtttgagttccttatattatcttcaggactcctcccaaacccgaaactcgagacctctgttctttccatttggtaatctatgtttctctctggatctctattttcctttaacatatctagtatcatgaggacttgtcatatatatatatatatattggtctattgagtaaatgtcacataaaccaatttttactcttccttttattatctaatttagtgatgtaatcttgttggttgttgttgctgtgttcatgtagtcttacaacatcatctctccactatgtcattccaatgggtattggggcggctggaaggtatgattcggataattcttattcaatgtttgtttggaaattgtcagattagtctcactatttacccttggcagtatacgggtttcaaacgaattgggagcggggaatcccgaggttgcgaggctggcagtgtttgccggtatattcctttggttcctagaggctaccatttgtagcacacttctcttcatttgtagagatatcttcgnnnnnnnnnnnnnnnnnnnnaaagaagttgtggactatgtcacagagctatctcctttgctttgtatctcatttttggttgatggattttctgcagtgcttggtggtaataaaatcaaacccattaactagcaaatcaaataaaagaatcgatctacgcgactcaaaatgtgttttgtttgttatgactttttgaaaaggggttgccaggggatgtggttggcaacacattggagctttgaacaacgtagtagcttattatctcgtaggagctccggttggaatatatttagctttcagttgtgagttgaacggaaaaggactatggtgtggtgtagtggttggatccgctgtgcaagccattatactggctattgtcacggcttccatgaattggaaggaacaggttagagcttattacaatacgtt

SEQ ID NO: 166859 - DNA, 467 bp, Arabidopsis thaliana landsberg
gatggggcacgttgcttcccaatgtctcggtttatgacaatttgcgtggcacgtattcggtctttcatttgcggttcaaagaaaatgaatttcgtcgcttgttagatgaagtggtcggtttctttccactattaggtgaaagaatcaaacaggcttcgggaactatgagtggcggccaacggcagatgctggccgtcggccgtgctttgatggccgagccccgggtacttttactcgatgagccatcggcagggcttgcgccgattatcgtggaagagctgtacgagatacttggcaaggtcaaagccagccgccggtgcaccttgattctcgcagagcagaacgcgagctatgccgtgcagtttggcggagattgtattgttctggctgaagggcgggtcgcgctatcaggcgcgatgcagactgtgcttgcagatgaacagctgcgaactgcctatttgggcctt

SEQ ID NO: 166860 - DNA, 677 bp, Arabidopsis thaliana landsberg
cttctaattccatgggattctcacaacaaggcttgcagctttgatcatctctcctcaagcaaaaactgaagctcttcgataagaacatttgcggttaaccaattgacaatgagtggagtgatccatgtattgtatatactagattaggtctcttcttacttgaaagtccgtgaattctcagagtggagccgagttatcaagagatagagagtaaagacatagcagaaacagagaaagatggtgtgagagttagagtcatagcaggagaatggaatggagttaagtcaaagatctgcacaagaacgccaacaatgtatttagacttcactctctcgccgggttctcgaatctctcaacccattccacttcactggaacgcgtttgtctatgttcttcaaggccatggtcactttggggattccaagttacaacattcagccgctgctgcgcaccacttgctggttctaggcctaggtggtgacatgttagaggcttggaacggttctgattccggtttgcctcttcggtttatccttgtggctggtgagcctataggtgaaccaatggttcagtttggtccttttgttatgaacacacaagaagagattgatgagaccattgacgactttgagaattttagaaatgggtttgaaaaagctagacattggaagtctcaa

SEQ ID NO: 166861 - DNA, 425 bp, Arabidopsis thaliana landsberg
  unsure (1)..(425): unsure at all n locations
gggatatatatcaaacaccaacctatgnatatatatggctgcattggttggtatagcataaaacctataacttacgtatggtgtaagtatnnnnnnnnnnnnnnnnnnnnnnnnnnnnnnnnnnnnnnnnnnnnggccacattaaccatcaatcatggttacacacaatctgatgtatatataggagtaagctaaagcacacggaaatggaatgtgagtatctaaaaagatggttcggatcgttgaaggaacaaaatcgacggctacaagtagaagttgaagaactacgagcgctaaagccatcatcgacctcggctttaaccatgtgtcctcggtgtgaacgtgtgactgatgcagtagataatgactctaatgccgttcaagagggggcagttcttagcagccggtcacggatgacaatttcc

SEQ ID NO: 166862 - DNA, 433 bp, Arabidopsis thaliana landsberg
agctatagcagaattcacagagaagaggttgatgtctcttagagttaatgggtgtctagttctatccgaacagaaactgcgagcaattgtagagaacgcgaaatcggttcttaaggtaggcactgtgtgttttgctatgaaattttggatactatgtgtttactgaatagctttggttgtaaactgaaaacaggtcaagcaagaatttggatctttcagtaattattgttggagatttgtgaaccacaagccattaagaaatggctatcgatatggtcgtcaagtaccggttaagtccccaaaggcagagtacattagcaaagatatgatgcagagagggtttcgctgcgttggtcctactgttatgtattccttcttgcaggcctctggcattgttaatgatcatctcacagcttgtttcagataccaagaa

SEQ ID NO: 166863 - DNA, 645 bp, Arabidopsis thaliana landsberg; identical to SEQ ID NO: 11314

SEQ ID NO: 166864 - DNA, 335 bp, Arabidopsis thaliana landsberg
ccagagacttaactggaaaagaactcattgatctccgtgaagaagttggccagcaccagcatggtgatgaactggtataatccttttatccaatcacatttgactttcttatcatggtcttaaatctattccatctctcaaaccgtttttgttgttcgattttaaagaggaggcgtgttggatcggaaatacagagactggtcgaagtagattgctacagaggtagtagacatagacatggattgccttgcagaggacaaagaaccagtactaacgctcgcaccaaaaagggcaaagccgttgcgattgcaggaaagaagaaagcccctcgcaag

SEQ ID NO: 166865 - DNA, 696 bp, Arabidopsis thaliana landsberg
tcgagtgacagtccagctcgggcagctggacgagtgacggttgagctcgaggtagctggacgagtgacggacgagctcgaggtagctggacgagtgacggacgagctcgaggtaactggacgtgtgacggactagctgggcggttatgggcgaagagatacaactcttcggaaaggtgcaactcttcggaagggcgcaactcttcggaaaggtgcaactcttcggaaaggtgcaaggaatgtgttgatttgggaagcatccattcgccccctatataaggaagggcgcccaggaccattccactcaccacaacacaccgaaaacacaagaaactcaccattaaaactctctccctcttgggagaataaatagtcttaggattcggtagccgggctgtggccgacaataaagaagaagggtcggatcgacctaacctcgagaaggaaggtaagggatcctagactttgagtctaagtgttctaggatgtgagttaaaggatcgactagagggctgggtagtatccgggtcatgtgcatcctacacaagactcggtccgggtatggatcggctgaggcggggacgcagctcggcggaggaccggcgggtcttaattgacctgccgagaatcggctggactgatgcgcgatcttcccctctctgaatcctctccacggatccgagtagtgtatggcata

SEQ ID NO: 166866 - DNA, 859 bp, Arabidopsis thaliana landsberg
tccagaaagccgagggttttgcgatcgattctagcacatcttcttcttttgcaaaaccatgttccttatgttcttcttcaaactctatttgaaacatcgaacttagttactcgtagtggtttaaatgacatcgcctttgaattctttaactactcattacaaaaaccagatacgttttgggaaaaacattatggtcttaaagcaaaacatccttcttgatttgatacgtaagacttttgttcctgttccgtctcaaagaagcatcaaagatcatagcagtaaatcgtcattcaatgatcatgaatatctcggatttgttctctctgccaagaagcttcatcttcggggaatcaaattcaaaccgaggaaaaacacagactcaatcttacacataagttatagtaacggtgtgctacacattcctccggtagtcatggatgattttaccgcctcgatctttttaaactgtgttgcatttgagcaattatatgctgattcatcgaaccacataacgagctacgtagctttcatggcttgtcttataaacgaagagagtgatgcagcgttccttagcgaaaggaggatcctcgagaactattttggaacagaggatgaagtgtcccggttttataaacgcattggtaaagacattgccctcgacttagagaagagttacttagcaaaggtgtttgaaggagttaacgagtatacttctcaaggattccatgttcattgtgcagaatttattcatacgcatttcgatagtccatggacatttgcatcatcatttgcagcgttgttgcttcttctgtttgcggctttgcaagtcttctttgcagcttatagttatttccgtcct

SEQ ID NO: 166867 - DNA, 1590 bp, Arabidopsis thaliana landsberg
atgacgaattcgttgatcaagatgtcggtgttcgacggaagtggtgacttctcactttggaagacacgcatgttctctcatcttcgaatcctaggcttgcaggatactctagtggaacaagctctgttcccaccactgaaagaggaagatgaatcagatccggagaagaatgagaaacatatcaaagaagaaactgggagaattgaacgatgtgagaaagctatggtcattatatttcttaatgtcggtgataagatactgagaaagattgatcattgcaagactgcagcagaagcatggatgttgctagaacgattatatctggtaaagactttatcaaatcgtgtgtatcttcaactcaaggtttacaactataggatgcaggaatcgaagacactagatgagaacattgatgaattcttgaagatgatatcagacctaagtaatttgcagatccgagtccccgatgaggtacacacgatcttgattctgagttctcttccagccaaatatggaagagaaggactacaacttgaagaggtaataagcgcagcaaaatctaagaaattagagtttcaggcagaatccagttctaagtctacagcaaaaggaaatcagaacaacaattcaaaataaagatctcaagatggtaagaagatatgttggatctgtgggaaagaaggtcatttcaagaggtaatgttataagtggctagagaagaataagtcaggtgaatctggactggcaaaagatgatgctcaagacttggttggtttagtagcatcagaggtaaacctgagtgagaatcagcttgaccagcatgaatggattatggacaccgggtgttcttttcatatgacaccaagaagggactggtttgttgagtttgatgagtcacaaaccggaagagtgaagatggcaaatcaaacatattctgagatcaaaggcattggaagcataaggattcagaatgatgataatacaaccgttcttctcaagaatgtgagatatgtcccaagtatgtccaagaacttgatctcgatgggaacattagaagatcaaggttgctggttccagtctaaggctgggacattaaaggttgtcaaaggctgcatgacactacttaaaggaaagaaagttggtactttgtacctcttgcaaggagttgttgtaacaggaaatgcaaacgcagttacaagctcaaaagatgaatcaaagatatggcacagcagattatgccatatgagtcagagaaatattgatgtgttgatcaagaaaggatgccttcaagctgaaaagataaatggtctcgagttttgtgaagactgtgtgtacgggaaaacacatagagttggttttgggtctgcaaaacatgtcacaagagagaaacttgagtacattcactcggatctttggggagcgccatcagtaccaaactcactaggtaattgtcagtactttatcacgtttattgatgaccttacaagaaaagtatggatttattttctgaagaagaaagatgaagcttttaaaatgtttgttgaatggaagaaaatggtggaaaatcaatcaaacaagaaagtgaaaagg

SEQ ID NO: 166868 - DNA, 1562 bp, Arabidopsis thaliana landsberg
atggtgagcttgtctgtttcaaatatgagatacacgaaagtgagagtaagccgactagagaagccattgacattgaccatgtcattacaaacggaagcagagcaactggttatgggggcttgtgcttgtggcgagttctacgtaatttttgcttgcaatttccctgcgagactgatcactgatgtgctttccttctctcgtgacaacaatcttcaatcaatcgagttcactttttagttcgtgactccctaatttcacacgatcaaagatctcgcctccgaaacgctttcaccgaaggattctttcaacggcggcgaaggatatgattacacaacggagaaggatgcgcggaagactatggccaagagagggatagtgaaattaacgaccagttggcagattcgtaggctttaaaactacaattcgactgcggaggaagaagacaaatttgtgtttcatcgatcgatcgataatcatcaccagcgagaaccaaggtttgcgctttcctaattttctttttctgtaataaaagatttttacttttaaaagattttttttatgtttaattttatttatttttaaactgaatctacatacagagatgtaaataaaaactagccggattttggatcccggcatagattgttagttattccaaatattcaacttgttttcatatcatctttatatatatttggtatcaaagtttcttattcggattttttaaagcttttttgtttttttttgttttattttgtttgatactaaatttacataatggtatgaaatctaaccggatttttgatccagcttcggtcgttagtgattccaaatattcaacttgttttcatatcatctttatatagatttggtatcgaagtttcttattcggattttaaaaactttttttgatttttttcctttattttgtttgatactaaatttacaaaaaaatatatgaaatctaaccggattttggatccagcttcgattgttagtgattccaaacattcaacttgtttttcctattattatgtagattaaatattcaagtttttacttcgcatttttaagagttttttttttttgttttgttttgtttgatactaaatttacataaagatatatgaaactaaccggattttggatccagcttcggtcgttatcgattccaaacattcaacttgttttcatatttttatatagatttggtatcgaagttttttattctgatttttaaaaatagtttttaaaattttgattttgtttattgtcggattttaaaaatcttttgtgtttgtttgtttgtttttaaatttattttgatactaaatttatattacgatatacgaaaactaaccggattttggatccagcattagtcgttagagattccaaacattcaatttttatttcatattattattatgtatatttaacattcaaattttggatccagcattaaaaatttcagttttaagtaatgactcgattaaggcatgaatattagattttccttgcatctgtgatctcattgggaaggtttgttaccaattgaagag

SEQ ID NO: 166869 - DNA, 787 bp, Arabidopsis thaliana landsberg
aggcacacccgtactcgcgtgctcaaccaacggctttggcagattgagggaccaaaccatgtttgttgccaaatgggaacctgggctccgcccagttaagccagagctcacctctgccccgatctggctggagctccgaaacgttccttttcaatgcttcaatgatgacgggttggagcacattgctagtctcgttgtgaatgttcaattccagtctggagagattagaagagtggaagtgtcaagcccgtggatgcctcctatttgtgcccactgtaaagaggttggccacagcttgcggcggtgtaaagcagcaccgatcacctgtaaagcctgcaactctacacagcattctgctgatgcttgccccagggcaaagtcccaagcagagaagaaaactccaagacgtcggcgatctaaaacgccgaagccgatgctcaaagaaggtgactgggcggctgtagggttgggcaagcggacactgcaagacaagccagttcccttaattaaccctgatgctgccacctcctctcgggggaagcgggtgacagatgctcctaagcagaaaggctctgttcccaagcctattgggcgcgaaagcaagcagaagaagcaagttgcccgaactaaagatgtggcccctatttccgaggaggatgacgactcttctgatgtcccatcgtcgccctacgattcagatactgatttggaagatgaagagcagttcactgaagtgttgtctcagcgacaacaacgcagtgcgaggggcaaaggtcccaaatccctt

SEQ ID NO: 166870 - DNA, 1691 bp, Arabidopsis thaliana landsberg; identical to SEQ ID NO: 33074

SEQ ID NO: 166871 - DNA, 2116 bp, Arabidopsis thaliana landsberg
ggtcgtgtcgggatggaactagcaattcaggatgttgtgtatgaaggtgatgaactgtttgtcggccgggtattcaaaaacaaacaagattgcaatgtcaagttagcagtacacgcacttaataggcgttttcattttcgccgtgatcgctcctgcaagaaattaatgactttgacatgcatctctgaatcgtgcccttggcgtgtgtacattgtcaaattggaggacacggacaattatcaaattcgaagtgcaacactggagcacacttgcacagtcgaagaacggagtaactaccacaggggagcaacaacgagggtaatcgggagcataattaagtcaaaatatgatggcaacacacgggggccaagagctgtagacctacagcgaatccttctaaaggattattcggttagaatttctaattggaaggcatggaaatcaagagaaattgctttggagagtgcgcaaggctcagctgcgaatagtttcagtctgttaccggcctacattcatgtcttgcaaaaggccaaccccggttcaattgttcatcttaaaactgagattgatgcaaaacgaaattacaggtttaagtaccttttcttagcatttgccgcctcaattcaaggattcgcatgcatgaaacgggttattgtgatcgacggcgcgcacttgaaagacaaatatggaggctgcctcctaacggccagcgcacaagacgcgaactttcaagtttatcccttagcttttggggtggtcgatagcgagaacgacgacgcgtgggagtggtttttccgcgttttgagcacagctttccccgaaggagagaacctgacattcgtttctgaccgacattcatccatttacacagggctgagaagggtaatctctaatctctaatgttttttatttttacatgtattatattttaaatgttgcatttaacattaaacacacatgatagttcataaattacgtgaggtaccaatataatgcatgcgatagttaataataattggtattcctcgtttcctatttgagatagatctaacgtattgcagtttttaaccactagaaattaatatttttaacatcacatgctataccagtataacacatgttataggaactaataacagctacattaccgcaggtgtatccaaaggctaggcacagcgcttgcatagttcatctccaaagaaacattgcaacctcctataagaaaaaacatttgttgttccacgtatcgagagctgctagggcttaccgtatttgtgagtttcatacctactttaacgaagtgataaaacttgatccagcttgtgcacggtacctagagtcagttgggttttgtcattggacaagagcatatttccttggggaaagatacaacgtcatgacaagcaatgtagcggagtctctgaacgcagtcttgaaggaagcccgggaattgccaataatttcgctgttagaattcataaggacaacgttgatttcatggtttgctatgaggcgtgaggcggctagatccgaaacatcggcactcccaccaaagatgagagaagttgtgcatcaaaactttcaaaagtcagtcagatttgctgtacatcggatcgataggtacgattatgaggtcaggagagaaggttctagtgtcttccacgtcaagctaatggaacgcacctgttcgtgtagagcatttgatttgcttcacctgccttgcccccatgcaatagctgcagcagtggtagagggagttccaattcaaggactgatggcgcccgaatattcagttgaaagctggagaatgtctttccaaggaacaataagacatgttcctgatgttagtgacgttttcgctttgcctgaaccaatagcctccctccacctgttccctccagcaacacggaggccatcgggtaggcccaaaaaaagagaatcatatcaagaggggaatttacggtaaatgtattgtttttggacagaaattgactctatttaattgttgatttctctaactagcatgtgttcttcgcagggaccacaacgtcaacaaacacgttgtttctgttgcacaggcgcaggacataattgcgccacgtgcaaaatgcacata

SEQ ID NO: 166872 - DNA, 1527 bp, Arabidopsis thaliana landsberg
tccactactggaactatctcacgcatcttttcttttggtacccttgtggttggattcatggtctttggtaagacacctaaaaaagacaaactatttcatggagctgatgttgttgatacctacacgctgtttgcagttggtatagctttggatttcatatccatactcttgtttctgttctccgactggacgtgtgctgtacttactagcttgaatgatgatccggatgagcgtctatcattgaaagagagatttttcgattcgttacttagtttcaggcagctgcgttggaaaacacaagaatgccacaataaaggttggcataagtgtcctgaaggtgctgataaatgttcaatagtacagaagcatgacgtgctcacgacacgggttttcctccggaggtggtgcggaagcatcaacgtattcaactttttagcttacgccacaaaagcagatgtaaagaggattcacgacgcaagaggtagtgtccgccggtactcatggaagatcatatctttcccattcgaaaaacttatcttcatcgtccagagagtatttggatatattgtcaagttgatcaattgtgtgcacaggtggatcagccacaaagtcgatgggttatcaagaatttatcctttggctcgtcgtaccatttaccctctctattttgagttcctatcccgcatccctcatttcatcaaatatgtgtgggatgtcctcagtgagtttttcgacatctcggatacgcttgatacagtccacaagactttgtttgtacacggagagccgatgacaaaacaattgtgggagttcatgtttaatgagctgaaatacaaatcaaagtttggagacagtcctgaaaatgccaaaagtatatctttggctcgggggcaatggagtttgcgggacaacctgccagttaaagcagaccgcgaaaaactggtgcgttatgtcacaatggtcgattatgatcaaagtcttttgatgtggcacatcgcaaccgagctctgttaccaacaagaagaatatgccccagagggttatgatgaaaaagatcattacagttaccgcgagtacagtaagatcatctcagactatatgatgtatctcctaatcttgcaacccagtctgatgtccgaggttgctggacttgggaagatcagattcagagacacattggctgaagctgacaagtttttccagaggaggcatattgggaacaagagaagcgtgaagatagccaccgaaaatattctggacgtcaacagtgaaattgaaataatgggagtgaagggatctcgaagcaagtctgtgttgtttgacgcgagcaggctcgccaaagaccttatggatatggagaagacgcacaaaataaacaaatgggagatattgagtaaagtgtgggtggaatttctctgttttgcagctttgcattgcgacgctacggctcacgtagagcaattcagtagaggctgtgagctcataaactttgtgtggcttctaatggctcactttggactaacaaat

SEQ ID NO: 166873 - DNA, 330 bp, Arabidopsis thaliana landsberg
cgtgtcaccgtgggagcgacgcttgagcacgcggggttcgatgatgtcgttgaggaagcacgagtcagacgattgatggaggctgcgctccggctgctgccggaaggtacgattccatcgcccatcgacgcatggacaggattgcgaccgggcactccggatggactgccgattctggggcctgcgcagcgtgcgaattgctggcatgccaccgggcactatagggacggaattttgctggccccggtgaccgcccgtgtgatgacgcaggcgatgctgggcgagaccccggatgtgccgatgacagcattctctccagccaggttcaaa

SEQ ID NO: 166874 - DNA, 886 bp, Arabidopsis thaliana landsberg
cctatcttattgggggggggtaaaaataataattcgggtggggtacctataagattgggttttagtaaatacaagccctacagtatccaactaatattagctgacagatcagtcagaatacctcatggagttctcgaagacctgcctgttaaagtcggatcaatagacattcctactgatttcgtaatactggaaaaggatgaggagccaaaagacccattgattctaggaagaccgttcctagctcctgttggagctattattgacgtcaaaaagggaaacatcgacctaaacctggggaagtagatgaaaatgaccttcgacattaacagagctatgaagaaaccgacaatcaatggataagtcttttggatcgaagaaatggatagattagctgacgaattactggaagaacttacagaaggagatcacctagcaagtgccttaaccaacgatggagaagaagggtacctacacctagaaacccaagggtacaaagagtatcttgacgcccacataccaatggaaggaccagaagtgtttgaggaattgatcgttccctcagaagaaacagtctcaggatgcaccatgtgcctaattgttgaaaaaacaaactctactgagatgctcgaccatggaggggagaatataagttcatatgactagtcagaactcaaagttttaaaggttgacctttagcctcttccaaaaggtctgaggtacgcgtttctcggtccaaatgacacttatcccgtcattgttaatgacggactaagtgatgaacaagtgaacgagttgttgaatgagcttagaaagtgaggaaaattgggtattctttagctaatatataaaggagtttcacctagtttatgtactcataggatcc

SEQ ID NO: 166875 - DNA, 2642 bp, Arabidopsis thaliana landsberg
tattattctttatattattaggtattaaaatactgaaaatggttaaaagtttttatattttaaatatatatttcaatgtactatgtttatatatatatatatatatatatatatatatatatatatatatttgtttaaaaaacaaacatgtcgtttctctctgagggcgattatgaacgccatatcgatgtacatatatctattaataacataagtttctatttgtcttgcgtgtatggtcacccttctcaaagtgaaagacatcatctttggaaacactttgaaaatatttcacttacgcgtaatgactcatgggttctcataggagacttcaatgagatattatcaaactctgaaaagataggcggaccaccaagagatgaatggactttcagagatttttgcaacatagtttcaatgtgtgatttggttgacattcaatcaagtggtgacaagttctcttgggtgggagaacgacatactcatacagtaaaaagctgcttagatagagcattcatcaatactgaaggcgctgcctcttttccactctcggaattagagtttctggaatttactgcttcggatcataagcctttgttattaaccttaggaatttcagagccacctaagatgaaacctttccggtttgacaagcggctgattgagataccaaacttcaaacatcacgttaaagaaggttcgaatagagaaaagacgaagcgagatgttacaattatggatcaagtaagaacgtgtcgacaagccatgtcaagattaaaacataaaacaaatttgaatgcagaaacaagaatccaacatctacaagcagtgctaaatagagctatatcaagcctcgtacattccgaacgacaattgattccacaaattcagagagatctaaccaaaatttacaaagatgaggagatttattggcagcagaaaagtcgcaatcaatggatgagagaaggagatcgtaagacagagttttttaacgcctgcgccaaaaccaggttctcaaaacatagaataaactccattagtgatgaccatggtgaaatctatagaggagatcaaaccattggacgacatgctcaacaattcttcaccaaaatttataagagtaatggccgaccggtatccgtaatagattttgcagattttacaccaacagtgacatcaacgaaaaatgataatttaaatcgagagtttagcgatgaggaaatctttaatgttgtgagtgcggtaggtgatgacagagcaccgggaccagacggtctaacaacaaggttctacaaatcatgttgggatgtcgctggtcctaacgtgataaaagaagtcaaaaattattttaggacttcccatatgaaaccatcaataaaccacataaatatttgtatgattcccaaaataaacaatccagaaacactttctgattataaacaaattgctttatgtaatgtgctctataagataatctctaaatgtttagtagcaaggctaaagactcatctggattctattgtttatgactctcaagctgctttcatcccagggagactaattaatgataatgtcatgatagcacatgagattatgcattctttaatggtgagaaagcgtgtagcaaaatcatatatggctattaaaactgatgttagcaaagcttacgacagagtggagtggaactttttggagacgacaatgaggttgtttggtttttgtgagagatggattggttggattatgggggcagtatgcacagaccgttactccgttttaattaatggagtaccacatggtactatcaaaccggaacgtggaatccgacaaggagatcctctttcaccttatctttttatactttgtgcggatgtgttaagtcacctcatcaaatcaagagtctccgatggagatagtagaggcattcgtatagggcttggagattcaagtataactcatctcaattcgtagacgattctctgtttttttgccaagcaaatgtccgaaattgtcaagcgttaaaggatgtctttgatgtctatgattactactctgggcaaaagataaacatgacaagattgatgattacgttcagatcaaaagtccatggtacaacacaaaatcgtcttaagcacattttaggcattcaaaatcatggaggcggaggcaaatatttaggactaccggaacagttcagaaggaaaaaaagagaaatcttgagaatattattgattgggttaaaaaacgtacgtctagttggagtgcaaagtttctatcaccagctgaaaaggaaataatgctaaaatttgtggtcatggcaatgccgatttatgcaatgtcatgtttcaaactcccggcggaagttatctgtgaaatagagtctatccttatgaactattggtgggagaagaatgcgaaaaagaaaggaattccatggattggttggaaaagattacaatactctaaaaaagaaggcgacttaggattcagagacctctccaattcaatgatgctctattggcaaaacaagcatggcggataattcaaaatcctaactccttgtttgcacgaataatgaaagctagatacttaaagatgagtctgtgttagatgctaaggcaagaagacagttggtttgaaac

SEQ ID NO: 166876 - DNA, 663 bp, Arabidopsis thaliana landsberg
atgtctcacaaatcaatatctctcctgaaataatctcagtagaatctctgccaggtctgaaattcagacccgatccgcaacatatatgcctaggcctgttacggttatcgacagcaatgtgacaaacgcggtgcaccaggtgatggatgcaatgcaagcgccggtctacttcgagacatacatcataaaggggaaaaatatgaatcatttgacgtgggaagtggtggactcgatacggaagaacaaagtgtgcttgaatggcagagtcaataactccttgtgtggtggtgcaaggaaagagcttgatctctttgcatctcttgtcaactgctttaatcttaatggtcaaccgagtcgccatgagaatgttgacatcgtggtgatcagagagaacacggaaggcgaatatgcaggtcgggagcacgaagttgttcccggtgtcatagagagttttcaggtgacaatgacaaagttctggtcagatcgtattgctaagtatgcttttgaatatgctcacttcagcaaaaggaagaaagttacagcagttcacaacaatggaaaatacgaaaaactagctgatgcgtttttcttggagtcttgtcaagaagttgctaaaatgtatccaaacatcacctacaacgaaatcggtattaataactgctg

SEQ ID NO: 166877 - DNA, 996 bp, Arabidopsis thaliana landsberg
atgagtgatgaactgtgaaacgctatacaacatatggatttaggtcgtgaggagcctgaactctttaatccttatcatgcttatgctggagttttggcttctaatagattaagtcttcttggaaaaattcttaatcctcaaactcaaagtgttgaaagagctatcttagagttaccttatcagtggagacttggatcttaagttcatgggcgtatccttgatgaaaggtgctttcaagttcgttttcgctctgaggtagatctacttaatgttttaatgagagcgtcttgggtttttcatgagtggtttattgcacttcagagatgggaagactttcctacagaggattttcttacctttatagacttatgggttcaaattagaggaatacctttaccttatgtttcaaaaaggacagttgagatcattgctagtactttaggtgaggttatggctatggatttcaatgaagcaactacatcgcaacttacctttatttgtgttaaggttagaattgattttaccgagccactacgcttttttagaagagtacgttttgaatctcgagaaagggccatgatcggttttgagtatgagaagctccagcgagtttgcactaattgatatcgagtgaatcatcaagtcagccattgtccgtatttagtgcatcatgaggaggttgatgaagaaccatacgtgatggtttctttagagaggcatgatgatgaagactcaaacagtctcaatcaacgagatcaagagagtaactcacaaagctctattatctcattgttttcatcaatatctccagcatctctgaatgactcccctattgtaagctggaatggttatgctgcaggcaacctacctcaaagattctcatcatcttcaaactcatcttctcatacagtttcagctagctaccttgcagcttcggagtggagacctgtagatcgaggtagctatgagtttgatgagagatcatagataaagaaa

SEQ ID NO: 166878 - DNA, 837 bp, Arabidopsis thaliana landsberg; identical to SEQ ID NO: 21626

SEQ ID NO: 166879 - DNA, 1796 bp, Arabidopsis thaliana landsberg
cccccccccaccctcatcagagacaagagtggaatcgatgcttgagcagattctggagagccaaacaaagcttgttgtggaatttaatggcaagtttgatgatgtctacatagatcttaatgggaagatcgacaatctaagttctcacttgaagaagctagatgtacaggtagctcaaactgcacaatctatcaagagacaagagggttttcttcctggttaccttgatgctaacccaaagaagagctgcaatgccatcttgataagagaaggagatgatgtgtgggaagaattggaccctgaagaccagctggagctcgtagttgtagaggaggtgtcgaccgacaccttccagtgtcgatcgacagcctacgggacgctcttctctgagacaagccaatacaaaggtgccgatcgatacccatctagtgtcgatcgacactggatccggactgcaccttgtgaggtgcaaatcccaatggaccccgagtctatttacactcctcctgtcacttatctgaggaagcgtcattctaagcaggagattcatgctgcttagtgcacaaccataatggagaagatcctccattttcttcctaaagatgcatctgagacatcttctactccactcaacaggtatatcaagcgacttgttaacaatggtattcgctcagatgaagctaagctgcttaccagggacatcagtgcaatcatgctgcctaaggccaagaaggacaaggcatagagagtagacatagccgagtacatccgcaccattactcctggtcagaccactgagtagcttgtagatccatgtagctttgttcttgattgctctatctccagaagcagttttagccgctttttgtgtgatatgggatccatcatcaacctcatgcctaagtctgtttgctgagagactaggcatgactcactacagacctactcgcatcactcttctcttcgcggatcgttccaagcgaatccctgaaggaatccttgaagatgttcatgttaaggttggtaactctgttatccctgctgatttcgtggtcctggactatgagaaggaacccaaggatcctcttatccttggaagagcattcatagctacagctggtgctaggattgatgtgaagaaaggtaggatctctctaaaagtttgtgatttggagatggagtttggcatggattgttcagagttcactacgactattagtagcattgcctctggcacaaacacacctcctaaaactgctcagaatccccagacagagacacacacaatgctcccatcagctcagctcgccaatgaaagttgcagagcaacgatgtcgatcgacactatccctcctgtcgatcgacaccctcgggattcacagacagaggattctccacattctcttcagccaacacctcttgcggccctctatgataagttctcttttatctcttgtcctgctttcccttcgattaattctttagattcttcgaagtctgcttcacaagataacaagcctagagttctttgaaagcttgtttctcctattgttcttgcaggaaacgaggagagtatcgatcgacaccaccatgagtgtcaatcgacacatgcagctgccctgaccagatcagtttacacaccgccttggaaggcgaggaggcagcagcaatcctccaccactccaccctcatcttgaactccgccaagtcaagctattgactcaaaacaagcgcttagtgggaggcaacgcactagtttgatttttctttcccttctttttattttctttattttt

SEQ ID NO: 166880 - DNA, 1165 bp, Arabidopsis thaliana landsberg
cttgatattcatgtccaaggacaaggatcagcagtccctccacctgtcttgactttcacttcatgtggacttcctcctaagcttcttctcaacttagaaacggctggctatgactttcctactcctatccagatgcaagcaattccagctgctttaaccggcaaaagtctgctcgcctcagccgacaccggctctgggaaaacagcttcttttcttgttcctattatttctcgttgcacaacgtatcactctgagcatccctcagaccagaggaggaaccccttggctatggttttggctccaacgagagagctctgtgtccaagttgaagatcaggcaaaaatgctcggaaagggactgccatttaagactgcactcgttgtaggtggtgatcccatgtctggacaactctaccgcattcagcaaggtgttgaattgatcattggtaccccaggccgggtggtggaccttctatcaaagcacaccattgaactagataacatcatgacgtttgtgctggatgaagttgactgcatgcttcagagaggcttcagagatcaggtgatgcagatatttcaggccttgtcacaaccacaggtcttgctgttctctgcgacgatctcaagagaggtggagaaggtgggagggtctctagccaaggaaatcattttggtatccataggtaatcccaacaagcctaacaaggctgtcaaccaattggccatctgggtagatgcaaagcaaaagaaacagaagctgtttgatatactcagaagtcaaaaccatttcaagccccccgctgttgtttatgtgagttcgagagttggagcagatctcctggctaatgccataactgttgtcacgggggtaaaagctctatcgatccatggggagaagccaatgaaggagaggagagacgtaatgggatcgtttttgggtggagaggtgccagttcttgtatcaacgggagttctaggccgaggagttgacctattggtggtaaggcaggtgatagtgtttgacatgcctagtaccatcaaggagtacatacatgtaattggcagggcctctaggatgggagagaagggcactgccattgtgtttgtgaataaggaaaacaggaatctattccctgatttagttgccgctttacaaagtagtgagc

SEQ ID NO: 166881 - DNA, 9121 bp, Arabidopsis thaliana landsberg
atgttaatgagttgctaggcaacattggtgctggagatgcacctagaaaccaccatcagagagctggtattgtcccccctgctattcagaacaataactttgagatcaagagtggttttatctctatgattcaaggcaacaagtttcatggattgccaatggaggacccattggatcatcttgataattttgatagactctgtagtctcaccaagatcaatggagttagtgaggacagcttcaagctcaggttattccctttctcactaggggataaagctcatctttgggaaaagactttgcccgttgattctgtagacacttgggatgactgtaagaaggctttcctcgccaagttcttctctaactcaagaacggctagattgagaaatgagatctcgggattcaatcagaagaattcggaatcattcgctgaggcatgggagcgttttaaaggatataccactcagtgcccgcaccacggattcaagaaggcctccctactcagtactctataccgaggtgccttaccaaaaatccggatgctcttggacacagcttccaatggtaactttctcaacaaagatgtagctgaaggttgggaacttgttgaaaatctagcacaatctgatgggaattacaatgaggactacgatcgcactaacagaggcagtagcgattctgaggataggcacaagaaggagatcaaagctcttaatgataagattgacaaattggtgcttgctcaacagagaaatgtccactacattacagaagaagagcttacacaactccaagaaggggagaatcttactattgaggaggtgagctacctacagaatcaaggtggctacaacaaaggattcaacaactacaaaccccctcaccctaatctctcttacagaagcaacaatgtggcaaacccacaagatcaagtctaccccccacagaaccaaccgcctcaagctaagccctttataccctataaccaaggctacaaccaaaagcagaactttggacctccaggcttcacccagcagccacagcaaacttctgcacaagactcagagatgaagactctacttcatcagcttttgcaaggacaggcctcatgctccatgaccatggataagaagctagctgaactcaccaccaggattgattgctcttataacgacctgaatataaagatagatgcacttaacactagagtcaagaccatggagggacacattgcttctacttcagctcctaaacaccccggacaacttcctggaaaatctgttcaaaatccaaaggagtatgcccatgctatcaccacagtgagtacttctgccactgaggacagtgggattcaagaaggggaggttttgagaccaaaatcaagacaggagattgaactcgacttctttgctcggcttgtcgaacgagcatatgacccgagcaacccaatccctattccacttgcctatgaacctaaaccatactttccagaaaggattgcacaagttaatgcaaggatcttccagaaacacaagatgatgttcataaagtgtatcaaagagctagaagagaagatacctttggttgatactcccaaggaagtaatcatggaaagatcccaagaagttcaggaaatggttgagttgagccaagagtgcaatactactatacagaaagagagtgttctagaaatgctggaagggcttgttgttaaaaatcaactccaaacctctttaactaagggagctgaagctaagtatctttctagtgagcccttgatctcaaagaaatcattagcctcacacaaggtggtagcatggagagatgtcattaaaggtgtgattgggtcaaaaacagaggttatggcagcaaaagaggcatgtccaactcatgctcgaccatctaactcgacatgtaggtcgagttcaacctctactcactcaaaatgctcacactcgacctctaagctcgacctgcatgtagagcaaaacactctaccatctgataattggttagagcttcagaagaagtgtaactggcaggaaaaggccataagagagctaattgacactgtgagagagttgaaggttcaaatcaaggagctacatgggaaatccaaccaagtaccattcagcatcaaagacattccacctgatggaaccaccagcttggtcagcaaagcaaaagctgaactcaaaatgaatggacagagattcaggctttatatggttgaaaagatcataccaaaggggacaacgtttccttttaacaaaccaccatgagcctaatgagtaagagagtcaagcttagagacttaaaacaagctcacttgggaggaagtctcatgtctatctttgtatatacatcttaatttccttgttatttttgatgtttctgtttaagtgtgtcaggtttataggttttaaaaagagtcagagcacgaactcgaccaaacgtcgagtaagacatcaatgagcttagtgcaacactcgagatagccacctctgttccaccagttgtcaagaatcacctaaaacctgaggtatcaactccaaaacctatgtaaataccattgcatattagattttcttgttatttctcttgaattctcatttgaatttttattacacaagggactgtgtaatttaagtttgggggagagttcaggatgtatctaacattgtttcatgttttcttattcaaatttttgcatcatctaagacatagaaaacccgtaaaaatttgaaaattttcgaaaatgattccaaaaaaatagagtgtcatgtagtttgcatttgcattaatagggctgtttttagaatgttataatatagattgtgcattttgcacttgcataggggataatgatgatcatagccttgtaaatttgcaatgttcactagatagtttcaatgcccttggtgttagttggctagtgcttaaccgattgaacttgaagcaaaaccgcaccatcttttgaattcatatgcttgaccttccttagtcggaactcgctgcgatttgatgctattccctatcaatttgaaccataatttgacttgtaattatcatactatgcatttcttgttaaactcatggttacccttaaaatatttggatcttcttattcatttcaccactcttgttgatccaaatagctgactctcatctttagagcagtttccccacaccctaacctaagccttctttcaagccctatatcacttgtgagtgtttgtgaggtcttattgcgattaagcttggtagaaagtgttaggttcgtaacgacagagatagtgtctcatgtagttctagttcgcatttttcagactagataggactaggtgggcgcttatactttgggttgggatgtgttttaaaaaaaaaaaaagggttgattcattgatgagaaaaggtaaaagactctaggtgaagtaagctaaagaagcagaaaaagtctagtaaaggttttgggatttgtaaagaaaagaaagagttcttgttagctattgaagatgggcaaaagcccttggttttaaaatgttaaaaacaggaaccttagttgttaaagaaatccaaatccgctagatgtatcaaagtgttgagaaagcttctcctagagttaagagaaaagaaaagaatgattagaaaaagggcttaaaagattcatgaatgcaaagggtagagttaagttcttatattgggattggagatgggattaccattagagcttcatttgatgtactctgggtagatgggatcttatctctgtatgcatagcttgggacttacctttagcattctactaaagcttaatcattttttgagagatcgtgtaagacaaccgtccacgtacagtatctggctgtccgggccgacataggtacctctaaggttcgtcgcctcctccccggcacgagaccatagttaattgtttcgtccaattcaacatagaattgcctttacgaggctaaattctataatcgctctcttattacacagcggaagtctttctaaccttggtttaattctaaccaactcttgtaccggtttcatcgtctttgttccttagacttagatcgatcctttactcggtcaagacatgcatatgttcgctaaccattctaagccaaacaatcgcatattcctttatcctactttcacggtcaattaccaaacgtctatcttaactaataagctagatcgttacataccttggtcaatatgcggatttgattccttagcccgtttgtcgccttactccattcgttcaacgactcgtcatcggtcgtgaattgatgaaccaatccctatcgttacttagccatacaaccaaccaaccccactggtctaagtacaacgatagagattggggatcgtacgattcccttggttcacgatggccgaatcaagctcttggcttattggtccattcgttctccaaacgtacgcccctccggctacatggtggacgattgagccctcggcttatcgaaccatccatgtttccgttccggtcgtttaacactacgaccgcccacggtttactaaccgttttgtaacgcccgcgatcctcaataggatcgttggctaggacttggtccgggagaagaaggtggagtctcggacaagtgagaaagagctggctataagctcggacaaaggggaaatcatgcaggctaagctaggatcgtaaggaaatcacttgggtcagctcgcccaaagctcaggctcagctggaaggagtgacagttactcaggtcgagtgacagtccagctcgggcagctggacgagtgacggatgagctcgaggtagctggacgagtgacggacgagctcgaggtagctggacgagtgacggacgaactgggcggttatgggcgaagagatacaactcttcggaaaggtgcaactcttcggaagggcgcaactcttcggaaaggtgcaactcttcggaaaggtgcaaggaacggatgtgttgattcgggaagcatccattcgccccttatataaggaagggcgcccaggaccattccacacacgacaacacaccgaaaacacaagaaactcaccattaaaactctctccctcttgggagaataaatagtcttaggattcggtagccgggctgtggccggcaataaagaaggagggtcggatcgacctaacctcgagaaggaaggtaagggatcctagactttgagtctaagggttctaggatgtgagttagtagtcggatccttgaaaggaccgactagagggctgggtagtatccgggtcatgtgcatcctacacaagactcggtccgggtagggatcggttgaggcggggaccgcggctcgtggaggaccggcgggtcttaactgacctgccaagaatttgccggactgatgcgcgatcttcccctccacggatccgagtagtgtatggcatatagagcattgcatggacttgcatatgattaagtaaatgagattacttatggctctatgactttcaggaacgaatggtgatcgtgggaaggacttggcttaagcgcgagagactcaaggccgggatgatgggtggtgatagttcggatagtgtagggatcgattatatgacttgtaatagcttatatgcaaactcataggttgtatcgaatcctttgcttaatcaataaagtatttgattgtttgtttactctattcgcgtcatatattgaatcacggaatcatatggaacggattaaactaggaaagaacctcatacacggtttgggccgagtcacttagtggcttgggtcgagagaactcgtccggactttaggcagtccggatcggggcctttcaagttggtattagagcatgcttggttctaggactaggtgttgggttaaggggtatcacaactcgtcggcttgagaatctcgcggtagttgctctttactcttttgcgattttactaggagttatgtggattaactttggaggtttcgcagatgggtaagagtagcaaaacgggaaagagtaagaaggacaagggcattgtcgaggagattttggttgaggaggaaacgatgatcaacgagaaaacgagagtcgggacgatgctcgatgggatagacttggccggacccgaggccgggaagaagtccataaatgaggaagcaccggagagtagcggtgcaagggacagcacggataaccggaacaatactccaacagcccaagaacagtgggatttgatgaaaggaatgatggcgcaactagccacattaaccaaggccattgtagcagatccggtggtccaaagagtggataactaaaaggacgatgactcggaagttgtggaagtgaatccgcaaccgaatcatgggcgaaaaaggggagactatctaagtcttctcgaacatgtctcatggctgggcacgagacacttcatgggcagtacggacccgattgtggccgatgagtggaggagtagactcaagaggaacttcacgtctacccgctgccctgaggattaccaaagagacattgcggtccacttccttgaaggagacgcccataactggtggttaaccgtcgagaaacgcagaggggacgaggtccggtcctttgcggatttcgtagacgagtttaacaagaagtactttccacgggaggcttgggataggcttgaatgtgcgtacctcgacctagttcaagggaactgcacggtgcgtgaatatgatgaggaatttaaccgcctaaggcgttatgtgggacgtgaacttgaggaggaacaagctcaagtgcgccgatttatccgtggactaaggatagagatccgcaaccattgtttggttcggacattcaactcggtttccgaattggttgaaagggcagcaatgattgaggaagggatcgaggaggagaggtacttgaaccgggagaaagtaccgatccggaacaatcaatccaccaaacccgcggataagaaaaagaaatttgacaaggtggataacaccaagtccgatgcttagaccgggaatgcatgacctgtggtaagagccacagcggaacttgctggaaggccataggtgcatgtggccggtgtggaagcaaggaccatgcgatccaaagttgcccgagaatggaaccaggacagtccaaggttctcggtgaagagacaaggacttgtttctattgcggaaagactggacatctaaagcgagagagccctaagttgactacggagaagcaggccggacaaagggacaatcgcgggggaaacggactgccgcctcccccaaagcggcaagccgtggcaccgcgagtttatgagttgtccgaggaagctaacgatgccgaaaactttagggcgatcactggtacgttctcacaactccctattcattatttcaataactgcatttgcattgcatcatgcatatgggaaaggggaactactcagcattctaagggaatgtgtagggaccttgagagtaggtgacatagaaacgcacactctatttgattatggggctacacattgttttgttagtccggaattggttcaatcaggtgggttcaggaaagaaccaaacacggattatggaatggtacgagcggccggcagaaaggcaatgtatcctaccgaacttgttcggggcatctcggttgtagtgaacctaatcattgttccactaaagaaacacgatgttatcttagagatggactggttggggaagtacaaggctcacatagattgtcaccgaggacggatacaattcaagagggacgaaggtatgttaaaatttcaaggaataagaagaacctcgtgaagcttggtaatctcggcaatccaggctgaaaggatgatcgggaaaggatgtgaggcatatttagccacgatcacaaccaaggaagttggggcgagtgcggagttgaaagacattccgatcgtcaacgagttctcggacgtgtttgcggccgttagtggtgtaccaccggaccggtcagacccgttcacgatagaactcaaacccgggacaacccccatatctaaagctccgtaccggatggcaccggcgaaaatggcggagttaaagaaacagttagaggagttgttggatcaaggattcatcaggccaagtagctcacgcatggggtgcactggttttgtttgtgaaaaagaaggatggtagctttaggctatgaatcgactatcgaggattgaataaagttacagtgaaaaacagatatcccttaccccggatagatgagttgatggatcaacttggaggcgcacagtggttttcaaaaatcgacttagcctcgggatatcactaaattcgcatagaccaacggacgtgaggaaaacggctttccggacaaggtacgaccactttgagtttgtggtcatgccattcggattgaccaatgcactagcagccttcatgaaaatgatgaatggggtgttccaggatttttagacgagtttgttatcatcttcaatgacaacatccttgtttacacgaaatcttaggaaactcaccaaaaacatctaagggtggtgctggaacggctaagggaacatgagctatttgcgaagttaagtaaatgctcgttttggcaaaggagcgttggttttctcggccatattatctcggaccaaggagtatcggttgatccggagaagatacggtcaataaaggagtggccacgaccaaggaatgccaccgagatttggagttttctcggactagcagggtattaccgaaggttcgtaatgagttttgtgagcatggctcaacccatgactcgactgaccggaaaagacaccttattcaactggtcggaggattacgaaaaaagcttcctggagttaaaggccatattgactaatgcaccggtgttggtcttaccggaggaaggtgagccctatacggtttatacggacgcatccatagtgggactaggatgtgtactaatgcaaaaggggagtgttatcgcatacgcatcaaggcaattgcagaaatatgagaagaattaccctacgcatgatttggaaatggccgcggtagtatttgccttgaaaattaggcgatcatacttgtatggtgctaaagttcaaatctatactggccacgaaa

SEQ ID NO: 166882 - DNA, 858 bp, Arabidopsis thaliana landsberg
cttgattcgatcgatcttagaacgcttgaactttatagactttcatcgagctaggtacatctctttaaattggtattcctcttcggaattatgcattatacaaaatccaactccatggaccatccgcttttcaaacgacaaccatgtttcattgtttgatcctcttcatgcaaaaacctatgtaataacagacctagggtttgatttaccaaggagtcgttgtttggatacttctggtagctggttgttgatgttagatcatagaaccgatttttatcttttgaatctgtttactcgagagaggatttgtcttccgactttggaagcaatcgatggatggcagatgaagtttgagagggttggtgagtctgatttcttgaagacattcacttatcgtgaaggctatacaagttattcttctcgtataagcaccaaaattagaatagagaaagcggttttgtgggtcgatgaaagaagccgagattacttagttgtgtggaaccttgagagcttctttgcgtatcataagaaatgagataataacaagacctggaaagtgtttcaattaaagaatcaagggtgctcggatatggtgtttagagaaagcaagctttacgtgcttagtccaagtctagacatcactgtttttgatttctctagtggtgattctccaaaggaatgtgcaagcttcacatcgccggatgactattcatcatatggaccattacgtttcgagtctttcgaccatcttgttataactttgtccggagaggttttgttgatcaaagtcgaacgtcggggattgcagatatgttcattccatgtttacaagatggatcaaacatcatcagaatgcag

SEQ ID NO: 166883 - DNA, 484 bp, Arabidopsis thaliana landsberg
tgtttaccaaggtcgcgcgttcacaagccgcgacattcgaactggcgctcgatgccgcgcacgccgccaagaacgagtgggccggcctgtcgccgtcggcgcgctcgaacgtgctgctgaagatcgccgaccgcatagagcagaacctcgagctgcttgcgcatgccgagacctgggacaacggcaagccgatccgcgagacgctcaacgccgacatcccgctcgccatcgatcacttccgctacttcgccggtgttctccgcgcgcaggaaggcagcatcagcgagatcgacgggagcaccattgcctaccatttccacgagccgctcggcgtcgtcggccagatcattccgtggaacttcccgatcctgatggcggcgtggaaactcgcgccggcgcacggcgccggcaacgccatcgtgctcaagcccaaagaaaagacgccggccagcattctcgtgctcgccgaactgatccagggtct

SEQ ID NO: 166884 - DNA, 237 bp, Arabidopsis thaliana landsberg
atgaggctgctaacaggggaacctccgaggcaggtttcgttcaggtttgagccaagcagtgtacaagtagtggtgcctggtcatgactgcgtgattgcagaagggtgggagggttcacgcgtgtactgggttcacgtgtggaaattgaaagacggagtggtcactgagctaagagagtatttcaacacatggctcactgttacagactacagtcttggagcagtaggatgggacatg

SEQ ID NO: 166885 - DNA, 256 bp, Arabidopsis thaliana landsberg
tgtggatgtcgaattcacacactcaagtatttatttatttagtgggtaggattattcttgaggaaaaatataatagaaaatagatagatgattatagagaaagaagcggacctgatcatgtcaaaccactcgaccaccagatcgagtagaagcttcaagacctcaacagaccactcgaccccctggtcgagtaggggacttcacaacttcaactcaccactcgaccccctggtcgagtatattcacctccaccacc

SEQ ID NO: 166886 - DNA, 324 bp, Arabidopsis thaliana landsberg; identical to SEQ ID NO: 23113

SEQ ID NO: 166887 - DNA, 1298 bp, Arabidopsis thaliana landsberg
ggagacacggacaatcgagtgctcattacgtcatgggttggagtttcgcaagcggtggagaacatccacttgcagctatgctcgacatctcccaacttcctcctccgcctccgaataaggcgaagaagagaggttacaatggtaaggtcatcgctcttatcgtggctttatcgactgttatatcgatcatgttggtgttgctgttcctcttcatgatgtacaaaaaacgaatgcagcaagaagagattctagaagattgggaaatcgatcatcctcacagatttcgatacagagacctctacaaggctactgagggattcaaggagaatagggttgtcggaaccggaggattcggaattgtttacagaggaaacatcagatcatcgtctgatcaaatcgcagtgaagaagataaccccaaatagcatgcaaggtgttcgagaatttgtcgcggagattgagagtttggggagattaaggcataagaatctggtcaaccttcaaggatggtgcaagcaaaaaaacgatctcttgttaatttatgattatatccctaacggaagcttagactcgctgctctacagtagaccaagacagagcggtgttgttttgtcgtggaacgcacgttttaagattgctaaaggaatcgcgtctggtttgttgtatctccatgaagaatgggaaaaggttgtgattcacagagacataaaacctagcaacgttttgattgaggacgatatgaatcctaggttgggagattttggactcgcgaggctttacgaacgcggatcgcaatcgaacacgaccgtagtcgtgggcacaattgggtacatggcaccagagctagcacgcaacggcaaatcttcgtctgcgtctgatgtttttgcgtttggcgttttgttattagagatagtctccgggagaagaccgactgactcagggacattcttcttggccgattgggttatggaattgcacgcgagaggagagattctccatgcggtggatccgagacttggatttggttacgacggcgttgaggcacggcttgctcttgttgtgggattgctctgttgccatcaaagaccgacgtctcggccgtccatgagaacggtgcttaggtatttgaacggagatgatgatgtacctgaaattgataacgattggggatactcggattcttcaagaagcgatttaggatccaactttgaaggatatgtttcatcggatagggcttcgagctcagtcccatctttctccgttacaagggtttcttctagttctgttatcagtggtaga

SEQ ID NO: 166888 - DNA, 1670 bp, Arabidopsis thaliana landsberg
cgctccctgtctccggccaacagctacattgccacgtgacctatgtcggttgcgagactgagccgtttgtactaacggctctgatctcaatgtattgtaaatgcggtttggttgcagatgcacgtaaagtgttcgaagaaaatcctcagtcaagtcagcttagtgtttgttacaatgctttgatatctgggtacacagcaaactcgaaggtctctgatgctgcgtatatgtttcgtagaatgaaggaaactggtgtgtctgtggattcagttacaatgcttgggcttgtcccgctttgcacggttcctgaatacctctggcttgggaggtctcttcacggtcaatgtgttaaaggaggactggattctgaagtagctgttttgaatagtttcatcacaatgtacatgaaatgcgggtcggtagaagctggtaggaggttgtttgatgagatgcctgtgaagggtttgattacttggaatgctgtgatttctggatattcacagaacgggctagcttacaatgttctggaactttatgagcagatgaaatcatcgggtgtttgtcctgatccttttacattggttagtgttctgtcttcttgtgcccatcttggagctaagaagattggtcacgaagtagggaagttagtagaatccaatggttttgtaccaaatgtttttgtaagcaatgcatcgattagcatgtatgctagatgcggtaacttggcaaaggcacgtgctgttttcgacatcatgcctgtaaaaagcttagtttcatggaccgccatgattggttgctatgggatgcatggaatgggagagattgggcttatgctttttgatgatatgataaaaagaggcataagaccagatggggcggtgtttgtaatggttttatctgcttgcagccattcagggctaacggataaaggtttagagttatttagagcgatgaagagagagtataagctggagcctggtcctgaacactactcttgtttagttgatctactcggaagagctggtcggctagatgaagccatggagtttatagagtcaatgcctgttgaaccggacggtgctgtttggggtgctctattgggtgcttgtaaaatccataagaatgtggatatggcagagttagctttcgcaaaggtgattgagtttgaacccaataacattggctactatgtattgatgtcaaatatatattcagactcgaaaaaccaagaaggaatctggagaatccgggtaatgatgagagagagagcattcaggaaaaagcctgggtatagttatgtggaacacaagggaagagttcacttgtttttagctggcgatagaagtcatgagcaaacagaggaagtccatagaatgttggatgagttagagacttctgtgatggagcttgcgggaaacatggactgtgatagaggcgaagaggtttcgagcactacccgtgagcatagtgagaggttagcaatagcttttgggattctcaacagtattccaggcacagaaattcttgtgataaagaatttgagggtttgtgaagattgtcatgtgttcctcaagcaggttagcaagattgtagatcgccagtttgttgtaagggatgcatctcggttccactatttcaaagacggggtctgctcgtgcacagatttctgg

SEQ ID NO: 166889 - DNA, 399 bp, Arabidopsis thaliana landsberg
  unsure (1)..(399): unsure at all n locations
gacatgtccgattttgatgcccgcaagcccgaatccgatgccgcgccagaaatcgcgccggagaccgctcccggcgataccgcgcccgaaaatgcgctggaaggccagttcgaggccaaggagcgcgaggccgcggaactgaaggacaagcttttgnnnnnnnnnnnnnnnnnnnagaatctgcgccgccgcaccgcgcgcgaagtcgccgatgcgcgagtctatgggatttccggttttgcgcgcgacatcctcaacgtcgccgacaatatgcgccgcgcgctcgatgcggtgccggccgaattgcgcgcaagcggggaagccgacgtgctgctcgaaagcgtctaactgaccgagcgcgaatagctcaaggcgctggagaagaacggcgtcaagcgc

SEQ ID NO: 166890 - DNA, 422 bp, Arabidopsis thaliana landsberg
atggtgactgtaaaccctagccaagctcattgtttgcctatgaaaatgagtctaccgggtttcaatactcttccccacacggcaacaacgataccggtttccatacggagcaataggacgatgtcgttttttgaggatccaacaaagaaggttagaaagccttacactatcaccaaatctagagagaactggacggagcaagaacacgacaagttccttgaagcccttcatctgtatgttgacacggatttcacttctctgccttcatttatctgattaatgatatatagaatctttgagatttgttcttcttcttctgatatgatcatgtctatttgattgcagatttgaccgggattggaagaaaataaaggcctttgttggatcaaaaacagtgatacaggtaatcaatcaaacatatg

SEQ ID NO: 166891 - DNA, 400 bp, Arabidopsis thaliana landsberg
atgattcaaatagacgaagtccttgtggttctgcttgtgcttatgctgaaccatgtcttctatcaggttgcggtccttgtgatggtccacctgcttgtctttgtgctccacgaccaccacctgatgttgtttgtccttgtgctccacgaccacgacctgcagccctttgtccttgtgctccgcaaccacgacctgcagcccttggtccttgtgcttcgcgaccacgacctgcagcacttggtccttgtgctccgcgaccacgacctccagcacttggtccttgtgatccaagaccacgacctgcagcacttggtccttgtgatccaagaccacgacctgcagcacttggtccttgtgatccaagaccacgacctgcagcacttggtccttgtgattcaag

SEQ ID NO: 166892 - DNA, 612 bp, Arabidopsis thaliana landsberg; identical to SEQ ID NO: 78352
  unsure (1)..(612): unsure at all n locations

SEQ ID NO: 166893 - DNA, 707 bp, Arabidopsis thaliana landsberg
cggtattatgacactgacatagcgcaatttcttactatgaattgaaatgtgggagaatggaggagcaaggggggttgttgaagaggaaattaaggcagccctatcaaggagaagctttcaatggtaaacctaccaaaaccgctcgctcccacggaaaaaagtttcaagtgactgttcaacaagaaatctcaagattactggtatgtaacaaatgctccaactcgatttgtgtctaatttcactcagtgtttctttttggtaatggactgacttatttcattggaactcatatacagggtaacttggggtgggcatatatgcaacaagccaagtacttatcggccgaagcggtatacagaaaagcccagatggttgagccagatgctaacaaatcgtgcaaccttgcgatgtgccttatcaaacaaggcaggtttgaggagggaagattggttcttgacgatgttctcgagtatagggttttgggtgcggatgattgtagaacaaggcaacgggccgaagagcttctgagtgaattagagtcttcgctgccacggatgcgagatgctgagatggaggatgtcttgggaaatatcttagacgatgactttgttcttgggcttgaagagatgacatccactagttttaaatctaagagactcccaatcttcgaacagatctcgtcttttagaaatacattagtttgctag

SEQ ID NO: 166894 - DNA, 2281 bp, Arabidopsis thaliana landsberg; identical to SEQ ID NO: 27384
  unsure (1)..(2281): unsure at all n locations

SEQ ID NO: 166895 - DNA, 1201 bp, Arabidopsis thaliana landsberg
atggcagtaggaaaggttgtggtatctgtggcatcactcctcctagtggtgggtgttgccataggagttatcacgttcgttaataaaggaggcggcgccaatggcgacagtaatggtcccataaactctcatcagaaagcggttcagacaatttgccagtcaaccacagaccaaggttcgtgcgcgaaaacactcgacccagtcaaaagtgatgatccaagcaagcttgtcaaagccttcctgatggctactaaagacgcgatcacaaaatcctcaaacttcacggcttcgaccgaaggaggtatgggtactaacatgaacgcgaccagcaaagccgttcttgattactgcaagagagtattgatgtacgctcttgaggatcttgagaccattgttgaagagatgggtgaggatcttcagcagagtggaactaagcttgaccagctcaaacaatggttaactggagttttcaactaccaaaccgattgtcttgacgacatcgaggaagttgagctaaagaagatcatgggtgaaggaatctctaactccaaggttttgaccagtaacgctatcgatatcttccattccgttgttaccgcgatggcccaaatgggtgtcaaagtcgacgatatgaagaacataaccatgggagccggagccggtggagctgcacgtcgccttcttgaagacaacgactctaagggactccccaaatggttttctggtaaagacaggaagcttatggctaaggccggacgtggcgctccagctggcggtgatgatggtatcggtgaaggcggtggtggtggcggtaagatcaaggcgactcatgtagtggctaaggatggaagtggacagtttaagaccatttctgaggcggttatggcttgcccggataaaaaccctggaaggtgcattatccatatcaaggctggtatctacaatgaacaagtcagaatccctaagaagaagaacaacattttcatgttcggtgatggtgctacacaaaccatcattacctttgacagaagtgttaaacttagcccaggaaccactacttcactcagtggcaccgttcgtaagtcccacaaaacattatgttttacattgctacataatcggccaaggtactaacatttaatatgtacatgcagaggtcgaatctgagggattcatggcgaaatggattgggtttaagaac

SEQ ID NO: 166896 - DNA, 2023 bp, Arabidopsis thaliana landsberg
gagcttctttgagatatttggttcaagttcttttgatctaatgtcttttttatttattaacatcagatattgtataagaacgtggcacatccaaagttggctgcatatattaagaagcataattgggtgaatgaaaccggtgaatacctatcttttccacagaaccagactacgttcaacggaaatgttctacagtaccttgaattcattcaagaggtgagtatcatttgttactctctgaagttggcttttcattggagacaagttctgtgttagagataaaaacatgattggtgtttgatagatggtaccagatattgaatgggggaagaatgttcgtatagtgttggacattggatgctcagattcaagttttgtagctgcattgctggataaggatgttttgacggtgtctctaggtttaaaggacgatctagtcgacttagcacaggtcgctcttgagcgcgggtttcctacttttgtcagctctttagcaagtagaagacttccttttcctagtggagtcttcgataccattcattgtgctgcttgcggagtccactggcattctcatggtaagtattagtttctctaattattgtcaatatgcttttcgagtcatgagtacttatacttccgcaatcacaggtggtaaacttctcctggagatgaacagaatattaaggcctaatggatatttcattttgtcaagtaataatgacaagattgaggatgatgaaggtatatatattcatatgtcatttaactcgcactgaaaaatccataatattaggaaaatgatggatctaagcttttcatcaacatgatgtatctatgattttgaacacatcaaaattttacttgtgcttttagcatttatcaacttgtctctggtgtgggttttgcagcgatgactgcattgacagcttctatttgttggaacattcttgcacacaagaccgaagaagcaagtgaaatgggagtgaggatatatcagaaaccagaatcaaatgatatttatgaactgagaaggaagaaaaattcacctctttgcgaggacaacgaaaacccagatgcagcctggtaagtaaagcaatggtgataatctaaatggcatgactttttctttcttcttatgtccattatgatgaacattttcacgtgctccatccttggataggtatgtgccgatgaaaacttgtatatatgaaataccgtcggctatagaacaacatggagcagagtggcctgaagaatggccaaagcgacttgaaacataccctgagtggttaaccagcaaagagaaagctatggaagatacaaatcattggaatgctatggtaaacaaatcttacctcactggattaggcatcgactggttacatatccggaatgtgatggacatgacagctatctatggcgggtatgaaaaaaggagagatcatttatactcttcttagaacagaattttggtgattcttactggttttgaattctcacaaaataatcaacagatttggggcatcacttgtgaagcagaatgtgtgggtaatgaatgtagtgcctgtgcattcaccagacacacttccattcatatacgaaagaggcctccttggtatataccatgattggtgtgaaccatttggaacatatccaagatcttatgaccttcttcatgctgatcatctcttttcgcggctcaaaaacaggtaaactagtagggatcttgaatccaaatttgcttgtcaaatgagaaacctggccgtgaaatctccatatctttgttgttgtcgcaggtgtaagcagccggcttcgatcgtggtggagatggatagattgacaaggcctggaggttgggtggttgtgcgtgacaaagtggagatattagagccattggaagagatattaagaagcttgcattgggagattcgaatgacttatgctcaagacaaagaaggaatgttatgtgcccaaaagactttgtggcgtccatgattcttttactttttttttgttactgtct

SEQ ID NO: 166897 - DNA, 502 bp, Arabidopsis thaliana landsberg
gtccagctcggcgcactggtgagctgcaccgcctaccgcaaccccgatctgctggcagacatggcgcgcacgatcgaccacatttccggcggtcggttcgtcctgggcctcggctctggatggttcgaaaaggacttcaacagctacggattcgacttcaagacggccgggctgcggctcgatgacctcgacgccgctctcccgcgcatcacgtcccgcctccagcaactcaacccgccaccgctcggcccgatgccgatgctcatcggtggcggtggcgagaagaagacgctgcggatggtcgccgagcacgccaacatctggcacagctttgccggtcccgacgagctcgctcacaagctggaggtgctgcgaggccactgcgcggcggccggccgtgatttcgacgagatcgaagtctcggtgggaaacggtggtcgcggccgcgaggggcgcttgccgggcgcaccggaggtcgagggccagccgctctacgacccgg

SEQ ID NO: 166898 - DNA, 705 bp, Arabidopsis thaliana landsberg
atttgattaatcatagttctaattaattcttgaatatgtttatttttgtatcatcaataggtcggaggtccaagatatgatgtgaaggttggtcgaagagattccaccaacgcgtttagggctatcgcagacagggatctccccaacttcagggctagcctcaacgatctctctgaactcttccttcgaaaaggactcaacacaagagacctcgtcgctctctcaggtcagtcaccccgtaaaacacacttttggtcactaatttcttgccatttaaaacctttcttgtgacacaagttaaccctatttacaggagctcacacattagggcaagctcaatgcctcacgttcaaaggtaggctttacgataactcgagtgacattgacgcgggattctccagtacccgtaagcgtcgttgtccggtcaacggtggagatacgactctagcacctttagatcaagtgacaccaaactcgttcgacaataactattacagaaacttgatgcagaagaaaggacttttagaaagcgatcaagttttgttcggaaccggagcttctacagatagtatagtgacggagtacagcagaaatccatcacgatttgcgtctgatttctcagctgcattgatcaaaatgggagatattcagacactcactggttcagatggacaaatccgaagaatctgcagtgccgttaattaa

SEQ ID NO: 166899 - DNA, 1032 bp, Arabidopsis thaliana landsberg
aatatggagtggacagagtcggatgaaaccgtgtcaagtgcaaccatcaagctgctaagtattcatggcaccggttgtcaaggcttttgaaatccaaagagcatttcttttgatactccaagtctgctttcctttaactactctgatttagttgccgaggactatccattagttaacatgaaggcattatttgaggctcgaatcaactttatagttactgaaaaacaaatcaagcgagtaagagcaccaaatgaagattggttacaagatgatgaagttgatgttgttctccgattcagcaatgtggtgaagctcatgaatggcatacaaaatgttcagaaactttacttaactgctgatactatcgaggtcagttttctatttttcttctcttttgtctagttgtgaagcattaattgcaaaatgtctagttttcttgttttcaggtgctttctctgtgctgtgaatcggtgccgctgttcaacaacctcaaaacattaggtatcacgagtgaggagggacgaggatggcaagcgatgccagttcttgtaagtaaatgtccatatgtagaatttctactcgttgaggtccagttataaaccatgaaactacttggaaaacatgtgttaaagatgttgttcttactcaacaatcttattgtctcctttatgctttcagggtctcttacactatatgacggataaatgtggggatgcttgtgattgcatttctcgggaagacaaaggtcgttcgcttacatcttgtccagtgaagaagttagagattcgagggtttagaggaacaatgaaagagatgacaatgataaagcatttcttggtctactttccgtgtctgaaggagatgaacatctatgttgaggagtatgatcctacagagctcagattccctcaagtgtctaaagttatcatacagatgatggaagagtacaacaagttatcgagttgcaatgttcagctccttataactgattatttgtctgaaaagtggactgcagcaggaagaattctctga

SEQ ID NO: 166900 - DNA, 1803 bp, Arabidopsis thaliana landsberg
gtgaataccatcttgatttgatagtacgttacggatgtgtaccagtgattgtaccaagagtaacgggtgttcacatgttgcttgagagttttaaaccaatacatggagttttactttgtgaaggagaagatattgatccttctctttatgaatctgaaatatcttctctttctcctgaagagcttcaagagattagagaaacacatgctagtgatacagctattgataaagagaaagattctattgagttaggtcttgctaagctttgtcttgaacagaacattccttacttaggaatctgtagaggatcacaagtaagtctctttttgagtttatgtcttttggttagaacataaaatgttaatgatgatgataagttttgttttggcagattttgaatgttgcttgtggtgggactctttatctagatttagagaaagagctaacgaataagttaccagaagaacgaagaacgatgcatatcgattatgataattatgatggtcatagacatgttgtgaggattgttgagaacagtccacttcattcctggtttaaagattcattagatggtgaaaatatggagattttggttaatagttatcaccatcaaggtgtgaagagactggcacaaagatttgtgccaatggcttttgctgctgatgggttaatggaaggtttttacgatccggatgcgtataatcctgaagaagggaagttcataatgggtttacagtttcatccagagagaatgagacaacatgatcttgatgagtttgattatcctggttgtcctgctgcttatcaggtttgtgtgattttgaagattgttgttagttaagtaagttgtgaaaattgagttctaatgtgattttgatttaatttgtaggagtttgcaaaggcggtgattgcgtaccagaagaagctgaatagctcattgtctgttccaaagacattgaagcttgatagtgaaatggagaataaaagaaagatgcttgttaggagtttctcacttgctaagtatatgtatgttagaggagcaccagggaagaacccatcaaaagaatcagaacttgaagttggagccgagttccttgaggtaaatgatcactaaatctctcgacttaactttacaaaatcttgatcacatttgattgcaagaggcaaaatggtttagacacttgcttggcctttcgttatcttaagagttacatagtgcaagccagttttttttttttaatatgcatagcattcattttagatgatgtctatggttgttgtgatgggccaaagcgcctcggaccagaccagcccattttatgccggttctgatttcggcttgtgggaagcaaacatgcatgtgggacataacatgcatggtgggttttgattacttgaaaacggatatcgttaggcccggctcacgggattttggcccaccaggccacaacaacaaccttagtgatgtcctactattttgacccacaatgtttttatcaaagatgaattattattgtatcttttgctaactttgttcttttgtgtgtagtcgaacacggcgctaagcgcagagcaagagatgaggctgaaggagatgggagcgacggtgaggaacggaggatcatatatgaaaaagttgaaagtggacgaggataagcagaggatggcgaggaacatgatgaaaaagatgaacatagagcaactctcagagcttatggcgttttatcatttgatgggtaatatatgtggagaggttttggaccgaaagcttcaaggcaatgtcaatgaatgcttgagggacct

SEQ ID NO: 166901 - DNA, 386 bp, Arabidopsis thaliana landsberg
gttccggtgcagagtgttgatacggtgctcctgcaacaggcactatctgctcctgttctttctgtagcttctccttctgcagttcggtaagcgccatcaatcgtcatctgtctcttttttgatcactcagcaatacctcattcatataatctcttctattatgatcgagtgggtttggtccatcgcttacgtgattttgacagcgcctggctgcatctgattcaaaatgaggagcaatggagcaattacgttgcctgcattggagagacaactgcatcagctgctagaagactaggattgaaaaacgtctactacccaaagaaaccaggacttgaagggtaaatcttgatctttcatatgtggaacacatgaactaagctttggat

SEQ ID NO: 166902 - DNA, 1018 bp, Arabidopsis thaliana landsberg
  unsure (1)..(1018): unsure at all n locations
atgactgatcaaggattggaagggagtaatccagttgatcttnnnnnnnnnnnnnnnnngattgttcctactcttcagtgagttcttttgtgccttcgtatttgttttttgtctcttgggattaagtgtttgtttgacccctgttgacatctttgatgttttgtttcagaaacattgtctccacggtgaacttagactgcaagctagatcttaaagccatagctttgcaggctcggaatgctgaatataatcccaaggtatttgcattatattgtgactttttgttttaataaacggtagaaaagttgtttggaagagtactctctccttgagttgaccttattgttacctgagatctgattggtctatatactgtgtactgattaattagaatctaagatattatctgtttttggcttttgctaaactaatttgccttagctaagctcgtcttatgtaatacctcttgtgttttatgtttccagcgttttgctgcggtgataatgaggatcagagaaccgaagactacagcattaatattcgcctcagggaaaatggtatagttattttggttggcaatactttttcataattctgaaatttaattacattggtttgaattctcttctgaatttggcgactaatctccaattaggtctgtactggagctaagagcgaggacttttcgaagatggctgctagaaaggtagatttttttaatctttaacctctttaatttaactttcttatagatctgttcttctttactttagcaataattgcagtatgctatttgctcctcatttgtttatgctaataggagatgttttattgtttagtatgctaggattgtgcagaaattgggattccctgcaaaattcaaggtacaatttctttaaaccttttccctatccaacattttttttcttacttttgcttatactaaatatattcaattgttacatcctgcaggatttcaagattcagaatattgtaggttcttgtgatgtcaaattgc

SEQ ID NO: 166903 - DNA, 462 bp, Arabidopsis thaliana landsberg; identical to SEQ ID NO: 54460

SEQ ID NO: 166904 - DNA, 721 bp, Arabidopsis thaliana landsberg
gctcctttccaaaaccctaaaatcagccaaattcaaattccgctaaccaatttccatggcagaggaaattccagcaacagcatcattcactccatacgtccattcacaaactctaacatctcacaatcgcgccgtctcctccgtgaaattctcctccgatggacgtctcctcgcatccgcatccgccgacaaaacaatccgcacttacacaatcaacaccattaacgatccaatcgccgagcccgtacaagaattcaccggccatgaaaacggtatctccgatgttgcattctcttcagacgcgaggtttatagtctcagcttccgatgacaaaaccttaaagctatgggacgttgaaactggttcattgatcaagacgcttattggacacactaattacgccttctgtgtcaatttcaatcctcaatcaaatatgattgtatctggttcgtttgatgaaactgttcggatctgggatgtcactactggaaagtgtttgaaagttcttcccgcgcattctgatcctgttactgctgttgattttaatagagatgggtctctcattgtttcgagtagctatgatgggttgtgtcgtatatgggattctgggactggtcattgtgtgaaaactctgattgatgatgagaatcctcctgtttcgtttgttagattctctcctaatggcaagtttatcctcgttggtacacttgataacacgctg

SEQ ID NO: 166905 - DNA, 1024 bp, Arabidopsis thaliana landsberg
aaaccgaaaccgaacttattagctatggcagttggaataaaacagaaggaaagtgtcaacaagattatcaagaaggtaaaacctcggactatacctctcggtaatcaaacagttttgatgtgatatctctgtttttccaccttcttatatggcagtttccatcaagtgagtttgttgtgatgctgtttcactacgatggtgctgtggatgaatggaaggagtttgagtggagtgacactgctattcatatttctgtagtaaaccaaaccaaatggtaattgtggtttaaaatcgtaaaacccgaaccggagttattacattttggctgtgcagtttcaatatgtttgtgactcttttaggtggtttgcaaagcgttttctacacccggatattgtctcagcttattcttacatatttctatgggatgaagatctcggtgttgaccattttgacgctagaaggtacgatgttatacaaagaatatattgtttgtcacttggtaaagatgtggtatctaatgagatgaatattttttggtatgtttcaattattaaagaagaagagcttgaaatatcacaacctgctcttgatcctaatttctctgaagtgcatcatcaacttacctcacgagacaagaaatcaagagtacataggtacttctctcaagctccaatagaaaaaaatttagcaaagagaagaaaaaagattgtaataatgaatctttttgcaatgttttggtgtttaaaaggagaacatacaaagtcattggtcgggcgaggtgcaacgagaatagcactggacctccttgcacagggtaaaagaactgaatcttcatttccttcttcagtggaaagcataacttgttctgaaactcattaagaaaactctctacctacagatttgttgaaatgatggctcctgtgttttccagagcagcttggaagtgtacatggcatatgattcacgtattgcatatgtttgaactacatatgtcacagactaatgaagacccattcacttctgg

SEQ ID NO: 166906 - DNA, 682 bp, Arabidopsis thaliana landsberg
tctcaggctattgattttgtcttttttttttcttgtatttcctagcgcttgagtgggaacacaatgagactgaaggagagatatttgatacaacttctgttctggagactgagattgatgttagtgtgatataccaatacgaaggtgatagtgcatttaccaaatactgtcttgtctcaatggtaagggccaagtaactagttcgtttcagttccatttgggtttcatattgaagattatgttaccagaaacaactcatatgttaatatcttcaggtttgctcggatggagatcgatacaactgcgtagcttatgaagacaatagatgggtcagacatgttcgttctcagaaaaaggtaaagcttctagacattttggtaagagataagcaagttatttgatctgtgactgagtgatgtatttttttgttgtccaggttattggagactgggatggtgttctcagcatttttcgagaactgcatattcgacctgagattctgttttttgaaaatgtaagctcctataactgcatacatggttatgttttttcttttcttatgtgtgtgtgtgtgttctcaattccaccttcttggattgcattactatgcagagggaacatatgttttccgcgcagggatctcaagcctcgagtgttatttcttagcccaaattcagcatcc

SEQ ID NO: 166907 - DNA, 668 bp, Arabidopsis thaliana landsberg
gaggaaatcaatagtcataaactaaagtaatttgttatgttttgatcaaagaattttggtttgtgcttgtaataagtcatttatgagtttattaattaaactaggaatttaaatttgggcattttttggttattaattaaaccgaagagtatcaaactttttcgtttaatttttttttttttgccttcttgaagatatatgctttcagctgccgtcattggactggtttacgccgtcatacaactgttcttcacaatctccgaattcgccaccggagtgaaaaacccttttaattatcaacttgatttttacggtgacaaggtatttaattaatttctaaccaaattaatttcttgaacctattgatactttgaatcaaacgaaactttcatgaaaatgtgtttttttgttttctttctaactaatgatcataattgaaaatttggcagttaatatcatacctagtggcgacgggttctgcagctggatttggagtgaccaaagatttgaaagacacatttctagcattagtcgcattagattcgactgatccagtggataagttctttagcaaaggctacgcatcggccagtcttcttctctttgctttcatctgtcttgctgttttatctgttttctcatcctttgccatggccaaacgaaattaa

SEQ ID NO: 166908 - DNA, 1501 bp, Arabidopsis thaliana landsberg
aacaggaacgattagtgaaagaagaagaggaagaagaagaagttcaaccaataactaaagaactaactaaagctccggttaaatctgaaatcaatggtgaagcacctaaaccaattcttgcatcgactctaataaggtgtagtagatcaaatggttgtggccgatcaagacagaatttaagtgaggtatatgattattacaaggccaaaagttttgtctaccatattcctttttttgtgacacttgaacttacttgctaatactaatctctaggctgaaagagaagaacgtagaatcagaaggatattagctaacagagaatctgcgaggcagacaattcggcgaagacaggtattttttactgataccttgtttctatcaacaaggtccatattgagaaaattagctgaatagtagactagtgttgttaagtattaattataccgtatatatccaggcaatgtgtgaggagttgagtaaaaaagcagctgatctgacatatgagaatgagaatttgaggagggtgagtaaactattcgatttacatttccatcgagtgaaccttagagaccgttgttatagctaatgacatttctgctgtggtaggaaaaggattgggctttgaaagagtttcagtctttggagacgattaacaagcatttaaaggaacaggttacataatctatcaaagaccatatcagtatcaggagaactattgctcacactgctatatctgatttactgtctgttttaataggtattgaagtcagtaaaacccgatacaaaagagcctgaagaatcacccaagccatcacaagttgagatgtctacatcatctactccgttttacttctacaaccagaatccatatcagcttttctgctggcctcatgttactcaatcatcaaatccaatgatatcaccacttgaattccctacttcgggaggagcttctgctaaaactattaccacccaggagcatgaaaatgctgcagatgataatgggcaaaaaactcacttttacgttgtaccttgcccctggtttctccctcctcctgatcacagcaatggtgttcctttcgggcttcaagatacacaaagaggtactttttcaaacaggcaccatatcgatgattcttctgcaagaccgatggatgtcacagaaactccgcggtcccatctaccaactagaatcaaagaagaggactctggttcacccgaaaccagacctttatatgatctcaacgaatctgctactgaagtcctctcagaaggaggagatggttttcctgtaacgcagcaagcttatagtttaaagcatgaagatgtttctgagacaactaatggagttacactgatgccgcctggtcatcatgttttgatttctctaccggagaaaaagcatggatcgttggctgcagcggaagctagaaagagacggaaagaactcacaaggctcaagaacctccatggccgtcaatgtcggatgcaggtcggataa

SEQ ID NO: 166909 - DNA, 2413 bp, Arabidopsis thaliana landsberg
gccctatgcggccatacagattctgtttgggcgcttgcatgcaacccatctttagtcatgtttatagcggtggaagagaccaatgtgtgagtagacaccaaacttgtttctttctttggttttcttccagcgtataacctccttttttaatttcatttatctgttatgtttccgtcagttatacttgacagacttggcaacaagggagagtgttttgctgtgcactaaggaacatccaattcaacaattagcgttgcaagataatagtatatgggttgcaactacagactcctctgtagagagatggcctgccgaagtacagagtcctaaaacggtctttcaacgaggtggctccttcttggctgggaatttgtcttttaatagggcgagggtatctttggaaggactaaatccagtaagcaaaacaatttcctcctgtaaatgctgctgttgaacctttttttattcagtgtggttaacttttcacttgtctgcaggcccctgcatacaaggagccgtcaataactgtcccaggaactcacccgattgtgcaacatgagattttgaataataaaaggcaaattttaaccaaggtaaaatagatttctctgaatgctcttgtaagagaccaccattgatagttttgtagaggggtcaatgatatgtgtttggttttttcttttgcaggacgcagctggctcagtgaaactatgggatataactaggggtgttgtggtagaggactatggaaaggtatttatggaacatagacatcttttttgagtttctgatatttgatttatgtatctgccgctgtaattctggaatattatttatattcaactccaaacgcaaatggagaagtactaagtcagagaaatatatctgttcccatcgttacagatttcatttgaagagaagaaagaagaactgtttgagatggtaagtctcttgatcgattttcaaaggttatgatatatttatcgttagtgaggctagcaggtttgtttacttattgctcatattactttcttaggtaagcattccatcgtggtttactgtggatacacgacttggatgcttatctgtacatttggagactccacaatgcttctctgctgaaatgtattcagcagaccttaaagtttctgggcgacctgaagatgataaggtagattaattgcctgcattttagttatgttgaatctaatcagatattttattattatcttactgttgcatatactaataaatctctgtatgcaattaatatttgaatctgttcaccataattgaatattttagattttcgtttgctctaacctagtcaaagtaaacctaattttgtcattggatcttgtgatttgtagattaatctagctcgtgaaacactgaaaggcctgctgggtcactggctggcaaagaagaaacacaaaccaaaaccccaagttcttgcctctggagatactttatctgtaaaagataccaaaaaaaatctaagtgcatcaaaaactgaagagagtagtgctgcaagtgatccggtgtatcctccattcgagttttcttccgtctcccctccttccatcataactgagggttctcaaggaggaccatggaggaagaagataaccgagtttactggaactgaagatgagaaggacttcccattgtggtgcctggacgctgtcttgaacaatcggcttccacctagagaaaatacaaagtattcggcagtaccttgttctctaaaaaaaaaaatagtttggacttttagcaatttcatcacatatgtttttacatttttttataaatagataaaacatctttcataaaatgtctgactttgaaagctcttcaaatttccagattaagcttcttcctgcatccatgtgaaggttcatcggtgcaggtggttacactagggaaacttagtgcaccccggatcttaagagttcacaaggtgcatttatctgtaattttaagttgtagttttgcttgcactctctgttattcaatggcttcttaaatgtctatgtaggttaccaattacgttgtggaaaagatggtccttgacaatccgttggatagtctagctattgatgcagcaagtgtttcaggaggacaacctcagccactgttttcaggaaatggattgttacagtctggattaaagccttggcagaaacttagaccttccattgagatcttatgtaatagccaggcaagtcagacttcaagagatccaactattgccctgtttctggtttcaattaactgtttgcagtatgaggctgaacgagctgtttctctgtgattatttcaggtcttatctccagatatgagtttagcaactgtacgggcatatgtatggaagaaacctgaggatctgattctcaactacagagtggctata

SEQ ID NO: 166910 - DNA, 1519 bp, Arabidopsis thaliana landsberg
attttgtagattatctcttgaggagagtgtattgattttgcagattgggattttaagttgcaacagacgatggtggaaatgtttcctctaagatcagcagatgctgcttatggaaagctcaaagctatgctctctacgcttggtgatccctttactcgactcattaccccaaaggtacttgcaaattttgattctacatgagtgtgccctttagtgtttttgggcatgatttgaaagttgttctgcattaagagttaagacacatcttgtgacttgcaggagtaccaaagtttcagaattggcagcgatggaaatctccaaggtgttggccttttcataaactcagaaccaagaacaggtcacctggttagtgatcaaacacatcttgaaacccaaataagcttggtctttggtctttttgttcattttctgagcatgaagtatgtagatcttgtttcatggtagagcccaatgtaggttgttatgtcttgcgtagaaggtagcccggcagatcgtgctggtatacatgaaggcgaggagttagtcgagataaatggtacattggtccttatctttaccaactagattgctgaaatttggctataactccgtttcttctttatgagactttaggtgagaaattagatgatgttgatagtgaagcagcagcacagaagctgagaggccgagttggaacatttgttaccataaaacttaaaaatgtactattcggttacctctacattctctttgttgaaaaccctgtatagttgagataaaaccaattaagttattgtcatttcttgtaggtgaatggatcagggacagattctggtattagagaggtaacagttaccgctgtttctgttagatgtgttcgggttacttactaaataaatgtctctcatatatgtaaaggtcaagttaccaccagattacattggactatatgcaatgggtagtgctataatccgacatagaataccctattgacgtttagggaagacaggttatgtcaaactcacagcgttttcacaggttagtgtttgtgaaaccgaaaaacagaaaaagataggcaaaatgatatctacttcactgatttgaactttctgatagactgcagcgtccgatatggaaaatgcggtgcacgagatggagaatcaggatgttcagtcatacattctagacctaaggaacaatccggtaaatgtcaggttttgtttttaatgcgaatgatcgtctcttgatcattttccgacaacttagcttttggctattccatatcagggaggtctggttagagctggtcttgatgttgcacaattatggcttgacggagatgagactcttgtgtatacaatcgatcgagaaggggttacatcaccgatcaacatgatcaatggacacgctgtgacacatgatccacttgatgtgcttgtaagtacctatatataagctgactaggtgatcaatcaacgcaatgaaatttcggttaagttaagttttatcgggtgtactt

SEQ ID NO: 166911 - DNA, 386 bp, Arabidopsis thaliana landsberg
atgacgtcagctcctcctcacgcgtccgtgactacgacccttttgcctttatctccaaacgcaaacgccgcgtccacggcggttatgacaacgaagaagatgcggtggaggcagcggtcaagaaagtttttgagttgttaggagagaatgataagaagacggtggcgacagaatcggccagagagtcgccgctgataatgtccccggcagtgagacagctcagggtgacggattcgccgttcccgttagacgacggtggagatcacgatcatgtggtggacaaagccgcagaggagtttataaagaagttttataagaaccttaagctgcaaaagaagatgactaacgcattagagtcgccgtaccacgatggatgggttagatga

SEQ ID NO: 166912 - DNA, 1124 bp, Arabidopsis thaliana landsberg
ggttatcctctctattattcaacatcaacatacaaacatttatcgaattcatcatcgtcgtcggcaatatcttctccatctaggtataaccattcatcatcatcatcagatagttataagacagaagattcagaaccatcgtcgtatgataatgattacgacgacacatatcatgatcccaagtcatcatctttgcataacaatgatcgtctatccatctcatcatcgaatggtcatcatcaagtaactcctaagaaagagcaccgccggaaaaagagaaaacgtaaatgcgatatattctccggcgagtggatcccaaaccctaaagccccgtactacacaaacacgacatgcagggcgatacacgaacaccaaaactgcatcaagtatggaagacctgatttaggtttcatgaaatggagatggaaacctaaagaatgtgatctccctctgtttgatccttacgagtttctggaaatagttagaggaacaagaatggcgttcgttggtgactccgttagcagaaaccacgttcagtctttgatctgcctactctctcgggtaccaattctctcaatgcttatccaacttttttatttattttatgacaatacttactcgtttaatacattacttgatgcaaaagtaaccttggtttagatattaatttcaggtggaacatcctgaggatgactcacaacaggagtttaatttccaacgatggaaatacaaaacgtacaacttcacgatcgccacattttggacaacacatttggttcgcgctgaagaaacggaaaccggtccgacaggtcctaattcattctacaatctctacctcgacgaacctgaccctacttgggcttcccaaatcggtgagttcgattacataatcatctcatctggacaatggtttttccgaccactcttccttttcgacaaacaaaaaaggataggatgtttgtattgctacattcccggagtcagaaatgtcggggcacatttcgcgtatagaagagcgttgagaacaacattcaagacaattcttgaattagagaattttaaaggagaagtgtttttgaggacatttgctccttcacatttcgaaggtggagcatgggacaaag

SEQ ID NO: 166913 - DNA, 994 bp, Arabidopsis thaliana landsberg
tgtttaagttaggtgtgttctgtttttgttcttgtcagagagcttttagggacggttaagaggcggaatgaagtgtatgagtacctgagagatgctataggagattcaatgatcagctatgacattgaacttgttggccctgaaatcacagcttgctcaacttcctcgtcggttgcagaaacattgttctcctcggatgtgtcgggagagcattcgagtgggttaaacacttcaagcaatgtttctattgcagttgacaactcgctaagctcagctcacaccctcattcatatcacttgtcaagatcacaaaggtcttctctatgatattatgaggaccttcaaggatttcaacattcaggtttgtgcaagtctttaatgggttttttctgacccttcaaattcatatgctttgcttaaaccttgcgactgttatttacatgagactcgttttctcgaatcttatttgatgatcagatctcatatgggcgttttacaatcaaacgaggaaagaactgtgagatcgacttgttcatagtgcaatctgatggccgaaagatccttgactcgagcaagctaaatgcattgattactcgtttaagagcagagctacagcaacctctgagagtggtaatgatgaatcgaggtccagatactgaacttctagtcacaaacccagttgagttatcaggaaagggacggccacaagtcttccacgacatagcacttgccctcaagaagatcgatacctgcatcttctcggtataatataactcacccaatcacatcattcgagctcataccaaaaacagtccatttttgtatcatctaaatatcgatgaatctgatgtctttactaggctgaaattggaagacacgtgactggagacagagaatgggaggtgtacaaagtgttgatcaacgaataagacagcttaccaatcccgagaagcaagatagaggaagaagtatggcatgctttgatgggctgggaa

SEQ ID NO: 166914 - DNA, 413 bp, Arabidopsis thaliana landsberg
aaaagaaactctcggtgttatatcaatgcatgaattcatctgcgatagagatttggattacaactaagattgagctcaatgtggtgttgtggatgcccttcttaaaagtttatatagaaccacttactggtcttgattttcagttttatgaagagccttgcggtttcttcattgatgaagagaagaaagtcttcgtggtttttgagttagatgaatctcaagcctacaaaaatgcttacatcattggagagaatatatgcttgaaaaaattggatcttggagaagttagaacattttctagcccaattgtgtgctccagctgttatgtttcaagtttagtgaaaatcaaggaagaggaagagcaaaaggaaagagaagaagtgaaagcgaaccaagttaacaacaaggtctaa

SEQ ID NO: 166915 - DNA, 1147 bp, Arabidopsis thaliana landsberg
tctttaaaatgtagtttttgggtcccacctacgatgtgttttgtatccttttacatgctttatttagttatatataaagatagtagaattcctttttaataattaaattgcaaaatatgtagtacccacttacttatttaggacaattagatttttatatttaaggttaggtcagatgtattattctatgttgttcaacgtggtaaccaattcctaataattgtaaggttataaatttgagaacacaattggatcactacaagaaagtggagagattatggaggacaaactttggtaaagaagaaagcaagaagagaatctcaagagctgtctatttgataagcattgggagcaatgactactcaagcattttcttgaccaatcaatctcttcccatttcaatgtctcaacatgttgacattgtcattggtaatctgactacattcattcatgtaagttcatcatcatcataatataaaccttatttttgttacattcatttatccattataatattttgtaacaggaaatatacaagattggaggacgtaaattcgggttcttgaatgtgcctgacttgggttgttttccggctttacgaattctacaaccgaagaatgatgattcttgcttaagagatgcttcaagattagcaagcatgcataacagagctctgacaaatctcttgtttcaaatgcaaagacaagtcaagggcttcaaattctccctatttgacatgaacaaaagccttagactcagaatgcaacatccttctaaatttggtaagtgagctctttgtgaattttgttgggctattccacttatgatattcatttaaggggccattaaagtatatgttcataacccaataccatttttgtgataaataaaagggtttaaagaaggggaagaagcttgttgtggaactgggaagtggagaggagtattcagctgtggagggaagagaattgtgaaagaatatcaattgtgtgagaatcctaaagattatattttttgggattcacttcatctcacacaaaatacatataaccaattcgcaaacttaatttggaacggtggacacatgtcagattctctagtggttggtccatacaatatcaataatttatttcagattccttgattt

SEQ ID NO: 166916 - DNA, 684 bp, Arabidopsis thaliana landsberg
tggtctgattttaccctccatgaaccggactttcaagagtgctacacgacagaagctgtgttgaacatgatcagagacggttcttatcaacacaagttcagagattttctcagaatccggtctcagattgttgcgaatatcaacatcgtgggatcaaaacaagtcttaggaggaggagaaggtggtcaagaatcgaacaagtgtttctcgtgcacgcagctttttcagaaagaactgacaccgagcgatgtagggaaactgaataggcttgtgatacctaagaagtatgcagtgaagtatatgcctttcataagcgatgatcaaagcgagaaagagacgagtgaaggagtagaagatgtggaggttgtcttttacgacagagcaatgagacaatggaagtttaggtattgttactggagaagtagccagagctttgtcttcaccagaggatggaatggtttcgtgaaggagaagaatctcaaggagaaagatattattgtcttttacacttgcgatgtccccaacaatgtgaagacattagaaggccaaagcaagaccttcttgatgattgatgttcatcacttttcaggcaacggtttcgtggttcccgaggaagtaaacaagacggttcatgagatttctgatgaagagatgaaaacagaaaccctctttacctcgaaggta

SEQ ID NO: 166917 - DNA, 1554 bp, Arabidopsis thaliana landsberg
ttcaaaattttgattacagggagagaaagagtgctcttattacttgagaaccggtcagtgtaaatttggtttgacttgtagattcaaccatcccgtgccactcgctgtacagggtccacctcagcagccgcaacagcagcagccacagccacagccgcagctacagactatttatccgacacttcaatctcaatctattccttcgtctcaacaatatgggttagttttgactaggccttcttttttaactggttcatatcttcaaagcccttacggtcctccaatggttctgcctcctggaatggttccatactctggttggaatccttaccaggtaaatccatcttctaagcctttatctcgcttttgtaggattcttcattgctactctttttgtaaatgaatctatcgactttttaggcttctttaagtgcaatgccttcgcctggaactcaaccgtctattggatcaagctctatttatggactcacgccgttatctccttcagcgactgcatatacaggaacatatcaatctgtgccttcttcaaattccacctcaaaagagtttcctcagcgacctgatcaacccgagtgtcaatacttcatgagaactggtgactgtaaattcggatcttcgtgtcgataccatcatcctgtagatgcagttccacctaagactggcattgtcctcagctccattggccttccacttcgtcccgtaagtcttttttcatttttctagagatacaaactcgatccaatatcagattttcaacgagtcttgatatgatacgtttcaatgtatttgacagggcgtagcgcaatgcactcactttgctcaacacggaatctgcaagtttggaccggcgtgtaagtttgatcactcaatgagttcttcgcttagctacagtccgtctgcatcatcactaactgatatgccccgtggcgccatacccaatcggatcatcctcactcagcggctcatcagctccagtaagctcaagcaatgaacccaccaaagacgctgtgactcctgcagtttcttctatggtcagtggctttagccgtcctgagccagctgagacgagtggtgactcagccagcgtcagtggcagcatagaagctaagacttcatgttaaaaataaaaaaagagaggaaaatatcctcaattcttcatgaactaagcaacattaagaaaaaaaagagaaaagaagattatttttggggtctgagatttgatggaagcagagagactaaagcttctgtcattgaccatttgtccatatataatatattctctcatacggccatctctcctctcttgtttatttttcttgaataacgaattactaataaatggccttattcaagcgacattcatcagaagtcccctgtttttattccttcatgaatctggaggagtaatttaaaatgtctgcgaacgtagaaagaagcataaacggatatagtgtacacattttctcttcctcgttcttgtaagttgtatccaatgacatctacattcaatcactgcacattgcacgaacaatg

SEQ ID NO: 166918 - DNA, 1459 bp, Arabidopsis thaliana landsberg
tgagtgggttctgaaaaacccgaaaatgccggagcagccaaagaaagttgctgataggtatctcaagcaagaggttcttgggcaaggtacctatggagtcgtcttcaaagccactgatactaaggtcatatctttgctgatttttgtttgcaaaattagggtttaggatctgtcggcaattcctaatttctccttcttttttggttccggattttgattgaagtttttgttggatcaaggggaagtaattgtggggtgtaattttgcagacggaacaaactgtagcaattaagaagataaggcttggtaaacaaagagaaggtgtaaatattacagctctcagagaaatcaaaatgctcaaagagctaaagcatcctcatattattctgctcattgatgcatttcctcacaaggaaaacttgcatcttgtctttgagttcatggagactgacctcgaagcagttattcgcgattctaacattttcctctcacccgccgacattaaatcctacctcctaatgacatttaaaggacttgcttattgccacgataaatgggttttgcacaggtacatttgtttatccttaacaacttgcttattgtctctgtaatgttgcttggtttgggcactgattatgtgtggcttgagttcagggatatgaagccaaataacttgttaataggagttgatggacagcttaagcttgcagattttggcttagcacgtatatttggtagtccaaatcgtaagtttacccaccaggtatgctttttgccgcattgccattttatctattgctgtaatataaccaaattgatcgactaactcatatgaaatattgataagaaagttttaagtagttcttatcagtagttatgtctagggatgaggaagattagatgtctcatgtcttttcatttctctagttgtatactaaatgtaacatgtattaaacagtctcaatttatattaaatgatggtgcagtagctatctcatatctgtactaaaagttttgctgttaaccggatttttgacctgagctatttctgccttctttgtttccctttgaacacccaaaattacaatagaatccatgtgagctctgtttccaaatgcgcaatgcaacttattttctcttgtttctagttgttatattatcttcatatcttgatatatctgataatgcacaggtgtttgctagatggtacagagcaccagaacttttgtttggtgcaaaacaatatggtgctgcagttgatgtttgggccgttgcctgcatattcgccgaacttctactacgcagaccatttcttcaggttaaataatcttactcaaatctaatggctaccattaaaactttagtccaattgtcatctctttggatgttatactcactctcagactacataattacatattcattatcaattttctccgtatgtttacttattctattt

SEQ ID NO: 166919 - DNA, 1240 bp, Arabidopsis thaliana landsberg; identical to SEQ ID NO: 26992

SEQ ID NO: 166920 - DNA, 2652 bp, Arabidopsis thaliana landsberg
gcttatggagactcaactaaagaaagaaaacgggcacagattgctcaaggttggccatttcttctttattttctacaataacaattttcttcagttattgtatgattaattacctgaaggaaccaagtgatgttctggaatactctctctattgcatgcttaaatattattatgacatgaaaagaagttatgacgagaacttatttcctgtttaatggttatagagtttttgttttctcttgctcagtatgtactcaaggttcactaattgtttgttctcctactcgatcagctgtggctgccgaggttaccgtggtaccaccttcacggttaatggctttgataggtcaggctttaaagtggcaacaacatcaaggtgattatctaaggaactgtggatgctaccaaacagttctgtcaaacttcatctcgttttcttttacttttttgcctacattactaatatatcaatggaatcaacatatgtaccctctctcatttcctaaaatttacatacacttgtgtcaggcctgctccctacaggaacacagtttgacctctttcgtgggacggcagctatgaagcaagatgtagaagacacacatcctaatgttcttactcataccataaaggttcatattcacactttaatagcttctttagcttagtggtctatgatctgttgctcatgattattttgggttttctcatcagttgagttcttgtctaattttcatatctttttccttgtgctggtgctggtgcagtttggtaaaaagagtcatgcagaatgcgctagattctcaccagatggacagtttcttgcatcttcttctgtggatggttttatcgaggtgagttgatccggaatctgtatgtatgataatacaagttattagtctttaaaataattctgtgactaggattgctcagacttgaaaagcattacaggtatgggattacataagtggaaagctcaagaaggatttgcaatatcaagctgatgtaagctctcatgtcttcttttcattttttaattctaactcagtacggggtcagatgagctgttagtacattttaatcaaatgaaaataatccttactgcatctgattattgaacgtgtgacaagtctgtgagaatgatatggtggattactttttgctttttattccaaaaatgtcgcccatgagattcctgaagcaccaagtatatggtggattactgttatctttgaattttaattttttctccaatgtaactcctaaagcaccaagtatctcgtctgagacttcctggtatacaaaatatcagttttggataaagagttcccattccatcctctttacttactatgattaatttctgacaggaatctttcatgatgcatgatgatcctgtcctctgcatagactttagcagagattcagagatgcttgcatctgggtcacaagatggaaagattaaagtaagttccagctgcatatgtttccttaaagttgaattttttgtctgaagatagactattgcggcagtttggtagatatatcttcttcctctcattggtcccatatgtattctgattgaatacaaatagaaaaactagacttagatgcatgtcacttttgcagatctggcgtataaggactggtgtatgcatacgtcgttttgatgcacattcccaaggagttacaagtctttccttctctcgggatggaagccaattactgagtacctcctttgaccaaactgcaaggttttattagttatatctttttttttattttgtacttgcgatatgaatctcgtcctatcaaaaacttgaggctttatatttctttgatggtagaatattcttttaacttttgattgcatcttttttcttcttgtttttgttaatattttccttttcatttggtagttatgtaagtttattggtagagcttctagtcgaatataatatcaaattcttattatatattttgctttattttatgcagaatccatggtttgaaatctgggaaattgttgaaagaatttcgtggtcacacatcttatgtaaatcatgccatctttacaagtgatggaagccgtattatcactgcctccagtgattgtacagtaaaggtaaattcttcggctttggctgtcagcagtatcattgtttctcatttggactctctgccccttctgccgtgtaataacagtcttgtttccttgcacaggtctgggattctaagacgacagattgtctacaaacattcaagccgccacccccgttaagggtatcttttcttatacagatttatgtacatcttgtaatactttttctgatcttctgtggcaaactctttggttaccaagtctgaattttgaaatatagggaactgatgcatcagtcaactctattcacttgttccccaaaaacacagaacacattgttgtgtgcaacaagacatcatctatatacattatgacactccaaggtcaggtaaattttccagcaacggtctcctgcaaatcagtgtcattgtcatgccaaaactaagattgttcacatgcttctaaattggaatccttttgcaggttgtaaagagtttctcatccggtaatagggaaggaggagattttgagcagcatgtgtatctgcaaaa

SEQ ID NO: 166921 - DNA, 476 bp, Arabidopsis thaliana landsberg; identical to SEQ ID NO: 69583
  unsure (1)..(476): unsure at all n locations

SEQ ID NO: 166922 - DNA, 464 bp, Arabidopsis thaliana landsberg
cgcatccgcgtcaaaggtctcggcaagcgctacggcgcgcttgaggtcttccgcaacatcgacttcgatgtcggcgcgcgcgagatcgtcgccatcgtcgggccgtccggttgcggcaagacaacgctcttgcgttgcatcgacggtcttttgccgcacgatgccggtgaaatctgggtgggcgaccagcgcgtcaccgagccgatcgccggcgtcgccatggtgttccagcacttcggcctgtttccgtggaagacagtgcacgaaaacgtcgcttacggcctgcgcatggccggcgcgtcgaaggccgagatcgagcgcaaggtgccggagttcatcaagctcgtcgggcttgccggcttcgagaaggcgtttccctatcaaatgtcgggcggcatgcaacagcgctgcggcctcgccaaagcgcaagcggtcgagcccaacgtcctgctgatggacgaacc

SEQ ID NO: 166923 - DNA, 924 bp, Arabidopsis thaliana landsberg
  unsure (1)..(924): unsure at all n locations
accattgggatactttgatcacatggactgttcagttttacttcaatgagatttgtttaaggcgaatgaaaggcatggttagcactgcaagaactagtcaaaataaacctaaatggatcggaaaaactctatggaaaacaatgactgcgtactgggacactgaagaagctcaagaaagaagtcaaatctgttcaaatgctcgtatgtctgaccgtaacggtctaggtcctcacatacccttctcacggtcgaagtcatatcatcaaatccgagacgaattggtaagtcttctctctgtttactcctttgcaactttaatctgatgtttctctacttttctatgacttgttatttttttcattacaggaagagcaattgggcaaaactgtcaatattggtgacgttttcatcaaaacacatacaaaacctgatgggacgtatgttgatcgaaaggcggagaagattgcggagttatatcaaaagaatttgcaattgaggcagtctgagctcaaggcagaaacttctgctgtttcagatggcacttcgcgggaacgggagctcacagctgaggaatgtacaaccatatttcttcaggtaacgttttatgtttcccaatttagtgttttcgagttcaattttcattctctactctcagcttttatcatactttgcagtccactaagagggattcgagaggcgttccttatagagtaggaagcctcatagagtctcttgtcaatgccaagcggaagcaagcaggtgactcaacttcttttgtggctttgcaagaacaattactcgaagctcaacgcaagatagaagagcaggcctcttacaatcagaggcgtgaatatgagattgctttgcgtgaagctgagaaatccctnagctgctgatgagaagaagaagaagattgagcacttg

SEQ ID NO: 166924 - DNA, 1914 bp, Arabidopsis thaliana landsberg; identical to SEQ ID NO: 27863

SEQ ID NO: 166925 - DNA, 1101 bp, Arabidopsis thaliana landsberg
gaaagctagttttaaactatgcatcggttatatatatattcttgaggctaaagatagaattgatctttgttaagacatcaaagcaagacattaggtaatgaagccaaacatattggtgggtataacaaagcttttcaactcttttcagccatttgtttgagttttaaacacgtttcgaaattccctcaccactaacattaaaaaacctcgtgccgattctaccacaacttgtgcatgattgtaattcttttacacgaccatatacaaagacaagtaccaaaatatacatctgttttttgtcaacacaaatgtatacgcataaaagtgatagataccgaaagttagatattccatatggtggtgtaactgaaatttggattgaagttgaatattatttgatttatttacggatctttcgggtcttggatcttaaatttttttaaaccacacatgtatttaataatagcttcttttttttaatatgaatgttaacttctttatggaattcgaaagggattctaactaattacaaaatcgaagcatttggcaaatgttgttctacaaccaaagcttacaaagtctcaatgcaaacctttttttattgctcgacgtagatgtagctgtttcattgcatcaacaactagatcgaaccttcaaaaacataatatattttttttcaaacaaaaagtgatatagtttattaactcgtgatgattatccttcattatgattaggtggtcaaaaattgcaaagcatttaccaggaagaaccgacaatgagataaagaatttttggaggactaagatccagaaatacatcatcaagagcggagaaacgacgaccgttggatcacaaagctccgagtttataaaccatcatgcgacaacgagccatgtcatgaatgatactcaagaaaccatggatatgtattctccaacgacgtcgtatcaacatgccagcaatattaatcagcagcttaattatgggaattatgtgcctgaatccggttcgatcatgatgccattatctgttgatcaatccgaacaaaactattggagcgtcgatgatctttggcccatgaatatatataatgggaattaa

SEQ ID NO: 166926 - DNA, 944 bp, Arabidopsis thaliana landsberg
tcttactacactggacttcttggcataatatcttattcctctctaattagtttggacgtgaaaaaagcttggctatgtgatgttcattgctctatatatgtatcacgcttagtttggtaatgtttttaactgtttcatttgatcggaacaggtatgcctggtatgactgcttatgctggattttacgaagtttgttcacctaaaaaaggagagactgtcttcgtgtcagctgcatccggcgcggttggtcagctcgtgggacaatttgcaaagttgatgggttgttatgtcgttggtagtgctggcagtaaagaaaaggtacttaaaactctacattacttgtcaaaactttaatgcatataagagggcctttttctcaagatccggagtttctctaaggttgatcaactcaagacaaagtttgggtttgatgatgctttcaataacaaggaagagaaggactttagtgctgccctaaagaggtcagtttacacatctatctctagttatatatagataggaagtcatacataatataattaaaagcgatgacttattataattataggtattttccggaagggatcgacatatattttgagaacgttggaggcaaaatgttagatgccgtactcataaacatgaagttgcatggtcgtgtcgcagtatgtggaatgatctcacagtataatttagtggatccagaaggcgtacacaacttacccaccattctttacaagaggatacaacttcaagggtttggggtttgtgatttctacgacaaatatcctaagtttttggattttgtgcttccttacattagagaagggaagataacatacgttgaggatatagcggaaggattcgagagtggaccttctgctcttttaggactcttcgaaggtaagaacgtcgggaaacaactatttgtgggtgctcgtgag

SEQ ID NO: 166927 - DNA, 2459 bp, Arabidopsis thaliana landsberg
gactgcaaaagtacgtgccacagtgaacagtgcacggcagattcagagcagcgaagtcagagtggcaccggactgtccggtgcgcaagaggacaaagcctccaacggtcgaccagctctgaaccctaatggttgggtgacgtggctggcgcaccggactgtccggtgcacccatcgatagcagccctccccaacggctgttttggttggttggggctataaatacctccaaccaccaccactccaagcatccaagttttccagacatctcattcaatacaagagctagtgcaataattacaaaacacaattcaatagaatcaaagcctctccaagtcccaaatccactccaaacaaatagtgactagagagagtgttttgctcgtgttctttgagctcttgttcttggatcactttcttcttcctcattcttgttctcaatacacttgtaaccaaagcaagagacactaagtttgtagtggtccttgcggggtctaagtgacccatttgattaaggagaaagctcactcggtctaggtgaccgtttgagagagggaaagggttgaaagagacccggtctttgtgaccacctcaatggggactaggttcattgaaaccgaacctcagtaaaacaaatcatcgtgtcatccgctctatttctttggttgatttgttttcccctctctttcggacttgaatttatttctaacgctaaccccggcttgtaatgtgtttaagtttgtaaatttcagtttccgcctatccacccctctctaggcgactttcaattggtatcagagcccgatacttcatttagggtctaaccactcgaagtgatgtcaggaggatccgcctagagggagatggaaaccgacgataaagccacaagccacgggaaggctccatcaagggagtccggcgccaaaggaagggaggaatcacctccccacgtcaagtcgcaccggagtggtgagaagaagaagatgaacaaagtggtctactacgagaccgattcttcatcgccctccacctccggttccgacgccccgtccgtcacttctaagcaccatgagcgcaagaagtatagtaagatgccacttcgctatccccgtatttcaaagcatgctcctttactttccgtcccattaggaaaccaccgttcttttatggtgaggactattgtatgtggagtgataaaatgatgcatcatctaacctcactccacgctagcatttgggacattgttgagtttggtgcacaagaaccatccgtggggggacgaaggctatgactcggacgaggtagcccaattccggcacttcaactcccaagccactactatactcctcgcctctctaagtcaagaggagttttataaggtgcaagggttgaagagtgccaaagagatttgggacgttctaaagaccgcgcacaaaggagatgaggtgaccaagatcaccaaacgggaaacaatcgagggggagctcggtcgcttcatgcttcatcaaggggaggagccacaagccatgtacaaccggctcaagaccttggtgaaccaagttcgcaacctcgagagcacaaatgggatgaccatgaaatggtcaaggttattcttagaccactcgtttttcttaaccctactcaagttcaattaattcatggtgatcctagatataaacaaatgtctctagaggaagtgatagggaagtttgtgagctttgaattgatgatcaaaggctccaaacaaatcattgagcgagacgccacctccacacccgaggtgcaacccattgcatttaaagcgacggaggagaagaaagaagagtctacgtcaagtaggctccccatcgacgcctccaagctcgacaatgaggagatgactttaaacatcaaaagtttcgccaaatcctcaaacaaaggagggggaggactacaagccccgttccaagaaagtttgctacaagtgtggtaagtccggtcattttattgcaaaatgtccattatcaagtgatagtgacagggacgacgacaagaaggggaagaagaaaatggagaagaaaaggtactacaagaagggtggcgaggcgcacatggggcgtgaatgggactccgacgagagctccaccgactcctccttcgacgaggctgccgccaacatcgcaatcaacaaaggcctcctcttccccaatgtcggccacaagtgtctcatggctaaggtcagcaagaagaagaaggtacactctagagttacccccaaatacactacatctgatgatgagggtagctctagtgataaagaagatgatttagtttctctctttgccaaccttaccatggaccaaaacaaaaaattaaatgatttaatagaaaccattaacgagaaggatgatctcttggaatgtcaagaggacttgctcgttaaggaaaataaaaaatttgttaagttgaaaaatgcttatg

SEQ ID NO: 166928 - DNA, 2085 bp, Arabidopsis thaliana landsberg
ctggctcgccaacccggttgtcgctaaaagaaaaacgggaagtggagagttttcatcgactttacggacctgaataaggcatgtcctaaagacagtttcccactcccacatatcgaccgactggttgaagccactacgggacacgaactattgtccttcatgggtgcattctccgggtacaaccaaatacttatgcgccccagatgaccaagaaaaaacagcttttataactgactgaggcacctactgttataaagtaatgccctttggttaaaaaaacgctggagctacttaccaaagattggtgaatagaatgtttgccgaccagctaggtaaaatgatggaggtctatatcgacgatatgctggtcaagtcagctcgcgaaaaagaccacgtcccgtaattaagagaatgcttcaaaatcctaaacaaattcgaaatgaaggtaaaccccgagaaatgctctttcggagttccatcaggggaattcctcggatacctagtaaccgaaagaggcatcgaggccaatcctaagcagattgcagccttcatcgaaatgccatcgccaaaaacggcacgggaggtccaacgactgaccggctgtatcgccgccctcaacaggttcatatccaggtctgccgacaaatgcgtccctttctatcagctcctccgaaaggataaaaagttcgattggaatgatgactgcgaccaggccttcaaacaattgaaagcataccggtccgaactacccatactcgcaaaaccccaaagaaggggaaccattgtacctgtacacggcagtctcctgaaccgcgataagcagcgtcctggtgagagaagatcacgaaggacataaaccgatctataacgttagtaaaacattgatagacgttgagacccgttatccagcaatggaaaaactggcactggccgtagtcatgtcgcgtcgaaaaccgagaccatattttcaatcacaccccatcgtagtgatgacgtctcaaccaatcagaaccattctacacagtccaactcaatctggttgacttgcaaaatgggccatataactaagcgagtacgatatagaatatcgcaccagaaccagcttgaaagcacaggtcctagccgactttgtaatcgagctcccgttagcggacctggatggaaccaactctaataagaagtggctcctccacgtcgatggctcctccaaccgacaggcatccagagtaggaatacaactcacctcccccaccgaggcagttatcgaataatcgttccgattcggattcaacgcatcaaacaacgagtctgagtacgaagacttcattgttggcattaagctagctcaaggaatggggatccgcgatatacacgcccatagcgactcccaactcgtcaccagccagttccacggggaatatgaagctaaagacgagtgcatggaagcgttactcgaactggtcaaaaccttgacccaacagttcgaatcgtttgaactaacctggaactggctggtgacgagttgggagacgccttggcagctctcacttctacctcagatcctttcgtcaaaagaattatccaggtcgaaggaatagaacacccgagcatcgacctaacggtcaaacatgctgggatggaaaccttcgacaacttgcaacttcacgcgagtaacccgaagcaccaccgcggcagctagagctctcgcagcagccgcagaggcaagtgcagcggaggaagagccatagctcgaaacccccgaacaacctgccccgtaccaacgtgccactggagtatctcaatcatcgattacatcgaacgagggatcacacctcccgacaagtggaaggccagaaaactcaaagcccagagtgcaaggtactgcatcatggaagggagacttatgaaacgcagcgtcgcaggtccctatatagtgtgtacctacgggcaaaaaacaaaagacctcatgaaaagcatgcacgaaggataatatggtagccactgtagtggacgtaccctctccctcataatcaaaaagcaaggctacttctggccaacaatgctagccgattgcatagctcactc

SEQ ID NO: 166929 - DNA, 2060 bp, Arabidopsis thaliana landsberg
tagccatgcctgccctcactcgtacaagaagagggctgcgacgaactcgataacccgtccaacgaagcagcttacgaaatccaaaacccctccaatgaaaccccaaacttcaatgttgaagaaaggagcgaaatctcagaacaaacctccattgaagaagcagaagaaggaagttgtggaggaagagcctctagaagattacgaaggtaccgatgattctgatgaagatgacgaagtttccgatggttctgatgaagatgatatttctccagctgtggaatcagaagagattgatgaatctgatgatggagagaacgggtctaatcagttattctctgatgatgaggaagagaacgatgaagagactttgggtgacgattttctagaaggtagcggcgatgaagatgaggaaggatctttagatgcggattcggatgctgactctgacgacgacgatattgtggcgaaatctgatgctattgatagagacttagcaatgcagaagaaagatgctgctgctgaactggaggattttatcaagcaagatgatgtacatgatgaagaacctgaacatgatgcgtttaggctaccaactgaagaggtaacttttttttcatgtgtaatacttactctgtttgattttggttttagcatatatctaactgttgttgttatctttcatttgtccaggagcttgaagaagaagctcgtggtccaccagatcttcctctacttaagactagaattgaagagagttagtaacatttccaaattttgttgctttattactgttgaaatgttggtgtgatggtatttatctaggttggtttggatttgtgttctaattgttgattcatttaacatttcagttgttagagctcttaaaaattttaaggctttcaggccaaaagacaccacgaggaaagcttgtgttgaacagctcaaagctgatctcggttcttattatggttataacagttttcttattggaactttggttgaggtgagactctctagtttctttcctttgatatagtatggataggatgttgctgatattctttacttatggatgttgaattgggatttctcttgcagatgtttcctcctggtgaacttatggaacttattgaagcttttgaaaagcaaaggcctacgtccatccgaactaacacacttaaggtgaacttggttgtgacttactgggttgtagcttatgactttcaagttctgcaatttcatggtgatgtatgttttgctttagactcgaagacgggatcttgctgatgtacttttgaacagaggagtcaatctagacccattaagcaagtggtctaaagtaagtagtttgttcttactattttctattctgtcagtcctatttttatgaatcttctattgttgatctgtcctaagtcttatttactgatgtcctactgcaggttggacttgttatttatgattcacaagtcccaatcggtgcaactcctgaatatctggctgggtactacatggtaagtgatcttctgatgtctttcccttttcttcacctttatggaatgcaattgtttgcttaagtctctctacttggtgtatttgcagcttcaaggtgctagttcgtttttgccagtgatggcccttgcccctcgagagaatgagcggattgtggatgtagcgtaagttatcatcatctactcatctactaaacaatcgctgcagctaaaaagcgtttgaccttgttggcgtgtgatgattccaattctagtgtttgactgttttgttgtgtgagtttataacaagattttatatcgatgcagtgctgctcctggtggtaaaacaacttatatcgccgctctaatgaaaaatacgggtatgtcttcattggtttctcttgcttcttatccccatattctatttggctgtcgtatgttttttttttttggtttaagtaatgtttataatgatgctattaccaggcttaatatatgccaatgagatccaagtacctaggcttaagagactactgccattctgcaaagtatgggggtaacaaatccata

SEQ ID NO: 166930 - DNA, 2427 bp, Arabidopsis thaliana landsberg
caagtgatgacgacgagtttggatcggtgggagaaagatcctttctttcccgctgctgaagaagttcaggaatctgccgacaggtttgcgtttttcggatcctcatctcccaattttcgttttgaatctgtgataccataaactctcattgttggtgatgcaatgtcgacgattcgattcgtgttgcttcggatttgggattacgatttctgattaatcaaatcaagtcttagatctgaaatctcacaatgtgtgttgttatcttcgattcatgtgtaggatggagtcagcgtacaggacatggctcaatgggaaacgagactcttcaaaagtatgggactctgagcagcttcatagagatcttcacgcagctcttggaaccaccaaatggcaggtttctttctttcctcagaactcagattcttaatctgtaatgttgatttatgaaacctgtaatatttttggtgtagttagatgaattccaaaaagctgtcaaatctagctatgacaatcgtttgagtgatgaaactagagataggcatcgtgagtttactttcgtaatggaagctcaagtgtcgaaaatcgagaaatctctcaaggaagctgcgcaatccgatgggaaagggaacaccgagatgggttcgtttgggatgaagatgatcgtaatgagcttgctctcttcttgactggtccatctgaatctgctaaagcaaatcctaatggacatagaaggactgcaagtgctgctgaattcagtgcttggaacattgcggtttctgatgatggtttagtgaagaaatcttgtgatgagccagtggttcgacctccgaggaaagtacctagcttctctggattcttgaattatatggatcctgtgtccaagcattgcaatagaaagtggaagggtttagatcgtcaaggagactctgatgctgctttattacctatccaagctaaccaagtaagtttgatcgatcgatctccaaccgcaagatttttgcctcctgctttgaaaatctttgctaagaaatgctttttatttttttgtttctcagcaagatatgaatggatgttcagagaggggcaagagttgtatggagtgtgaggaggactgttatgaaaagcagcttcatggttggtatggagctctacagaggcaactccaacggtctcagtatcgaatgcgatatagtaaatcggttcacgctgcaatttggattattcttttagtttttcttattggtaagatttactgaactctgaatcatttatgtttagaacgcaaagcttactgcatcacttttgagttttgagataaattgttttttttttctgattgcagtggtagttgcagtgcattcaatgtagaagagaggtttggaatagcaaggttcgagttcattcatcttctgtgtaacagcgaaagagacgaatttggcaatccacatttttactgtacagcaaattccaactgtttttggttgtttgtaatatagaaatgcatttttttggttcgattatttgaaacgggtttcattgagcaatcattgttttcttaggcaccaatcctattaaccattgtagaattatttgggactaaacccaagattgaagtggaaccttctaaaaatgacaattcagaatacagaaatgcatttcgtattggattatttgaagtaaccgtttcattgagaaataagaaaaggtgtcagaattcttttacaatcaatccgagcagagtattgaagcacacgactgcttaagtggagtttttggacatgttagccaccttctcctcccgtttatcggcagtctctaactcgatgccttgaaatgtaagtctagatgaacgatagtgactcccaaacgcagtcccgaaaccccacccgaggcccaaacccaccccgcaaccgccacctttgtcaaataccagacgcataagttacgtaattagaatttaggaaaaacctgctcggtgtgtatctatgcgagtgtgggatatttgaagtagaagtttgaaatgcttaccagcaccaacacctaagatgttcataggcattcctgcatgaaagcaacggaaatctccaattcagtaggtttgcaaaatagtatgaatccatcaaaatgtaagcgcaactgatactagctatgcgtttaagcaaccattagctaggaaagaagaagcatttgagtaaagatgatatgtaggagttgataatctctataagagacattaagcaatatgatcacaaaactaaacaagcacagcagagtgcattgcacatcccatagcaactagcaagagaattgttccaatagaattatcttgtaattcagtccagattttgttcaagtaaaagcagaaaaagagagaagttgagaacgaacctccaaaaccccatccaacgccaaatccacaaccgtaga

SEQ ID NO: 166931 - DNA, 1029 bp, Arabidopsis thaliana landsberg
acactcacacgaatccctcaagtaaagcttagaattccagtctacgagggcggaagcgatcccaatctatacatgacctccttcatgacaacagtcaccaaggctcacttccccgacgaactcagagatgtcggctgctgccagctctttgtcgacggccttgttggaaacgccttaacctgcttttccagattagaggcgagctcaattgataacttcacccaattgtcaactgctttctttaaacagtaccgggtgtttattcaaccatgagcttctagttccgacctctagagtatgactcaggagaacggcgaaccattgaacgtctatctaagacgcttcaaagaaatactgtctagagttaccattacaaacgaagccgcgatggctgccttcaggaagggactgtcccaaggatcccaactaaggaaggatctcgcaataagagaaccgcgagatctcgacgacgccctgcatagagcttcacaatatgccttccttgaagaggaagacgccaagctggcaggaaagtctcaaccgccgtaacccaagaaaaaagcgcgggaagtttactaggagccgcgtgaacactatgacccaaaggcgaacaaacgaggaacgatcttcgccgcagtggatacggactcccagcagccggccaagtcaaacaactcgaattcaatcagttcggaggacattccacggaagagtgcaaacatctcttgaacatcctcctcgggaagtataaatctggagaagtagaggcggcctaatatcccaagaatgggaaaaacaaacgcaagggcgacttcaaacagcctcaaggcgagccggcgaacgaagagcaacatgtggagcaccagctgaacctgaaggaagatcatacggaagaggtgagggttccggagaatgaacttcccggccccccgaaaaggtggaggggacaccaaccccaacgagctacggatcaccctcgtgggagaatttccatgactaaggtgaactatgtgacgataagattcagtt

SEQ ID NO: 166932 - DNA, 565 bp, Arabidopsis thaliana landsberg
gcacacgtggcgacacctcggcccggcactcgccagcgccggctacggggtcgcggcaccgtggctgcccgggtatcgcagcccggcccagggtccgatcagcgtgggaacctacgtgcagcacatcctcgccgaacgtgcggcgcaccgcggtgatcagcggactgtgctcatcgggcatgactggggggccaatgccggatacggcgcggtgtcatcccaacctgcagcgtttcggcgctatgcggcactggccgtgccgccgacggccgccctgggcgccggcctcctctcctacgaccaactcaagcgatccttctatgtctggttcatccagcaggtcgggctcgcggaatcagtactgttggaaccgggtttctgggagcgcttgtggtcggattggtcacccggttacgacgccggagaggacttgcagatgctgcgcaggcacgtcggacccgagaccatcgcgggcgtgctgtgcccgtaccgggcatccctcaatgcggcgttcaccgaccccggtgccgtgtccgaggctgcagcgacgctgaccgtaccggcg

SEQ ID NO: 166933 - DNA, 791 bp, Arabidopsis thaliana landsberg
atgttttcattaatactccatggtggaagaaggtcacgcgagttacatcaatggcggaatctgaatcttcttctccaaaactcctctgctttcactgaatcgttctcttccgttgttactactactaaagatctaagtcttgaagatgaacgaaagaggaaaactttcacagtctcttaccttattgattcattagggttaactacaaaactcgctgaatcaatctcaatgaaagctaacttcgatgaaaaaggtaatccagattcagtgcttaaactcttaagaagctatggattcaaagattctcaaatctcaagtattatttccacttacccacgatttctcattgagaatcctgagaaaactcttcgtgctaaacttcatttcttgaagcttaacggagcttcaagctctgagcttacagagattgtttcaaaagttcctaagatcttgggaaagagaggagggaaatggattagtcattactatgattatgtcaaagagattttgcaagatcaagattctagttcttcttcttccaagagaaagcagacgaatcgaaatcgaaatgtatcggttttgagaaaattaggagtaccacagagactgttattgaacttgttgatctctagagctaaaccagtttgtggtaaagaaagatttgaagaatcggttaagaagattgttgagatgggttttgatccgaaaagtccaaagtatgttaatgctttgtatgttttctatgagcttagtgataagactatagaggagaaagtgaatgcttatataag

SEQ ID NO: 166934 - DNA, 492 bp, Arabidopsis thaliana landsberg
acggataaagcgtcgttactagctgaagtgatccaacatgtgaaagagttgaagagagagacttcagtgatctcagagacaaatcttgtcccaacggaaagcgatgagttaacggtagctttcacggaggaggaagaaaccggagatggcagatttgtaattaaagcgtcgctttgctgtgaagacaggtcggatctcttgcctgacatgattaaaacattgaaagctatgcgtctcaaaacgctcaaggcggagattaccaccgttgggggacgagtcaagaacgttttgtttgttaccggagaagagagctccggtgaggaagtggaggaagagtactgtatagggacgattgaggaagctttgaaagcggtgatggagaagagcaatgtagaggaatcatcttcttctggaaatgctaagagacagagaatgagtagtcacaacactatcactatcgtcgaacaacaacaacaatataatcagaggtaa

SEQ ID NO: 166935 - DNA, 1626 bp, Arabidopsis thaliana landsberg
agtcaagacataaactaaatcacgcaatattccatcttctaaaccatccaaatcattttgttttgaatgtacaagcgtaaaaataagggcaaatgcatctaccatatctcgacagtttgattcagaatcaaatcaaaatctaaatacggcatttcgattattattttgcacttatgatactcaagcatattcctattctaaaccattcagaatcattatgtttctaaagaatttacgctctaaatctttgcaaataaatgtttaaagattcactcggctactataaatacgcttctcatatcatttcatttcatcatcactcacaccgcaaacgagagatcaaagcaattatacattttgagaaatggctgctacattcgcataccttaaagacgtgaggccttacaaaaacgcatggagagtccaggtcaagattcttcactcttggaagcagtacacaagcaacacctgtgaaaccattgagttggtcatctctgatgaatatgtaagaactactgttatctatgcaaaatttacgtttacatatacacaagtgctaatatagatttctgttgtctttgtcataagggaaaaaaatgcatgctactgtgaagaaggaattggtttctaagtttgttcacaagcttattgttggagaatgaatattcatagagacttttggtcttacctatgcgtctggccagtttcgtcccacaaaccatctttacaagatggggtttcaggctagaactgaggtgatgggttgtgagtctatctctgataccaactttctgtgtgtggctaagttttccaaaatctagagtggtgagcttaaccctcatatgttggttggtgagtggtttagtttctatataatatgattgatctttttccttctaagcgctatcaccaaaagaggaacttatgttttacgaataagcaggtgtgaaaactttatccaactcttttgatacatctcaagttcatgtcaatcctgacttccttgaagttgaagctttcggtcaatcgtaaatgcttatactctcaacacatgatacttttgtcctaacttcttaatgtgctattgacctataatttgacttatgcagactaccagctgatagtactatttgcattttccgtgcaagtcccacggtttgaaatggtggcggttaaaaagattgattacaatgagttttcaaggaataacattgcagatcagatcaactcaatgcaggtttgttttaaattttcactttgtttcttcaacacaataagactataactaatatcatatcaaattttatataggttggcaaagttagagttatttgcacaatctatgtaatagatacagattgggcttggtattacatcagctgtaagacatgtaataagaaggtcaatcatatacatgctggtgttaatggtgttaacaacaagaggaagaagcctagattctggtgtgacacatgaaagtctgttgtcacaaatgcggtctctaggtaaatatgattaaaaaaatatttatagagtaagctattacattcacctcagtcatgatttatgcaaaggttatggataacattggtgaagccaaattgctattgtttgattcaatttgct

SEQ ID NO: 166936 - DNA, 462 bp, Arabidopsis thaliana landsberg; identical to SEQ ID NO: 39749

SEQ ID NO: 166937 - DNA, 592 bp, Arabidopsis thaliana landsberg; identical to SEQ ID NO: 75523
  unsure (1)..(592): unsure at all n locations

SEQ ID NO: 166938 - DNA, 1601 bp, Arabidopsis thaliana landsberg
atggttccaatggaaactcaagaagttacagattctttaccaaaagcgcagagtaaatcgggtagtactcaactagatgggcctggaatggtgtcttcagcaaatatacctgaggttttgactgaagatatggtttgtgacacagtgatgccaccggtttcagtttccggagctgcttccttagagttacctttgaatgtagaggaagcgccgttgattagagaagaaagtaatagaacaagtcatgatgctgatgccattttggttcaagagttttcgagtcgttttccagaccatgcctctatattagatattcaaggttctgctagatcagatcaggttacttgctgcttcttgaaaacgactgttactctttgttggtttcagatcgtttattgtgcttacgaattagatttttcgtctacagagagctcaaggtacgggttgtccaccatcttcgtcagttcccgtccaaaatatcacaacagcagcggagcattggacttctacatcgactcctttaggtcaggatctgcccattgatagtgatcgctatgctttaattatagttggtgtgctagaatgttaagatttttgtatgttgtgatcgttgtgtagttaaccattcagaggatgtcgttgaaggtggtgttcagcctcctaacgtcttacatagcagattaacagtcaatgcatcagcggttacgtctcttcccaacaatcatatgggacagagtcctcggttacatttatcttcgttcagtgacatatgtgaccacgagctggagaagctgagcagagaacaagggaccttactgaaaagctttgaagagacggttagtctttttctaattcttggttaatctatctttattcggtttcctgtcctctctgctcattgtctcgttgtttgtaagcagacattagagttgaaggctgaactcgagaggaagatggcggaagcacgcagtgagtatgataggaaatcccaagaggtagatgctgcgtataacgctcaagcgaagaagaatgaagcgttaaggagtttggttgttatgaacagtctcttggcgaatgcttacaagtctacttgtccagtgaagagtgcatccactgatactgctaccgttagaggtaaagttggagagtataattggataaagcagatgacctaaacagcgacactaattctattacctttttttagcacccaggaactctcaacattcaacgcagcagcagcaagcagtgcagactaacaggcatatgaattcaactgctcctactggaccctcagtcacagcaactgaacctatgaattacggtgctcctcctcgacccttagtcacagcagctgaacctatgaattcaactgctcctcctcgaccctcagtcacagcagcggaagctacaccttcaaatcttacagctcctctgccggactgcaacactcctcaaccaagttcaatatctcagcacgcagcagtataatcaaacacacagatgccatcaaccgcccttgctagaccctctgttacagcagacgctcgttctttacatcaaccacacagcaacacgtgtaatccaagaccaataccaca

SEQ ID NO: 166939 - DNA, 2784 bp, Arabidopsis thaliana landsberg; identical to SEQ ID NO: 1016

SEQ ID NO: 166940 - DNA, 3650 bp, Arabidopsis thaliana landsberg
tcttgggcctagcccgtaggagtccaacaatgaaatttctttttgagatcaggaatcaaatccccctcgtagctggtcccgaccattgcattctgatttcaaccttccgtcttttcaaggagaccaagcaatatccaccgtcgacgacgttgtttctttttacaatgcttctgatcttcaggacgatccgatagaggaaagaactatttttcaaaaataggtccgagggagtgtataatttttaaattacatgctaacattttaaactgctaatgtttggtatatttccctaatatgtagtcaacgtattatttgtagggcgacagtaatatgggagatgacactaacacaggcgtgggcgggcaggttgggttttcattgctcgaatacccatttaataccgcttgttaggtggaaacgttgattaggttatatgatataaccatatagttattcgataatatgtgtaatagactgtcgaggcaaactatggttaagtcaactcgataactgttttgttaatgtttagctttaacattatttattgtttacgctaggttgttgggggagtcatatgttatggcgcaaaatatattgttaactgtcaatttatcttattctcgtctttgttgtagtctgacgcggagattgcagacaacaccgccacagtcgtggatgtccaggttagttctgttttggtaataaatatataagataactgttttgttagtgtttagctttaacattatttattgtttacgcttggttgttgggggagtcatatgttacagcgcaaaatatattgttaactgtcaatttatcttattcttgtctttgttgtagtctgacgcggagattgcagacaacaccgccacactcgtggatgtccaggttagttctgttttgataataaatatataagaccgatgtgctgggtaggctaatatgttatggtttaaatatattgttaactattataagtctccttacctgtgtaaaaataattgcttgtttgtgtcaatatattgttttgttagcttgataattgataagttattataataactgttttgttatcatatacctttatctttttttattttaaacttatcgtaataacttttttgtggagccataacccgataattgttttgttagggtgtatatttatcagttatttatgttttacttttcggtgctggggagacataatttgtagtttacccctcctaaattttaacagccgaattccaatttttcttattcacgtcttcgttgtaggccgacgcggagatcgcatacaacaccgccacagtcgtggacgcctaggtgagttatgttttttaaataatttttttaagcccgatctgctgcatatgcgaatatattatggcgcaaatatattgttaactggtaaaagtctccttatatgtgtacaaataactgttttgtgtgcgaccctatatttattttaaaaatttactgttaccattttgcaatattcgtatgcgttgtagggcgacgttgaaatgagagacgacactaccgcagtcggtggtgaccatgtctctcttttttatttaattaatcttttttaccgctgctcattttagtcctcaattgaaatttggatgtatatttgttatttggtaaataacttatccgataacattaataacaaaatatgaggcgataacatattggttatcagttgatagattactataacgtattcttcagattagggcgctaacatatatttttctcggcaattaaatttttatttaggatatgaaccgtccctccgcaactcgtgtgtcagaacacaccccagaagactcaaatgtccatccgttgtcgtatgtttcaattgaggttagttgttttatgttctaattggttaattatttgcctattaagccccacctcacaggtttttggcgctttgtttaacaattcaggaacttctcgttggtgttgaacgaactcctcaaagaggccaggtagaggtgagcatttttacccaactgttaatcttagttgttagttctatcgttatatgcaaaataataaactatctcaatggtacctctcagggtaacgacgatttccccttgcattcctcccaactacaatcatgtgccagcgaggaggttggttagcagtttattattttgttagcacacgattggaatatttatggtcattttcaaatttttctgtactcgttatttaaatgcgtgtgttttttatgcagcccctcgcagatgcgtctaaagtagcctcgagtcaagtaatttgtatctataactataaagccaaatgtatattaccctataagtatatttttgctacgataaacatatagttaacggtaattggttgttgggcatctagtcaccaatttaaatttcttacagattggtgatgtcgctgctagagagaccagtttgtcacctactcagcgggattctgatgaggtacattttcttgtcctctgctggatgtaaactacctacttcatgttaacatttttattttgtttttaatcatgttttaggactttacaacacccccaccttcaaacccgtctgctacaaaagcagccatcgggactgtactcgatgttgaggtgaacaaaggaaggaaaagttaaatacctaggactctgtctagcaaattagatgggcggttccgttttgacaagaaaaccaagctgcttgttggtcactcgtcccctttgctgagcgtcggtgaggttgttgccgatccagaagaacgttatcaacgttctctgtctaaaatcagagggaaaaggtaacagtattacattttaagcttgttatcaaataaatggtacattattttcaattgtacaaggtaagatgtgtggctgttactggtacgttattttttaaaatttcatggttttgcagtttcattagcattgttggtgaagtttccctatcagccaaaaagatctttgacattattgagaggaaaaaacagttcaccagcaaggtcatggacgctcttattaaatttagtaggcatcttttaaggactgacgatattgatggtgagaagctaagggtagatgtgcttggttccaagtttgtttcacaactgactaggctctttttaaagttttccaaaacatccccgcctgaggatttcattttccccgcagcacttgttgatctacttatgggggtaggtgagtctgaccgtgtccgattgtttgcagaggatgattgtatgtatatgccattcaatttcgacaaaaaacattgggtggcattgtgtgttgatcttaagacgcataagatcactattattgattcgaacattcaacttcgacgtgcctcagcgttgtatgcggaactacatccattggcagccatgctcccttacctcttcaaacaggccaactcgtctggtggtcctatcttgctgcaacctttccggctggatcgtccccatgacatccctcaggttcttccctgtttgattccgatgtgctttcaatttatctaattcatgctcatgctgccagaggggttaaggaatccctggaatttgatgttgccgctctggattaagaagtgaaaaaactcgtctcgactataatattgtccggtgttgcatcc

SEQ ID NO: 166941 - DNA, 1711 bp, Arabidopsis thaliana landsberg
atggaagcagcaagaatgggttttcgagctaaaactctccctcaccttggcaacggtactcgacttcctcttaagaccaaactctcgctctttcctatgcatttgcttcaaaaccacactactctttcccggagatcaacaaaactcaacttatgtgtcaagggttgtagtaagactagtggtgttgagagtagtcgtcccttgcctcacagtgctcccgatctttggggagatcacatcctctctgtccccaccgaaaactcggtaagtacctgatctgatgaatgtgtttcataatcagtcgttattgtagaacattattctgagcactgatattttgtaggaatttgatacactagagacagagattgaatcaataaagccgaaaatgagaaacatgctaatgtcgtctcacaagactgacaaagagagaatatgtctcatacacttgcttatttgccttggtactttccattactttgagaaggaaattgaagagattctagaacaggcttttcggaagttggacatgctatttacagacgaagatgatttggagacaactgccatcatgtttgaggttttcagattatatggacacaagatttcttgtggtaagacatgcagttcccattattaccatttttcaatgggatgcatattttataccattacatatgtatttagctatatacatatataacatatatatatcctggtgtcaatttagatgtgttcgatagattcaaaggtgttgatgccaagttcaaggaacatctagtcagtgatgttcggggaatgctacagctgtacgaagcagcgcatctcgcaacacccttcgaaactatattggacgaagccttgagtttcacaaggtatcacttggaatctttggccggccaacaagctacagctcctcatatctcaagacatatacttaacgcattgtataaacctcggtttcttaagatggaaataatagctgcccgggaatatattcatttctatcaaaaagaaggtcatgatgagacattgctcaagtttgcgaagctcaacttcaacttttgccagctacattacgttagagagctaaaaactctcaccaagtatgttggcctacttttattcatatttcccggtgaatttcttatatgtacatcctttagtactttaccaaaactcatgagattccgactaaaaacagagagataacaagtagatagatttatatatcttatacattaatttagatctcatcttactttaggcttgacctgtaggattgcccatctcgaattaaatccctcttttagattttttttttttttatcaggcaacatactcatgtcgggtcaattggaataacatctgttatcatataatttttagtgagctttcaattcaaaacctgtaggtaatatgttgattggtatgtgtcttttatattatattttaatataatcttagatgtaagattcttataatattttctatttaatgtttttgtggttgaagatggtggaaagacattgatcttccatataagctaccttacatcagagacaggcttctagagacctttatcggtgtcatggcggtgtatctcgagccacactattcacttgggagaattatagccactaaagtttcccaagtgatagtagttatggatgacacctgtgatgcatatggaactttctctaagtagaag

SEQ ID NO: 166942 - DNA, 2401 bp, Arabidopsis thaliana landsberg
  unsure (1)..(2401): unsure at all n locations
atggcgccccgcacgctctatgacgacggcggctctcatcccccttatggaagcaagaggacgttagcaaggactcgacagctccgacagctgtccttccgccaggctccagcgctcctccgacggccacgacaccacacaaaccaggtgccaaaacctctccggctgccacgatggcatgtacttagggcgctagtctcatccgttagacacgttagcactctgctacaccgcctcattgtacacctggatcctctccttacgcctataaaaggaaggtccagggctttcgtacgaggaggtggccgcacgggagaacgggcttgcggacagtctctctctctcactctccctcgcgaacgcttgtaacccctactgcaagcgcacccgacctgggcgcaggacaacatggaggccgcgggttcccctttgctgttttctccccccttcgtgctccgtctcgtgccgacccatctgggctggggcacgcggcgacaatttactcgtcggtccagggaccccccggggtcgaaacgccgacaacacgacaacgcaaaaacgatggaaagtgatgctttatagaagtactagtataatacttatgcgttgcaacatcatactgaaagagaaatagacttacaccttttcctaattgattttggtggttgaattgccaaacacaaataattggactaactagtttgctctagattataagttatataggtgccaaaggttcacactaagccaataaaaagaccaagaaaagggttcaaataaagagagcaagggataactgaaggctgccctggtctggcgcaccggactgtccggtgtgccaccggacagtgtccggtgcaccagggaactccaagctaaacttcgcaccttcgggaaaacgcagaggcgactccgctataattcaccggactgtccggtgtacaccggacagtgtccgtgctctaagaggacacggctctggaacttggcagcctcgggaattcgcaacggctgctccgctataattcaccggacatgtctggtgtacaccggactgtccggtgtaactccggagcaacggctacttcgcgccaacggtcacctgcaacagcaattaatgcgcgccagagcgcgcagaagtcaggcacgcgcgtagtggcgcaccggacactctacagtacatgtccggtgcgcaccggacatccaggcgggcccagaagacagagctccaacggtcggaacccaacggctttggtgacgtggctggcgcaccggacatgtccggtgtgcaccggactgtccggtgcaccatgcgacagacagcccccacaaaacggctagtttggtggttggggttataaatacccccaaccaccccaccattcaagtcatccaagttttcaaccttcccactacttacaagagctaggcattcaatacaagacacacccaagtgatcaaatcctctcccaattccacaaaggctttagtgattagcgagagtgatttgttgtgttcttttgagctcttgcgcttggattgctttctttctcatcctttcttgagatcaaactcacttgtaattgaggcaagagacaccaatcgtgtggtgatccttgtgggaactttgtgtatccaagtgattgagaagaaaaactcactcagtccgagggaccgtttgagagagggaaagggttgaaagagacctggtctttgtgaccacctcaacggggagtaggtttgcaagaaccgaacctcggtaaaacaaatccgcatgtcacactcttcattcgcttgcgatttgttttacgccctctctctcggactcgtttctatttctaacgctaacccggcttgtagttgtgattaattttgtaaattntagtttcgccctattcaccccctccctctctagggactttcaattggatcaaagcctgggcttcattagagcctaaccgctcaaagtgatgcgggagaacacgccaagaaggagatgtataccggcgacaagcctgctacaagccacgggaaggcttcatcggaagagtcccgcaacaaaaagaaagggaaggagaagaaagcctcctcccacaagtcgcatcggagtggcgataagaaaatgaaaatgaggaaggtggtctactacgagaccgacacttcatcaccttccacctctggctccgacgcgccctccataacttctaaggccatgagcgcaagaagtttagtaagattcccttacactatccttgtacttctagacatactctattactttccgttccattaggcaaaccaccaacctttgacggtgaagattatgctaggtggagtgatttaatgaaatttcatctaacctcactccacaaaagtatatggaatgttgttgagtttggag

SEQ ID NO: 166943 - DNA, 570 bp, Arabidopsis thaliana landsberg
  unsure (1)..(570): unsure at all n locations
gcgcattaaagtattgctgctgcatggagggcccggcggcacgcatgagttcttcgaatcttttgagagcttttttccgaaggagggattcgagttttatgaatacgatcagctcggctcctatttcagcgaccagcccaaagacagcagcctctggaccacggagcggtttgtggaagaggtggagcaggtaagaaaagcgctgggaatgaacaaagacaatttctacctgctcggccatagctggggaggtatcctggccacggaatatgcactgaaataccaggacaacctgaaaggccttatcatcagtaatatgatgagcagctgtcccgcgtatggtaagtatgccgaagaggnnnnnnnnnnnnnnnnnnnnnnnnnnnnnnnnnnnnnnnnnnnnnnnnnnnnnnnnnnnnnnnnnnnnnnnnatccgaagtatatggaattgctgataccgaacttttatgaaaaacatgtatgccgggtgctgccctggcccgaagcattgaatagggccattcagcatataaacagcgaaatatataccattatgcaaggcccttctga

SEQ ID NO: 166944 - DNA, 1806 bp, Arabidopsis thaliana landsberg
cttatcggtaacaatttatcgggtcggatccctgacgctctattcgggctgaagaatctcaccgagctttatctctttgcaaatgactaaaccggagaaatcccgaaatcaatttcggcgaagaactgggtacatcttgatctctccgctaacaatttaaacggttccattccggaatcaatcggaaatctaacgaatttagagcttttgtatctctttgtcaacgagttaaccggagaaatcccacgggctatcggaaaattaccggaactgaaggagctgaaactctttaccaacaagttaaccggagaaataccggcagagattgggtttatttcgaagctagagcggttcgaagtttcggagaatcagttaaccggaaagttaccggagaatttgtgtcacggaggtaaacttcaaagtgtgattgtgtactcgaacaatctcaccggagaaatcccagagtctctaggagattgtgagacactctcgtcggttctgttacagaacaatggcttctctggctcagttactatatcaaacaacctgatacgcgtgaatctttcgaacaacactttcaccggtttcaaaagattaacgaaatctaccgtgcaaccatctatgagtgacttgttaggctccaacaacaatttcactggaaagattccatctttcatatgtgagttgcactctctaatccttctcgatttatctaccaacaaattcaatggttcaatccctcgttgcatagcaaatctcagtactcttgaggttctaaatcttggaaagaatcatcttagtggaagtattccagagaatatatctacaagtgtaaagtcacttgacatcggtcataaccaactggcgggaaagcttccaagatctttggtccgtatctcttctcttgaagttctcaatgtggaaagcaacaaaatcaatgacacgtttcctttttggttggattctatgcaacaactacaagttcttgtccttcgctccaatgcattccatggatcgataaatcaaaacgggttttctaagttgcgaatcatcgacatatccggtaatcacttcaatggaactttgccattagatttttttgtcaattggactgcaatgttctcacttggaaaaattgaagatcagtacatgggcacaaactacatgcgtacaaactattacagtgattcaatagttgtgatgataaaaggcatagcattggagatggtacgtatcctaaatacctttactacaattgatttttctggaaacaaatttgaaggagagattccaaggtccgttggtctactaaaagagcttcatgtgctcaacttgtcaaacaatggtttcactggccacatcccatcatcaatgggaaacctgatagagctcgagtcactggatgtttctcaaaacaagctttcgggagaaattccaccagagctagggaaactctcataccttgcgtacatgaacttctcccaaaaccagtttgtaggtctagtaccagggggcactcagtttcaaacacagccttgctcttcttttgcggacaacccgagactctttggcctttcacttgaaagagtttgtgtagatatccacaagaaaacaccacaacaatccgaaatgccagagcctgaagaagatgaagaagaggtgatgaattggacagcagctgcaattggatccatacctggtatttccattggattgacgatgggatacatattggtttcttacaaaccagaatggttaatgaactctggccgaaacaaacgcagaattaaaccaatataaataaat

SEQ ID NO: 166945 - DNA, 248 bp, Arabidopsis thaliana landsberg
atggcatctcctaaatcctcaacaagaccaaaccaagaaaaccaagaacctcagttccaagatttcttcccaacaatggcaggaaaactcggtggagaaggtctgatcgaagagatttgcaaagggttcgagcttcttatggacaaagacaaaggagtcatcacattcgagagcttacgaagaaacgcatcgacggttcttggacttcgagatctaacggacgacgatgttcgatttatgatcaacga

SEQ ID NO: 166946 - DNA, 463 bp, Arabidopsis thaliana landsberg
atgcgcttcctcagctggctgctggtgcgcacgctgtaccggctggagctgcacgggatcgagaagcacgtgccgttcgagggcgcggcgctgctggtgtgcaaccacgtgagctacatggacgcgctggtgctgtcggccagcatcccacggccggcgcgcttcgtcatgtactaccggatgttcaacgtcccggtgatgcgctggatcttccgcaccgccaaggccatcccgatcgccggcgcgcgcgaggaccccgcgatcatgcagcgcgcgttcgacgcggtggacgcggcgctggccgagggcgagctggtctgcatcttcccgcagggcgcgctgaccagggacgggcagatggcgccgttcaagtccggggtggagaacatcccccagcgcgcgtccgaacgcgggcaagacgaaccggtggtaccgatggccctgcgcaacatgtgggcagcat

SEQ ID NO: 166947 - DNA, 1383 bp, Arabidopsis thaliana landsberg
tatgttcattgaaaggttatagatttttggataaaacagttgaaagtcgggaactttggataaaacttttatcttattaaaccaacctagcaatgtaactagcaagagctcaattgtttcttccatcaatgtaactagcaacagccaccagaggtgccgcattattcggatcaaaccctagaagttggtcttttttgagtgttgttgtacaggttttctcaagtctctacagagacattgacgacatgaacagactccacatcaacccgtctcatgagctaaactttgtgattgtctcacacagcttaacatcgcgtgtcatttttgatgaaatggttcaagtggactatggaatccatggaacactgagatcaagtttatggaattaggacaaggcggtgattacaacatggcgattcatcacacagtttgtatattttgtcatattattgttatgtattgtcatgaatctttgttaatacaaaacttcttgtatatcttttttgtttttcatgaatccctgtttttcaaaatgtgtttatcaagactctaataccaaacttcacttgtctcttttctatctttctattcaaaacttcaaaaaaccaaacaccaaattttatttcttaaggaccttaccattgaacaagataactgttaagaggccaatagaattgctaaactttcaaattgtcaaatttaaaattaaaaatattggtaagattccctcaaccactcataccattgaatatgttcttaggaatataatacccaaatgttagtataatgacaaaactaatccaataattatcacaaattttcacatttatttactgtacttgtactatatatatatatattactgtacttgtactatctatatatatatatatatatataatactccctctgaaaaaaattaagtgtagtttaaaggttttttatttttttcaatataagtgttgttttcacttttccatgcaaacattaaatgtatttaataatttttaatcaattatattttacatcatatttttttattggttggattagttgtaattaatgatgtttttataggaaataaataaattaaatgatatttatatgtttttttaatttgtgtacaaaaattttaaactataaatatttagaaaaacagatggagtgttaattataaaatacggcctaagtttagagacaagatttttataagttttaaagaagcaatcatcattgtgtgtagttggattcaaatgtcaactctcaactaatcagaagaagagtatatagcccgacttgtgtaacatttctctcccccacaaacgtgccaaaattaatatattccactctcaccaaattttgaaataattatttaatgtacat

SEQ ID NO: 166948 - DNA, 1039 bp, Arabidopsis thaliana landsberg
atgacgacacaaaatgtgataatcaaagatcagaatgatcagaaacagtgtagtaatgacgtcattttccgatctaaattgcctgatatttacatccctaaccacctcccactccacgactacatcttcgaaaacatctctgagttcgccgctaaaccatgtttgatcaacggtcccaccggcgaagtatacacctacgccgatgtccacgtaacatctcggaaactcgccgccggtcttcataacctcggcgtgaagcaacacgacgttgtaatgatcctcctcccgaactctcctgaagtagtcctcactttccttgccgcctccttcatcggcgcaatcaccacctccgcgaacccgttcttcactccggcggagatttctaaacaagccaaagcctccgcggcgaaactcatcgtcactcaatcccgttacgtcgataaaatcaagaacctccaaaacgacggcgttttgatcgtcaccaccgactccgacgccatccccgaaaactgcctccgtttctccgagttaactcagtccgaagaaccacgagtggactcaataccggagaagatttcgccagaagacgtcgtggcgcttcctttctcatccggcacgacgggtctccccaaaggagtgatgctaacacacaaaggtctagtcacgagcgtggcgcagcaagtcgacggcgagaatccgaatctttacttcaacagagacgacgtgatcctctgtgtcttgcctatgttccatatatacgctctcaactccatcatgctctgtagtctcagagttggtgccacgatcttgataatgcctaagttcgaaatcactctcttgttagagcagatacaaaggtgtaaagtcacggtggctatggtcgtgccaccgatcgttttagctatcgcgaagtcgccggagacggagaagtatgatctgagctcggttaggatggttaagtctggagcagctcctcttggtaaggagctagaagatgctattagtgctaagtttcctaacgccaagcttggtcaggttt

SEQ ID NO: 166949 - DNA, 639 bp, Arabidopsis thaliana landsberg; identical to SEQ ID NO: 13707
  unsure (1)..(639): unsure at all n locations

SEQ ID NO: 166950 - DNA, 439 bp, Arabidopsis thaliana landsberg; identical to SEQ ID NO: 42473

SEQ ID NO: 166951 - DNA, 599 bp, Arabidopsis thaliana landsberg
cgcgaagttctcgaagctgtcggccgagtggtgggatccgcgcggcaagatggcgccgctgcacaagatcaatccgctgcggctcgcgttcatccgcgacgccgcctgccgcaagttcgaccgcaacgcgcgcagcctgacctgccttgaaggcctgcgcgtgctcgatatcggctgcggcgcaggcttgttgtgcgaaccgttggcgcggctcggcgcgcaggtcatcggcgtcgatccgtcggaaagcaacatcgcggccgcgaagctgcacgccgataaatcacatgtcgcgatcgactatcgctgcaccactctggaagagatggaccaacgcgagcgcttcgacatcgtgctggcgatggaagtggtcgagcacgtcgtcgatgtcggtgcgttcctcgcccgctgcgccagcgtgctcaagcccggcggtctgatggtggtatcgacgctcaaccgcacctggaagagtttcgcgctggcgatcgtcggcgcggaatatgtgctgcgctggctgccgcgcggcacccatcagtgggaaaagttcgttaccccggaagaactcgcgcagcatctggagtacagccggatcggca

SEQ ID NO: 166952 - DNA, 1992 bp, Arabidopsis thaliana landsberg
  unsure (1)..(1992): unsure at all n locations
cttcgtgtaaatatggagcttcaagttttttgtttcttgtgtctatggcaatccgaacagcagcttaagatatcaagtttgggagaagctgattaggattggtattctaaggaaggattgttggtgtatggttggggattttaatgaaatactccacaatggtgaaaaacttggagggcctagaaagagtgaggcctcttttgttgattttgggaatatgctttcggcttgcggtatggttgagctgtctagcacgggaaatgggttcacttggagtggtagacgcatggacttatggattcaatgcaagttggaccgttgttttggcaataaagattggtttaagactttccccgcttctaaccaagcttttttggagaaaaaaggctctgatcatcggcctgtccttgtaagtcttgtgtcttctcaagatacttatcgaggttcctttagatttgataaaagaatgctgcacaaacctttggtaaaagaagcaattgtaactgcttggatggcctcttctactttttttggtcagacaattttccaaagattgaggagatgcaggaaagctctaagtaactggaaaagagaaaatgtgactaacgcacaaactaagatcaatagtattcagcaggagattgagttggagcatgctgctattttcccttcctttgctaagatggccattcttaaaagagatatggtgttagctcacagagnnnnnnnnnnnnnnnnnnnnnnnnnntctcgtcaaaaatggatgcattcgggagacaaaaacactaaatatttccacgcatcagtcgaagctgaaagaaacaaaaatggcttgcccccattggtggacgatgatggcacttctcactgttctgaggcatcaaaaggtgatgtggcagcaaggtacttccaaaagctcttctcctcttcctaccctgcgacgaatgatcttctgttcttccaggattttgtcccaagagtttctatcgagatgaataattccctttgtgcggaggttacaaatgaggaggtaaaggctgctgtgttttctataaagccttctagtgctcctgggagtgatggcatgacaggttttttcttccaacaatactgggacatagtgggtgatcaagttattgcagaagtccttcggtttttcaagcatggggagttccaatcagaatagaatctaactcaacaatgtcttattcctaaaaaagtcaatgcttctaagatggtggagttgagacccatcagtctttgtttagtcatgtacaagattatctccaagatcttggtatccagacgtaagccgctattaacggacattgtctctcccaaccaatctgcctttgtggaagagcgtctcatctccgacaacattttaatagctcatgaaattgtgcatggtttgagaactcataacgccatttccaaagatttcttagcgataaagacagacatgtccaaagcctttgatcgagtggaatggagctatcttaaggccttgttatctgctttgggttttagagattcttgggttgacttaatcatgacttgtgtcaccactgtctcttacaccatcttgattaatggtcaagcttttgggttagttaagccgcgaaggggtctgaggcaaggagacccaatttctccctttctttttgtgctgtgtactgaaggtttgactcacttgttgaataaagctgagcttgatggaaggataaatggtgtacagttttctcaacagggtccttctattcatcacctcctttttgctgatgatactttgtttgtctgcaaagctgaagtttctcaatgtgagaccattcaagagatcctgaatatctatggcaaagcaacagggcagatcatcaacaaagataagtcctcgatcacttttggggctaaggttgctgttgctgataaagagattattcagtctttgttgatgataaccaatgaggggggggcaggcacgtatttgggtct

SEQ ID NO: 166953 - DNA, 3159 bp, Arabidopsis thaliana landsberg; identical to SEQ ID NO: 18798

SEQ ID NO: 166954 - DNA, 2534 bp, Arabidopsis thaliana landsberg
taacaggtggatccaggtcagacccaagcgtcgaaaaactactccctctaaaccaagatcatattagtgatgtaagataatatagtatttgttggacctactgcgcagaccaatggttatgttttttttcaaccaaatccattctgcaggacgcatcggagagagttcttgcaacacattctggtttagatctgccaaaagaacacaactccgaagaactgcaaacgaatgccaatgaaacagatgttgatggcaaaatgcaggtattttcataaatacaaacacaacaaatcaaagccaaagcctttctttaaccatcgaaaatacatattctattttcctctttgtatatttaacacaacaaattcattctacaattactttcaggactcattggatagggagcctgcatcacattctgatatagatctgctaatagatcagagctctgaagaacagcaggcgaaggtatttctttaaaattatgtctgaactaattatggtctttaaaaaggatgtcaaccttatgtctgaaataaattttgctgcagcaagttaattatttatattggacagaagcttgtggatacattataatttgcagataatatttgctaatgtttttctcaccatatttttgtgtactacaacactcaagacaccatggaggcggctgcagcatcttattcattgttagggtttgcaaagctcgcaaaaaagaaggtcaaccttatgtctatacttaattaggctctcttgttcactttaaattggataggagtttgtggatacgctataatattttcttatgtttttctcaccatcttattggtacttctacattttggtcactttggagtcggttgcagatctcagtcattgtcacaaacgccaccagaagtcaacttcgatggtgaccctatgaaggtaaacagtaacaacaaggctgtgttattcgacatgattatttggttactaaataatttgtaggatattattcttataataggtctcctcattttatatttgcgaaagatagtctaatacattttcaaaatcaatctcattattgcaggctatggtaatatattcccatccaatttatgatacaaattccaaacctgacaaacaatcagaatcttctcccactccaacggatgtttcatcaaatatttgaaatcagtccatctctgcaaaaaatatgttgtttagatatcacattcaataattatttcatacagataactacttatcctttttgacatatcctatcaagatcaaattacttattctcgagacattggtggacatgatcttgatgataatcaggtatgctctaaacaagataatcacaacttctttaatactatgcactaatggtcctactttcaaaccttatgatggttttcttctttgcactaatattatattataatgtacaggaagaaggttatgttgctgtttcaaattcatctccagcgcgagaaagagagaaaccaattctgtccgaagcagaagtttttcttgtagcagagttgttatcaaaatcaaaatcgggctcatatgaacttttactttcaatgagtaaataagattttgcactatttcacaataccctctccgctgcaccgaatacgtatggttatacattcattttatttatgtccactacagttataatcttgttataagcttatgctgttttttctcctcgcagtgagcatctcacttcgtgtggattcttaatttcaaactcattccttctaacatttgccaagtctacaaactggatttcaactctagtataaaatcaataaattttttacaaatattacctttaaaatctttagtgtgaaagtctgatctcttattgtttgtttacctagcatatgaaggtgttggtgtccttgctttctcaaaagcttgcggcaacacttacaaaccaacgtgccgcttttgttcacccatggttcgcaaaccatctacaaggaaaattaaaaagcttcaaggctgccaaaatcaagtcacgcgtcaagtggtccgaacccatgaaacagttcatcatagggcccaacactgaatggttcacagacattgataccatttacttgcctatgatacgggattcgaaacactgggtaggacttgcaataaatctgggagtctggtccgttgaaattcttgatccaaatatagatctttatgaggaagatgaggttcgacgtttcattgaaccttttgttacaatcttgccatacctcatccaaaggtcctgtaagcccgaatgttctcagaatcatggtctttagcctttttattggaagcgattagatggcttatataagaatttgcgatctggtgactgtggcccagtggcaatgaagttccttgagattcaggcaagtgataatcccccagagaacatggcgaaaataacagataaacacgttgactcttttaggcgtaaagatgccatgaacatttatgaggagtttgtctgccccctctatgcatctacctttaataacaagtga

SEQ ID NO: 166955 - DNA, 1855 bp, Arabidopsis thaliana landsberg; identical to SEQ ID NO: 6392

SEQ ID NO: 166956 - DNA, 1487 bp, Arabidopsis thaliana landsberg
atggacatgaaagaagtgcctccacctcctccaccttctggattcaaacgatataagaaaaaaagaagcaaaaagatggacaacaaagaagtgcctccacctcctcctcctcctcctccacctgttctgcctcatatccgatcaagaaaaaagatggacatcaaagaagtgcatctacctcttccacgtcactatcctcctcctcctccgcctcttccgcctcctccgccttatggattcagacgacatcataaccaaagcggcaacgagcttgagaaacgaatagcacgtctaggctttccaactcttcgcccttttcaatccaaacgatatgataaccaaacccttccaaacccaagatgtcctctgtctaatccaacctacccccacacactcaatcctaagttcagcgtaaacactacaaatggttgttttacatgcggtgaaaacacatccccctggattgaccaccataatgtccatttcttctgcaagaggtgccatgtcgagttccactttggttgccacacgtaccctagtgagttaacacatccttatcacctccaacaccctcttattttcacatttcataactatcaaactggggtcatatcagacgccaggatagatgaatccttttgcactacagttttgtctggctccgatcctaagaagtctggctctatagataaatgttcatggtgtggaaaaaatatccaagggaattggttctatcgttgttctatatgcaaattttgtttggatctctcttgctcccaaactgatccacctctgctcgttgcaaacccaaagagtcatcaccattcactcgtattctatgctcgaccactcttgactccgtgtgatgcttgtgggtcggtcaatgtgttggatccaagttatgcttgctttcaatgtaactacatggtccatcaaagttgcatcgacttaccacgagtcataaagatcactcgtcaccagcatcgtctttttcatactccttacctccattccacgattccaccatgtcggatctgctacaaaccagttgacatcaagtacggtcagtattcttgcaaacacgaggatttctcttacgttgtccattccaaatgtgcaacacatgagaatgtatgggatgggaaagaactcgaagaggaaccagaaaaacccgacaacattgaagatatcgtcccatttgagaaggttagtaatgatatgatcaagcatttctctcatgaacatcatcttctgaagctagaaaagtatgaccgtgttcgagatgcagagaagcaatgccaagcatacatccttcctatcaactctcacgacttcttctataactgcatggaatgtgattttttcctccacgaggtatgtgctggtctacttagaaaactggatcatgcgttgcacgttcaccctcttgtaaaagacccttctcctcaacgacactataatcaaaatggttgtttgggttgttccag

SEQ ID NO: 166957 - DNA, 346 bp, Arabidopsis thaliana landsberg
aacttgtcaatgtggctatactgaccgggtcattttcatggagacttttgtgcgctggcaggatctggatcaacaaccgtgctctctggcccgtaccctggcgatcattggtgatcgctggacgctgctgatcctgcgcgactgttttctcggcgtgcgccgtttcgagcaattccagtcacgcctcggcatcacccgtcacgtgctcgccgaccggctcagcaaactggtcgagtcccgcgtgctgcacaagcagccgtaccagcgacgcccgctgcgcgaggagtaccggctgacggagaaggggatggatttgcacccggtgatcattcacctggtgcaatgg

SEQ ID NO: 166958 - DNA, 529 bp, Arabidopsis thaliana landsberg
gcatcgccggccgggcgtcagtcggggtcaagatggcccggctgttcaaggtcgagcctgagcactacaagaagatggaaggccgccagctgtcgctggagggcaaggcgaaccggctggcctccatggtccgcgaaaacctcgccggtgccatgcagggactgatcgtggtcccgctgttcgccgggtatgacgatgagtccggggtcggccgcatcttcagctacgacccgatcggcgggccgtacgaggagcaccggtaccactccatcggctctggttcggtgtacgcgaagagctccctgaagaagctttaccaggatgacctgcccgtgcaggacgccgtgctcgcctgcgtgcaggccctgtacgacgccgccgatgatgactcggcgaccggtggcccggacctgacccggcagatgttcccgatcgtcgcgacgatcacgccccacccgttccggcggctgccggatacggaaaacaaaaacgtcgcacgccacgtcgtggagggccggatgagcgctcc

SEQ ID NO: 166959 - DNA, 340 bp, Arabidopsis thaliana landsberg
atgaagctcttgttttaccttgttgtgttctttctccttttaaatggcttcacagccaacagagttgcaaattccctgattcgagattcttgcaagaaagctttaaaaatgtcggaaccacattactacaagttctgcattgcatctatcagcgaaaactcggagagtcaaaaagtaagaaatatcgatgaattgatcggagtaggagtgaaaaacgctatttcgaacatgacgaacgtgaaaggaattgtggagaggattctaaaggacagacagtatacgagttgagaagatgttgcgcgtttgcgttaagccctattcccagggcaaaaaccaccca

SEQ ID NO: 166960 - DNA, 2893 bp, Arabidopsis thaliana landsberg
tgttcgattaaaatccgacggtgtttattgattgttcctgagtgttcccgtaccgaaactcgttaaccgattcaccgttaagtgtggaatcagacagtgaagagatcaacagatatttatctctctacttctctcggtcgtattcgtcattctgccttttatctatttccatatcaacattttagggtttttactcctctaaggtttcgcttcttcttagattctctgtcttccgcttcagttggatcatcgattttctcaattgctctgaagttcagccggtgagtttcttccttttcacgattttggtgtttacttccatcgggcaattcgaagtcttcatttcaggacgagttcagatttgaatcgcttaaattagggttttgaatcatctatctactatcggatcgagattatctgatttagagtcataagagtcttcggagattagctttctgaagcaaatccgtcatacgagatgtttcgtttcctgcaggattagactgatccggagctcttcacgagattaagggaatctatttcacaatttcgtcgatatgacagagagaaacggtggtttccctggtgattattgttttgaggcacccggtggagattatgatgaaggatctgatagtccgagggtctcagagggttccaattgttcaaaaagaaagctcggtgaaaccttcggtgtctcgaaaatggtattacccttatctggcctatcatcatcagataggaaggagttgattcgtaggctaagacaagagctggaacaaatacgagttttccagaagaattttgagctttctagaccagtggctctcactagctcttctgctagtggtttgactcgagtcaagagttttggaatgtcgcgatgttccacgggtccaggaaagacagtgaaccctataagtgctgcttctaaaccgactcctgtcactactgcggttatgcttctgatgaagcaatgcgaggcgcttttgaaacgattgatgtcacatcagtatggttgggtgttcaatactccagtggatgttgtcaagctgaatatactggactattttaatgttattgagcatcctatggatttaggaactgtgaagaataagttaacttcggggacatattcctgtccgtcagagtttgctgctgatgttcggcttaccttcagcaatgcaatgacgtataatccacctggtaatgatgtttatgttatggctgatacacttcgtaagtttttcgaagtgaggtggaagaccctcgagaagaaattatccggaactaaagttcatactgaaccgagtaacttagatgcccataaggaaaaacatatcgtaatacctgtgcctatggctaagaagaggaagaccactgcagtagactgtgagaatgtcgtagatcctgctaaacgggttatgactgatgaggatagactcaagctgggcaaggatttggagtccttgactgagttcccggcacaattaataattttcttgagagatcacaactcaaatgaaggagggattggggatgatgagattgagattgacattaatgatctcagtgaccatgccttgtttcagttgcgggatctcttagacgagcatttgcgtgagatccaaaacaaaaaatcaagtgttgaaccctgtgagatagaggtatatcttcgtctatatctcatgtttgaatcatctaattgcatcatcactgctaatagggaaacttttatctattgcagcttctgcatggatcagtgccagggaattcatcaatgcaacattgtgatggttagtacacagcctgcttgttgttcgagaaagttttttgcttggctctttaatcagagtaacattttttactgtattcgttgtagggagtgaattggatgatgaggttgttgacattggtgaaaatgaacacccaacatccagcatttctcctgtcacgatagagaaggatctggtgttaggaaactctaatggtatcttttcttttgcttgtttatattgacattcttgttctccatagaacttttgttggggtatggttgttacatttgtcatttccaaactctcgtgacctcagattttctcagaagtggccttggagccatattgttgttgatatgcagtgaacgttgctagcgcacttattttataatttttaaattaggaggccttttacattcacttgtttactaactaaaactaaattgcctttcgtgttccctttattgattttatggtgattagactatcccctgggttgtactactgattgctcctcttttgatgcatataatctaggtaatagcttgggaagtgtgtccggtgatcctaaaatgtcaagtttaccgagggcatcaaaggtatatagtggtctggaataacatgcaaacatgaataactgagatttggtgcgacacaatgcatatgtcgatgtggatatctttgttaccttgtcataaagttgatataatttgatatggaggaactcttgaaccacaattttttactgttgcggaaccataacaatatgaaatggatgtcatagtttgtttgaatcctgatatatataaaattcaacttacttgatggttcccagatttgttaggataacctaattgtttcttcgtgctcctgtcctgcgctgatacaggggcttggaaccatcgatcttgaacctatgttggatggagctacaagcgcttccccaacaagaggatgtgagtggattttttgttagtggtcaaaagtttagtttttgggtgtggaacttatgttttgttgctttatacaagtagcatctgttggtggattggatcagctggaaagtgcatctccggagaaaataagttctgttgaggcggattgtcagcaagatg

SEQ ID NO: 166961 - DNA, 202 bp, Arabidopsis thaliana landsberg
acttcagatatggccagtaccaagcatgatgaaagtgtggtgtccgcaaccgacaccgcgcgccccaaacctccctccatgtacaaagtcattctgctgaatgactattacacaccgatggagttcgtggtggatgtgatccaacgcttttttggcaagatgtgcgaacaggcgacccaaatcatgctcaaagtacataccg

SEQ ID NO: 166962 - DNA, 230 bp, Arabidopsis thaliana landsberg
gtcaactcgcttacccaattcagaaagtacacaaagcccactacgtgttgatgaacatcgaagtgagccaggaagtgctggaagagctggagcacggcttcaaatttaacgatgctgtattacgtcacctgacgatttccaccaagacagcagtgactgcaccaagcccgatgatgaaagaggaaaaatccaaaaccatcgtaggtgatgcacctgcagccacaactgag

SEQ ID NO: 166963 - DNA, 985 bp, Arabidopsis thaliana landsberg
tggatttttattttgtctagaataaatataatattgcatcgagtagctcaccaaccaaaccagcggtggctgcgatgatgcttggagataaatatgcaataatcgattcaagttttgatggttttcaagatacgctttacgacgattacggcagacactactacaaacgatgtgttatctccggtggcatagatttcatttttggcggtgcccaatccatttttgaggtaaacctagatatatatattatcaaaatctactgttaacatttctcgtaagagtagtatatctaaagatatgttaatcaaaagtaaatttagttgaagaaactttataaaaagagtaaacatttttggtattgatcacgaaagcactaaggaaaaaataagatagtccttttattagtactttaccctatttcctataaagataaatttgttgataaactgagtaatggtgaatgtaacaaaaagggatgtacgttgaaactaagggttggaatctacccaccgaatgaagtgtatggaacgataacggcacaaggaagggactcgccgacggataagggagggttcgtgtttaaggactgcactgttatgggaagcggcaaggcgttactgggacgagcgtggaaatcttattcacgtgttatcttttaccgttctatgtttagcgacaatattttgccaattggttggatgcttgaaagcaaaaggccaagagtaaataatctctttaactttcattacattttcatatgatatatatttcagaaaaagtatatatgtttcttaataaaaagaaagcaaaacgatattattttaggggcatataacgtttgtggagtttggttgcactggagttggagcagacacgtcaaagagagtgccatggctcacgaaggcaagtgaaaaagacgtttcagtttacgaatcttacctttattgacgaagaaggttggctcagtaggcttcccatcaaattt

SEQ ID NO: 166964 - DNA, 383 bp, Arabidopsis thaliana landsberg
ggactggtctgatattcgcacttgacattttgagatttcccattgttgtctgttctatttgattccagtttccatattcggtgaacatcctgatggctggctatgacaaagaagccggcgcatctctatactacattgactacattgcaaccctccacaaggttgataagggagcatttggatacggctcatacttctctctctctacaatggacagacactaccgcagcgacatgtctgttgaagaagccattgaattggtggacaaatgcatactcgagatcaggtcaaggctggtcattgcaccaccaaactttgttatcaagattgctgacaaggacggagcccgtgagtacggatggcgtatcagcactgctgatgcc

SEQ ID NO: 166965 - DNA, 455 bp, Arabidopsis thaliana landsberg
acggcgacaatagatccatacaaattcattaccgatggagataaatgtgtgtttggcatagatgtcttcgttgctcaacgcaacaaatcagaagttttctcctatgatgaaaacataagcaaccctgttttcacttggagcctccccaatttctctaccctcactctcgactcttacacatccgacccgttttcttctggagacagaaactggtgactctctctcactctctacatgtatgggcacaaatacattttgttatatatctatgtgttagtaatttatatgatggttttaattagggttttgaaagtatatccaaatggagatggtgttggaaaggataattctttgtcactctacttgttgagtgagtctaatgaaaagaattacgttcgagccacactacgagttctaaaccaaatcggatccgacaatgtggagaagcccggtga

SEQ ID NO: 166966 - DNA, 2881 bp, Arabidopsis thaliana landsberg
cagcgaagagacaagaagacattgtgggacccgccgctgatgcccatttcctccatgcaactgaccagaagacgaagaaggtatcctcttcttctcttcaccactcgacctcaacgctccttatccacaccactcgacctcaccttatcacttcactcgatcccatcgcccctctctccacaaatactcgacctcgccacttctcttcctcaaacactccaccatctctcaaacactcgaccaaacacgaactcgctcacactccgtctccactcgacttcccctcaatcactcgactttagcgccatcatcttccgtccaaagcaccactcgactgcttctctctcgcctcttcaccaccgtctcacgctgccactcgacctcttcaccaattgaccaagcagccgtttctcctctccaaggaaaacactcgaccgccgcttctctcatctctccagtcagcttttgttcttcatttactcgaccactacacaaccttcccttcctcacaactccactagacttcaccgaatccactcaatcaaactccactcttcacgcgaccagcacctccgcttctccccctccgattcaatcactcgaatcaccgctcctctaacaacacttctcgctcacagtcactcgacttcttctcacatcatctcatcaccaatccacgactctactctcatcattcactactcgaccttgccgtccgactcactcgaccgcagctcctgcataaccttgtcgttttcacaactctatctccatcacttcactcggtcctccttaaccactcgaccaattacctacaaaacgaaaaaagaaaaatttcaaaaccgggttactccaccagtttactcaacctgtttttggtttgtggtttgtgttcctggttttgttggaactaacgtattaacgtttatttttgagttaaatttgttttcaggtttcgtaatgagtaactacagtggagaatcctctatggaccctgactacaatgtggatgaagctgagtcctggtccgctagaccgagagagcaacatgtttaccagagtttcagggatgaatttgaacgctctacagcccgacataatcagagaagagctgaaatcgccagaggaaagagggcgatgtcaagtaggtatgagccgattgatgaggatatcgagattgagtatgagccagagtcatggcgcagggagacgaagctgctgaacaaactcgacgaggttacagtggaggagtatatcagattcttcgagatgaatgacttctgggggacaaggtatccgtgttatgagactttagcccagctgggattactggaggacgtgcagcatttgttcgagaagtgtcatctggagacactcatgtcttacccttaccctgcctatatggaggagacaatcgagtttctttccaccctgcaagtggagatgtatgaagcactcacagagtttaagctggataccatgggattagggttcttgacgttctcagtggatgaacaactttatcagctgtcgatcaagaagttggaagaactgtttggtttcccaagtggaaatggaaccaaacccaagtttgaaaggaaagagcttaaggatttgtgggctactattgggaacaatgtaccactaaactctgcgcggtccaagagcaaccaaatcaagagtcctgtgattcgctactttcagcgttcaattaccaatgttttgtactccagagagtctacaggcaccgtgtctaacacggacatggagatgatagattccgcacttacaggaattctccgccgtacaaagggaaagaatgtcctgagaggcaatctcaatgacgcgccaccagtaatgcctctgttgatccacctgtgtggatacaggaagtgggcgttgacaaacggcaagaagaaggtgagaggagcactatgcgtgggtggcgttgtgacgccaattctggaagcttgttgagtactgctcaaggaaccagagttagcaccgagaatgatggacttggatcatttgcgccgatgtgagttcttggagtatgacatggttgacgacttccaccgctacaggttcgaggattcatcgattagaatcgccaatattcttctcccctgcattgacactaataggattctcgagggaaggaacattgacttcaagcctgcgcttgaagatctttctttcgagggcagtccgccaaccgaagagatcagtcacacagaaggagctataacggaagatgttgatgtgacagttgaaatagatgaggcggagtttgacacgagcctgtatcatttcagtgagcatatacctccagcgagggaaatcaagagtttgagcgacgtcacaagaacaacagtaagctgcagaagtggtgcaagaaactggataagttacacgccaagtgcctcagggctatcaagtttcttaaggacaagcttagctgctcctcttccactacagctatcccgcaggacagctccctcaggacatgccttcgaggagatatgacgcgcccgagccaagtcggcgcaggcctgagcctagagagcaggagatcccgcatgtccctgcgaggcattcatcattcgagcctcgtgaatctgggaggaagaggaggaccacactcactcgatctagcagtaggagcggacgacttctgcagtctcgtagtttacgcgaccgcggtgctggccgcaacagaaggagagaggtcgagtttcctcagagcggtgctggccgccacagagctgatgaggtcgagtacccatctgctggagctgatacagaacaaggaggttcgtctatggcctgggagcaatcgcaggcagccattgacgagcaactacgttcattcttcgactga

SEQ ID NO: 166967 - DNA, 531 bp, Arabidopsis thaliana landsberg
gccatgattgtcggcatcggtttttcgcggggcttggccaggttcttcggcaagcgtgacacctggggtggcgggctgttcatttccacgctgcgtctgctggcgtttctgttttattcgccgacagcgatatggctggtcatgctttcctatattatgcatggctttttttatggcatcacgacgccgttgctgtgggccatgatcgccgacgtggccgattattcggaatggaaaaaccatcggcgcgccaccgcgattgtcttttcggccatgctgtgcggcttgaaggccggcttgagcattggcggcgcactggtcgcgatgattctcgcggcctatggctacgatgccagcgcgccggtgcaggcgctcgacgtggtgcacggcatctacctgaccgtcagcctgtattgctcgattccgttcctgctcggcgttggattgttgttcttctacgagatcaacaagtcgatggaaactgcgatcgagcgcgaattgcatgcgcgtcggcgcacgagccggtcgatg

SEQ ID NO: 166968 - DNA, 2815 bp, Arabidopsis thaliana landsberg
atggtaatcaaagggtcgctaaggtctcttgaccatctgaggttgccatagctgatgatgcaccgtcctcttcaaagagagctcgaatcttgttggaggtgcgccctgcggctgacctggtcataattgactaggaggtcgctcctccaggagaagcgagggtggaactcatggcttctagcctggaagtttctgtgtcagtggacatgtgatcctcgggacaatcccaaggcggaggtcgaggatcaagaggtgggggtagatctgcttctcaagtcctgactcgctctcaagaggtgaggccgacttccaactcgggtggagggtccgcgggcagcgaacctttccactggtctgacactcatgatcgtgttcatccgatcattgaggatgaagctgggctggcgaatctgctctgccatatcaaagggcagaactaccaggtccctggtgtgaagaacatggcaaaggcgacctatgctgatatgatggtgaaggaggcccatgtaacaatcgattaccgtttcttgccaattctactttttgtgctagttataatatccgtttcgttttcgacaggcgattgttgcaacgaacaagctggttgctttttacgagcaacgtcttagcaaggtttctccggcgaatgagctcaaagaagggaagaccctcatccaggaactgaaggcgactgggaagtcaggtcaggagcgtgaggcttcgttccaggtatacttctgttttttttttttttttatggtggaatgattctaaccaagctacaatttcaggtggagatcgacaggttgaagatggagctgtctacctcgaagggtctcgagaaatgcttgttgatgtggaaattcgaccataggtatccagcgtccaaaagacgttcaaatgaatgtctgatctacgaatcccagagatttgtaaattctagcctaaaagattggatgtttagactgcttattgattttggcagattgttgcttaaagcctgctctgctatgtttcatcaacgagagttgagattaggaagtggtagagttatgagagtctctgtcacgagagtggattgaccttgttttgaatctatcgtctagggtatctgtctttcgcctgttagccacctgataaaccctagagttgtccttatcaatgaatccatccttaggacttctattcttcttagatttatttgtattcacccccttattgcacttttattcacttgttatctgtgcaacttgttgattgcattttagttctatttgtcacttgttggttctactcgatccaatgatcgagtagggttcttaaagttctgatttttgttgtttgaatcctgatttaggattgttactagaaatcccccatcactataacctgacttgacttagttgcttctgtatacatcttgattgctagcaataacagtggactagattgacaccccctatagctgcatcgacatgttagtgtttaaagggaattcaactgaacctcacttcagtacataagtaggcgtaaaaatctacttattaatttagcgccggtgcccattcattgttgcattgttacatttcagatatcacaaaaacttaagatcaagttcttttacattaatcaagttactaactcatcttttcgtctgcttgtttttgtggaataggtactaatctttgtgcatgcaaactcgtagaagtagcagttcacgctcaattgcttaataaggaaactgaagagtcattctctatctcttcaagtttttttacgatcgttgaagcttcttagcttcagatttcaggtcaaaacagagcatctaacacttgtattgatatgttatttgttgctacacataaacaatttaatgttttaattttgtttgattgatttgctagtcttgactagtttttgtattttcttattgataggatccgtttgattcctctgatgccgagtatttaagatcattagatgtggaatctcggagagtcattgagttggaacttgctagatatgaacaacaacaagctaatgatgaagcaggaggatctaaaaagttgaaaagaaaactgagagatgaaacaggaacacctaagacgcagaggaaaaaagtgtgtgaaccagaagcatttaaaacccaaagaagaagcaagggtgatgaagcatctaaaaaaccaaaaaaagtgtttaagattagtgatgaagacgaagatgatgatgatgaagaagatgacgatgaggacaatggagatgatgatgttgatgatgatgaggacaatggaaagtcatcgaaaccaaagaagagaaggcaatactcaaaattctggaacgatttcatagtgattaaaaaggttaatcatttgggaaaaagtgaagaaagagctatgtgcaagcattgcaaattggattatgcgtacaatgcacacaaaaatggtaaaaatacatatcgtcgttatttgcaaatatgtaagctcgtgcctagaaatggtgatgttagtaagatgatggtgaatgcagaagcgaacttgtaggctagagagatagaccagtctgctctccgggaattggtagctgtgaccattatccaacatgatcttccattttcttatgtggagtatgagagagttagagatacgtgcatgtatttaaaagcgaatgccaggttctttagtcgatacacagctgtagcagatgtctataagttctatgagtctgacacgggtaagctatgcagttagatcaactttctgcaaggattagtttaactacatatttgtggtctacgctcactcctgaaggttatatg

SEQ ID NO: 166969 - DNA, 319 bp, Arabidopsis thaliana landsberg
  unsure (1)..(319): unsure at all n locations
gcttacttctccacagcgacatctcttctcctcctcgtcctctctgtttcctctccttatgttcatggagcctccgactgcgacacccttgtgattaccctgttcccatgtttaccttttatatcgatcgggggtacggccgatacacccacagcttcatgctgctccagtctcaaaaatattctcgatacgaaaccgatatgtctatgcgaagggttgaagaaggcacctttnnnnnnnnnnnnnnnnnnnnntaaatctgctactcttcccgttgcttgtaaacttaatgctcctccggtgtcagcttgtgaatcat

SEQ ID NO: 166970 - DNA, 1097 bp, Arabidopsis thaliana landsberg; identical to SEQ ID NO: 6914

SEQ ID NO: 166971 - DNA, 734 bp, Arabidopsis thaliana landsberg
aaagggagagtgacaagagattcttccatctcttccttatttaaagaagaacttcggttgttactgtaagagccgtgaacaaaaccaacaaaatctttctaggacttctacttcttcatcgctcctcgaccttaacacgatccccggtgattcttctgacccacgtaacgaacttcaagggctttattcttcttcttcttcatcgtttcttggagattacaagatcactgctgattacaagatgaaaaacccacaaacccctccttcttcttcaactttacttgttgagtacaacaccgagatgacaaacccaccaaaccctaattctcatacaaacagcaagagaaagtgtagtgctaatggtagtgaatccagtccagagccgtctcttaatgcctttcaacaccctaattcgtaacgactttttgacgcctgttgagtcgagaatcctactagaagaagatgacacggagggagttggagcgactctagtggatccatgtgaggtaaagtggggtgtttttttgaagaaacggaagatgaagaaagattcagggaaagaaagcttgaattacgctattatctgcgggtggaacgatatcgttgaggctaacgtattggaaaaagacgatgacatcagtatttggtctttcaggcggggtataaatggaatcctttcctttgcccttgttcttcctcctcctcctgacatgccatagagtatctcttcccat

SEQ ID NO: 166972 - DNA, 301 bp, Arabidopsis thaliana landsberg
tttttttgtggcataggggcatttgtttaagtgggtcgaaaaagcagtgtttgaagaggttgaagatgctttgccaagattagcagtaattgcaaacgagattaacaaagccaaatcagaggcacttgagttaaaggctatgattcaggaaatattagaagaagcattgatcaataagatgcaaatccgaagaaattggtgaggcttgaaactgggttttgtgtggctttttgtcatcaccattgtgattatttacgtgttgtttggtcaggataatgagaagaaacttgtagcagggtac

SEQ ID NO: 166973 - DNA, 2837 bp, Arabidopsis thaliana landsberg
acaagaagacatggagggacccgccgctgacgcccatgtcttccatgcaagagaccaagagacatggaatctcttcactcccacttgatctccacgcaaccccatcttcactcgatttctcctccatcactcgaccttgttttctcctccataacccaataaactcgaccccatccttcttaaatcaacgttcccttttcttctttactcgacctcgtcatctccccctcaccacctctcactcatttcgttcactcgacttcgtcattccccaacatcaacaacgtcactcgactccttatcatcatcttcttcatcgcctcatcactctgccacagctctcttcacctctccatcatcaccgcttgccccctctctccaaaataacaactcgacctcgccattccgttcactcgacctccgtcaccaagccgccttcaccacttctacgacatcactcgaccaaggtgccatcgttctcccatctctcaaatccagccatcactcgacaacaccaccgtttcttctcttccgcgagctcaagttcactcgaccgctcctctcaaagtcactcgatttcgccgcttctcaacgcctccccatcgtttccatcgccgctgctctcaaccccacgaaagctcgtcatcgccggttcactcgattaagcaaccaaactcgacgtctttcaaaccgcttcaccatctctcgcctctcaaggtcacttgatcgccaagcacaaccaagggatcactcgaccgcgagttcaccaaaccgaaaaaaaaaagaagaaaaaaaaaatttaagaatttttggtacactcgactggtttactctgttggtttgtgtttttggttttgttggaactaacgtattaacgtttatttttgagttacatttgttttcatgtttcatcatgactaactacagtggagaatcctctatggaccctgattacaacgtggatgaagctgagtcctggtccgctagaccgagagagcaacatatttaccagagtttcagggatgagctcgaacgctctacagcccgacataatcagagaagagctgaaatcgccagaggaaagagggcgatgtcaagtagatatgagctgattgatgaggatatcgagactgagtatgagccagagtcatggcgcagggagacgaagctgctgaacaaacccgacgaggttacagtggaggagtatatcagattcttcgagatgaatgacttcttgggaacaaggtatctgtgttatgagacgttagcccagctggggttactggaggacgtgcaacatttgttcgagaagtgtcatctggagacactcatgtcttacccttaccctgcctataaggaggagacaatcgagtttctttccacgctgcaagtggagatgtatgaagcactcacagactttgagctggataccatgggattaggcttcttgacgttctcagtgaatgaacagcggtatcagctttcgatcaagaagttagaaggactgtttggtttccctagtggaaagggaaccaaacccagatttgacagagaggagcttaaggatttatgggccactatagggaacaatctaccgctaaactcggcgtggtccaagagcaaccaaatccgaagtcctgtgatccgctacttccagcgatcggtcgccaacgttttttactccagggagtctacaggcaccgtgtctaacacggacatggagatgatagattatgcgcttacagggattctccgccggacaaaggggaagaatgtcttgagaggtgatctcaacaacgcactaccagtaatgcctctgttgatgcatctgtgtggatacaggaagtgggcgttgacaaacgggaagaagaaggtgagaggagcactatgcgtgggtggcgttgtgacgccaattctggaagcttgtggagtcccgctcaaggaaccaggtttagcaccgaggatgatggacttggatcatttgcgcagatgtgagttcttggagtttgacatggctggcgactttcaccgctacaggttcgagcattcatcgattagaatcgccaacattcttctcccctgcattgacgctactaggattcttgagggcaggaacattgacttcaagcctgcgcttgaagatctttatttcgagggcagtccgccaaccgaggagtttagtcacaccgaaggagctacaacagaagatgttgatgagatggatgatatagatgaggcggagtttgacacgagcatgtatcatttcagtgagcatatacctcctacgagggaaagcaaaagtttgagcgaagctcacaggaacaacagcaagctacagaagtggtgcaagaaacaggacaagttactcgccaagtgcttaagggctatcaagtttctgaaggacaagctcagctgctcctcttccactacagctattccgcagggacatctccctcaggacatgccttcgaggagatatgacgcgcccgagccaagtcggcgcaggcctgagcctagagagtaggagattccgcatgtccctgcgaggcattcatcattcgagcctcgtgaaactgggaggaagaggaggaccacactcactcgatctagcagtaggagcggacgacttctgcagtctcgtagtttacgcgaccgcggtgctggccgtagcagaaggagagaggtcgagtttcctcagagcggtgctggccgccacagagctgatgaggtcgagtacccacctgctggagctgatacggaacaaggaggttcgtctatggcctgggagcaatcgcaggcagccattgacgagcaactatgttcattcttcgactgag

SEQ ID NO: 166974 - DNA, 902 bp, Arabidopsis thaliana landsberg
atgccgccgaaaaaagcttcagcgacaggggctggtactttacagccgttggatcccaatcaggacgtcctttctcttagagaagcccaaagccagaagaggaaggctgttagtccaacacctccggaggatgacctggatcaggagatccaaaacctggagatccttcagcaacaggtgcagccaagaaggagacgatggctcgtctagctgatcttcagagacagatagacgaagcttctgaagaggttcgtcatcttgttcaagatgaccagagccgaaggccccaacacagggagcttcgtcaagaaagcccaatcaatgacgatgaatggtatgatgactttcataatggtaactttgcttttgatgatgcttctcctctagcagtagagttgcaggctaacccgtggccaccatcttacaagccaccccagctccccatgtatgatgggcactcagatccgaagcagttcctgatgagctatgaagcaaccatatcctcatatggtgcaacaccgctgtcatggcaaaatccttcgtcatggcagtcagaagtgtgctcaagacatggtattcttctcttagtctaggaacaattacatcatggaagaaggtgaaggatatgttggtcactatcttttaggggtttcagatgaagctagtgaccgctcaagctttattccagtgcacacaggaccacaaggagtatttgcaggcatacgtccgaacatttctacttctcagagctcaggtgctaatggtgacaaatgagattatcatcgaagccatgatcaagggacttcgccatggccaacaacacaatatttcgcatgaaagcccccctaagccctggaaaagcttctctagaagatggatgagtacatcagggtcgataatga

SEQ ID NO: 166975 - DNA, 1899 bp, Arabidopsis thaliana landsberg
agtctaaaaacacaagcatggagtcacgaggtaagacaacttaaatgcttgttagttgttatgtggaacctgaatttcttaattttctgctaaatctggtgatataagtgatgccggtatcattagatgtgtttttgtattcgagtgatagttaaaacccttaaattctgaacttgtaaggacttgctggatgcactgaaccaactagaagaagggctaaaagacaagatcaagaaattgagttcctttgataaatataagcaagaggtgctccttggccatcttgtctggaacccaatgcacaaggagtccaatttctggcgtgagaatgtcacatgctttaaagagaaagacttgcaggtattcttgtttaattcctctctgctcaacacccacacatgtagtgcttttagagcgggctggttcaatccgttttggccttagacaacaaccctaaccacttgttaaacttgtggacgcagatactcagggtcctcctcacaatcctggacacctcaagtgatcccagatcatggtcggtggcatgctttgatatctcgcagttcatacaataccatgcagcggggagagtgattgtagcagacctcaaggcaaaagagcgagtgatgaagctgataaaccacgagaacgctgaggtgaccaagaacgctatcttgtgcattcagaggcttctcctgggtgccaagtacgctagcttcttgcaagcttgatgggactcttccctgtttctttcagtataatgaaatgcaaccaaaacacacagattgtgtttccttttttcccctgtccaaaacaaaccgtgctcccaactcctgcatatgcttcttttctttcgattctacacattccaagacacatctgttcattatttatcctggagaatctggctattgtatgcttcaataatttctgggtttgtgttttctgtatttatttattcaataaagagtaaaagagaccttgaagaagaatgctattgttgcagacagacacatttgggccagtttgttgtatgatgcgagagtttcagcttatatggagatgagattacttttgatttactctggttaccatgtctaattagattctctcgacaactggtaatataaatgggtcgtttcggtctaatctgaaatacaagcaaagaaacactcttgacaatgaacataaaaagccaaggcacaaaaatttcatctcataccaataagttagatgtatgaagtctcatacctaactcttaattaaactcaaatagcctatattagagtaagggttcattttggtatcacagacagactcaggtttttccaaaggatcatcttcgattctggtggcacgacaatcatcaaatttcagtatgaaaagctcaaaagaatatgtagcagctgtttccggtttactcataacaaggactattatccctatcgtcaatgtcctcacagcatagcaagagcaagggctgccttcagagatagtgttctcagatcaagtttgaattctcagtctcagatgactgagacttcgtttccagctccagtgacaccacctccaagagtagctcctcctccgctgaatcatgaagaattggcacgtgcaattccatacttcgccacagtgagagatgttcattacaggtatggtagagaggctaatattgcaagacaacaaaggtattccaactctagcaacactccaccaagagaggctgctgacttatccggtaatagcatagtctatgtagtgggccaattatcaagaaggcatgaagatggagaagttaaaagagagttaggggatccacgacttcagactcatcaacaaggtgctccaagaatgggagggattctgaaacctccaaagaaaagattgtcactctaa

SEQ ID NO: 166976 - DNA, 1311 bp, Arabidopsis thaliana landsberg
atgactggcgctgttgttgcagcagcggcgttgttgatgcttacttcttacagcttctttttccgtctctccgagaagaagaagaggaaggagaagttgactatgagaaacgggcttgttgatgccattggcaatactcctctgattcgtatcaatagtctctctgaggctactggatgtgaggtttttctcgatgttcttttgctattttctgtttggtctgacgaactgatagtgtgatttatgagttaaagatgtaatttttattctacttgtttcgtctggtgatcagattcttgggaaatgcgagtttttgaatccaggaggtagtgttaaagatagagttgctgtcaagatcattcaagaggtacactatgattagcattgtaaaggtttcaacttttaaaagttttttgatcatcataaacctctcttaacaatgtcagtgattgaatcatcagcttggctatttatattagtggtttttgaaatcgagaagcaagtccattatgttttttttgtttctctgtttaggctttggaatctggtaagctattccctggaggaattgtaactgagggtagtgcaggaagtactgccattagccttgctacagttgctccggcttatgggtgtaaatgtcatgttgttatacctgatgatgctgctattgaaaaggttatatcttttaaataccttgatgatgattcaaattcccttgtatgcattattgtacatacactcaaatttgtatcgtgttggacttattttagtctcaaataattgaagcccttggagcttctgttgagagagtgaggccagtgtcaataactcacaaggatcactatgtcaacattgcgaggcgacgggctgacgaagcaaacgagttagcatcaaagagaagactagggagcgaaacaaatggcatacaccaggagaaaactaatggttgcacggttgaggaagtgaaagagccttccttattctcagattcagttaccggtggcttctttgcagatcaatttgaaaacttggcaaattatagggctcattatgaaggtactggccctgaaatctggcaccagactcagggtaatattgacgcctttgttgctgctgcgggtacaggcgggactttagctggtgtttcaaggtttcttcaggtataattactcagggcttatactaatcaaagatgtaagaatgagtaattcgtggatgttataagcaaaagaaaaactcataaattctttgtgcatttatacaggataagaatgaaagagttaaatgttttctgattgatcctcctgg

SEQ ID NO: 166977 - DNA, 423 bp, Arabidopsis thaliana landsberg
gaaggacgcgctggccacgcgcaagaccgattactaccgccagcagatcgaacacttcggccccaagaatcttctgcccggtgcccgagaagcggtagccgcgacacgccgcgccggccttaaaacagcactggcctcggccagccgcaatgcgccgctgctgctggaacgactgggcatcgccgagctgttcgattacgtggtcgatgccgggaatattcggcacgccaagcccgatccggaaattttcctggccgccgcggccggcctgggactcgccccggccgattgcctcggcgtggaagacgccgccgccggcgtcgccagcatccatgccgcggggatggcggcggtaggcatcggcgacacccgcgcattgcaccaggccgatgtcgtcttgcccgccatcgccgccttccttag

SEQ ID NO: 166978 - DNA, 449 bp, Arabidopsis thaliana landsberg
aatcagacaatctctgttcatgttaaataccaagcatgtgttttagttcggcatctggcaagtaagatacccgcattcggtatggattgtctctcaagttcatcagctgatttagtgtggcatgagaacaatcgggctcggtcttcttttatgataatacaaaaggtctcatcggcgatggtacaatattggtccattaccataactaggacttcattgctctagggcctttagatcttagcaaatcccagatgttttgcacgctcttccaaataggatagcagctgtgttgaaatgactagtatctcgcatggaatcatatttaggtggtatttcatattctacgcgtccgcatgacaatggtttggtccccggccaccgcgccgaattgacggctggtagattatgaacctctataggcattccacccgttccattcggtggatcca

SEQ ID NO: 166979 - DNA, 378 bp, Arabidopsis thaliana landsberg; identical to SEQ ID NO: 731

SEQ ID NO: 166980 - DNA, 2702 bp, Arabidopsis thaliana landsberg
agacatgaagactactagggaccctccgctgacgcccatgtcttccatgcaagagaccaagagacatggaatctcttcactcccactcaatcaccacgcaaccccaccttcactcgatatcaccttcatcactcgaccttgttttctcctccataaccaaataaactcgaccccatctttcttaaatcaacgctccctttttcttcttctactcgacctcaccatctttcttccccacgcactcgaccgctcctcgccatcaccacctctcaatcgtctcaacttcgctcgatcggttcacgccatctctttcaagctcgtctctcatcaccaaacactcgactccttatcaccatcgttctctcatctctcaagtccagccatcactcgacaacaccaccgtttcatctcttccgcgagctcaagttcactcgaccgctcctctccttcctttcaaaaccactcgacttcgccattacacaccgcttctccatctcattatcactcgatctcttgaatcatcaccgcagctcgtctcaaacccactagttactcgaccgcggctccttcacagcttcatcgctctcaccgccatctctcaacaaactcgacctctttcaaaccgcttcaccatctctcgcctctcaaggtcactcgatcgccaagcacaaccaaggaatcactcgaccgcgagttcaccaaaccgaaaaaaaaacaagaaaaaaaaagaaaaaaaaaatttggtacactcgatcggtttactctgttggtttgtgtttttggttttgttgggactaacgtattaacgtgtatctttgagtttaattttgttttcaggttccgtaatgagtaacaccagcggagaatcctctatggaccctaattacaatgtggatgaagctgagtcctggtccgctagaccgagagagcaacatgtttaccagagcttcagggatgaatttgaacgctctacagcccgtcgtaatcagagaagagctgaaattgccagaggaaagagggcgatgtcaagtagatatgagctgattgatgaggatatcgagattgagtatgagccagagtcatggcgcagggagacgaagctgctgaacaaacccgacgaggttacagtggaggagtatatcagattcttcgagatgaatgacttctggggaacgaggtatccgtgttatgagactttagcccagctggggttactagaggacgtgcagcttctgttcgagaagtgtcatcttgagacactcatgtcttacccttaccctacctataaggaggagacaatcgagtttctttccacgctgcaagtggagatgtatgaggcactcacagactttgagctggataccatggggttaggcttcttgacgttttcagtggatgaacagcggtatcagctttcgatcaagaagttggaagaactgtttagtttccctagtggaaagggaaccaaacccagatttgacagagaggagcttaaggatttgtgggccactatagggaacaatctaccgctaaactcgacgcggtccaagagcaaccaaatccggagtcctgtgatccgctactttcagagatcggtcgccaacgtcttttactccagggagtctacaggcaccgtgtctaacacggacatggagatgatagattatgcgtttacagggattctgcgccggacgaaggggaagaatgtcttgagaggcgatctcaacaacgcaccaccagtaatgcctctgttgatctatctgtgtggagacagaaagtgggcgttgacgaacaggaagaagaaggtgagaggagcactatgcgtgggtggcgttgtgacgccaattctggaagcttgtggagtaccgctcaaggaaccagggttagcaccgaggatgatggacttggatcatttgcgcagatgtgagttcttggagtttgacatggctggcgactttcaccgctacaggttcgagcattcatcgattaaaatcgccaacattcttctcccctgcattgacgctactaggattctcgggggtaggaacattgacttcaagcctgcgcttgaagaactttatttcgagggtagtccaccaactgaggagatcagtcataccgaaggagctacaacagaagatattgatgagacggatgatatagatgaggcggagtttgacacgagcatgtatcatttcagtgagcatatacctcctgcgaggaaaagcaggagtttgagctaatctcacaggaacaacagcaagctgcagaagtggtgcatgaaacaggacaagttactcgccaagtgcctcaaggctatcaagtttatgaagaacaagctcagctgctcctcttccactacagctattccgcagggacatctctctcaggaaatgccttcgaagagatatgacgcgcctgagcctagagagctggagattccgcatgtccctgcgaggcattcatcattcgagcctcgtgaatctgggtggaagaggaggaccacactcactcgatctaacagtaggagcgaacgacttctgcagtctcatagtttacgcgaccgtggtgctggccgcagcagaaggagagaggtcgagtttcctcagagcggtgctggccgccagagagctgatgaggtcgagtacccacctgctggagctgatacagaacaaggtggttcgtctatggcctgggagcaa

SEQ ID NO: 166981 - DNA, 665 bp, Arabidopsis thaliana landsberg; identical to SEQ ID NO: 54976
  unsure (1)..(665): unsure at all n locations

SEQ ID NO: 166982 - DNA, 489 bp, Arabidopsis thaliana landsberg
cggttttcacggcgctgggcctgattaccggtgcgctttgggggcggcccatgtggggcgcctattgggtatgggatgcccgcctgaccagctttctgctgctgctgtttctgtatctgggttacatggcgctgtggggcgcgatcgaggatgaaaccaaggcagggcgggcggcggccgtgctggcgctggtaggcgcggtcaatattcccatcattaaattttcggtagattggtggaatacgctgcatcagggcgaaagcatcatcagcggcaaattggcgcccgtctttttgtggccgcttttggtcatgatgttggcttacatgcttatattcgtcgcgctgtggctggtgcgtatccgcaccgccatcatcgagcggcgggcgcgcaatctgatgcaacaggccgcgtaatgatgcacgatcttttccaccttggcccctatcacgatttcatctggccggcctatgccgtgtcggcgctggc

SEQ ID NO: 166983 - DNA, 266 bp, Arabidopsis thaliana landsberg
  unsure (1)..(266): unsure at all n locations
nnnnnnnnnnnnnnnnnnnnnnnnnnntgcgtggataactcgtgtgctaaagaggtgatgtgcattcaatccctgagaggtaagaaaggagcaagacttggcgatatcattgttggttcagtgaaagaagctaacccaattgttcaaaaaaaagtaaagaaagacgctgtcccaaaaggtaaagtgaagaaagggatggtcgtgtacggagtggttgtgcgtgctgcgatgcctaaaggacgtgctgatggaagccaagtcaagtt

SEQ ID NO: 166984 - DNA, 593 bp, Arabidopsis thaliana landsberg
atgaatgatttattctctagttcgttcaagaagtacacggacctgaagcaacaggcccaaatggatgatattgagtcaggtaaagagacgatgaacctcgataagttctttgaggatgtcgaaaatgtcaaagatgacatgaaaggcgtagagactctttacaagagtcttcaggattctaacgaagagtgcaaaactgtacacaatgccaagaaggtgaaggaactccgagcaaagatggatggagatgtcgctcaggtcctcaagagagtcaagatgatcaaacaaaagcttgaggcgcttgaaaaagcaaatgctaatagccgtaatgtctctggttgtggccctggctcttccaccgataggaccaggacgtctgttgttagtggactcgggaaaaagcttaaggacttgatggatagttttcaaggtctgcgtgcgcggatgaatgctgagtataaagaaaccgtagaacgcaggtgaatacaaactttctcaattttccctgcctcttgcaggacacattagtgcagagcattcctcgccatactaaagcaggtatgagttgattagcgtatcaaatgtggcatctg

SEQ ID NO: 166985 - DNA, 834 bp, Arabidopsis thaliana landsberg
ggtccttctaatggctcttatgagttcgtgatatacatcagtgtttcattgttttttccgtttttaaatgtaaccggaaacggattttaagttctgatggtacgttttttttttttttttgcttcttttaaccaaatgttgtaaaagcatcttagaaatgataagggataacacgtctcgctatcttaataaatcttgtgtcttcggcttatagatgttaaattagaaataaaaataatattaagaaactaagtttctaaatgattagaaaactaagtttctaaatgattagaaaactaaaactgagtcgaacaaccaatctgcccatgggggaaaggggttttggttctcggaagcaacaccaaaattttccttcatcacttggcttgcaatgcatgatagactaacaaggggtgcaagaatgagaacgtggaacacacaagtggatattacctgcaaattttgtgctgaaccgatagagacaagaattcacctattctttcagtgctcttattcaacacaagtgtgggagaatctcacgataggcctacttcaaggccattacacttcttcttgggaccgcactgtttcgctcctcacatgttcctctcttgggaggaaacctcttatgctgctgagatatacacttcagatcatggtacacaccatatagagagaaaggaataatcgccgacacggagaggagaaccctatcacacctttgaccattggaaaaaacatcgacaaaaacatttgcaatcgaatcactcttcttcagaaacaagaagcccaaaatatgatgatttgtttgtattttggctttccactaggttt

SEQ ID NO: 166986 - DNA, 1047 bp, Arabidopsis thaliana landsberg
cgttcgagaagtactccctcgaaattgaatgaaattcttgtggaggagaactcttacaatctcacggctatacctctggtcaaagtcaaaagcaaagagaaacaaaaaatcatagaaaaacgttcttatgctgggaagccacttttctcccctgctgcatccaagtacctcatcaacccgccttctcatgacaaggaggttgttactatacctattctggtagatggagcttattcagcggtttctcaaggcttggatcacaacttccccattccacttggctggggtgctatgtcaaacaagaaaaggaagaatcacaagaaaatgtggcataaccggcaagttctgcggttccgggagtctttgttccaatacgagctcatccctcttgcggagcatctcttcattgaaagctaagctttcgacccctctacaagtttttcaatgaaggttttttgttggaaaactgaccatcatgctccgtcaaacactttctcagcagttaagacttggagagctatctatcctcctggagttttggcataaatcagttggtttcaaggtaatatcccgaagcatgctttcatatcttgggtcattgtgtggaacaggcaacacaccatggaaaggttaaagagttggggactcatgatttctcctacatgcatgttgtgtaatgtgcacgatgaaactagggaccatatgttcttcacttgtgattacagcaagagcatctggactcacttcacctccaaggctaatcttagtccgttgagtcaatacatggcttgcctcctttggacacatagcgccaccccaaacaagcagttcactcttatcttcaagctcattcaccaagccattatctatcttttatagcgtgagaggaatcaacggcttcattccgacgctcaccgcagtgctccatctatcataaaaaaaatcaagcaactcatcaaagcctcccttgaccctctttctagggtgcaactttgtttacctccaaatttatctctcatggcaacatggttcttcttcttcgaaggt

SEQ ID NO: 166987 - DNA, 1244 bp, Arabidopsis thaliana landsberg
aaaaaacggagattactttgttgtttggtttcatcatagcacttttgcatatcacaagaaaggaggggacaataatagctggaaagtgtttcaaccttcaaagcatcaaggatgcatcaacatggtgtttaaagaaggcaaactttacgtgcttaatccagctcgaaatatttctgtgtttgatttctccggtggtcattctccagtggaatatgcaactcccccatctccgaatgatgattactatgtcaggaatcttgctgtgacattgtctggagaagttttgatcatttcaagcaatccaaagaaatgcttcgtcaaactctacaagatagatcctaaatcatcagaatggagattaatcaagtctataggagacgaagcattgattttggacctaggaatcacggttgcagccaaagatggagttatgagaaattgcatatattttagtcatcatgagttacttagatataaaggggttagtctatgcaatgatgataagtacgggatttgcatctaccatattaaaaccaagaagaaggtccaagagtttgaacatcttactacttcatcgccaatactatttaaggatgctcgttggttttttcccacttttggtggaaactagttgctctaaacctataccaagttttgtcttttggtaagggttgattattttctcttttttttttctagatatctaaaagtagcatttgacatttgaataaaaagacaccatcactttgcttctaataaagctggaaattgcttcaaacttttgtgggaagaaaaagtctttataaatgggcagtagcattttaattggtttttggattttgtttttaacaacatgtgtatggtaatctgttttagacttttagcttttattttataactggagtttccaatattttacttataaaaaaatatatatatattttacttataagatgatttttttagatttattttattgtttataatgatataatttcttaaaacacatattgttttatgaacaactgataaaatatttcttataaaaaagaaagtatatatatatgtacaaatgcttatggattttgtatttgttatttccaaaagaaaaaaagaacagattctttaatgaaaaaactcaaatattagttttctttctttctttctcaatggataataatgttggtcttttaaaacaaaaatgataatattattttaaaaaccacaacaaactcatagcgtca

SEQ ID NO: 166988 - DNA, 345 bp, Arabidopsis thaliana landsberg
cctgcgtgaaggagctattcaacaataagaaaaagcccggacacacttgataacgaagaaacggaagcggataaatatcgcgtgaatggatactctgaaatcgaacgagaaaaattgaatttaattaaatcaacttataaaaatatgaaaccattaaaaaattaccacaatgaaaccattctttttgcgcaacaccgaacaattcctcaagtccgcgaacgggtttccccacccgctttccccggcgctatcggccccctacctccttgtctgcgtcatgcgtttcctttcccgtctattcccgcccatcttgggctgtttggctcgatgcccgacatccctggc

SEQ ID NO: 166989 - DNA, 353 bp, Arabidopsis thaliana landsberg
atattggcgggaaaatatgattttacggttttgacggaaaaatacgattctacggttttggcgggaaaattatgagtttacgtttttggcgagaaaatcacggatttacgtttttggcgggaaaatcacgggtttacgtttttggcggaaaattacgagtttacgtttttggcaggaaaattacggatttgcgtttttggcgggaaaattacgagtttacgtttttggcgggaaaattatggatttacgtttttggcgggaaaatcacgggtttatcttttttagtggaaaaattacgagtttactttttatcaatgtcatcgcttgtatatttaagaaatttggaaaaatat

SEQ ID NO: 166990 - DNA, 325 bp, Arabidopsis thaliana landsberg
tctattgatagatgaagtacacagtatcactgaatcagaatgggaatcacttgtgatccaatcggaactcccagtaatggttatgttcacagcccggtggtgcggaccgtgtcgtgacatgatccccatactgaacaaaatggactcggaatacaagaatgagttcaaattctacacagtaaactttgacacagagataaggctcacagaacgttttgacataagttatctcccgaccactctcgtctttaaaggcggtgaacaaatggctaaagtcaaaggagctgacccaaagaagttaagggaactcgtcaagaagtacata

SEQ ID NO: 166991 - DNA, 614 bp, Arabidopsis thaliana landsberg
atatgtagtttgaatatagtcactcccatagttttaaactagagtttagtttttagtattttaatcttgatataaacttatattttcataattattctttataatgtcacagcaatttatttgtaaaaataaaaaaatggtcctccgtaggtttaagcatggcgttgggtgagacacgtggtggaatcggaggaggagagtcgatgagtgatcttacggctgaacagttattcaagatcaacgagcttcatctaaaaacggtggaggcagagaacaagctgactaaggtatccgcgagcttacaagaagacacggcggatacgcctatcgccgttgcagcgttttacaaagaagtaatcggacaagctgacgtggtggtcgagcgtgcgcttgataagcatgaggaggacatgggtggtttattggttgaagcagataagctgaggatgaccacgttgaccaaaattgttgacattttatcggcggttcaagctgcggattttcttcttgccgggaaaaaacttcatttggcgatgcatgagtggggaaaatcaagagaacatcgacggcttgaagctagtggtggtgattccggtggaaatgttaccagagag

SEQ ID NO: 166992 - DNA, 2285 bp, Arabidopsis thaliana landsberg
gcttgcttcaccttcttagagtccctgattccctcagggatggagacagaagggaacatatttagaagcttcaagatccgtaaggggcttactttcggggtttgaaaagtggcgtcccgagctccgtgaacgcttcttgcttcatgcttatcattcatccaaggttagatacatctcgacctctgttctttaacggttttatcttcataacaataatgccttttaaacgcctacccatacactcgctgttattttttaaggccaatgaaatcatcaacgatatgatcgaatattatgagggccttcttcaagacaaggaaatcgagctggacaataggaacaagaaattctcttctcttgacaaggaccaccaaaccttatctgactctttgaagaagaaccaagaaaagatcaaacacgtcgatctcgttgaagccgagctagcaagggtaaacgaggagtttcatacctactataggatcgtcaacgacttgcaaagagattggttagatgctagggatgaaacttctcactttgaggaagaggctcgaacttccacaaacaacctggaggaactgaatttgaagtaccggtcatcggtcaagttcatggagcatgatttggcaaaatctgccacaaaagctaggaagggagttaagggtcgttgtagcaccccgtatgtggaagtagaaagctgggaagctaagggcaagataaaactttcgtgcaagctaagttccatggaagggtaagggaaagaagaagtccatggaagaagaaaaacttagctggaggacagagacgagaaggaaggtgattatttcacattcgcttcaaacccgtcaatgaagcccaccaagttaaacacaaaagtgaaactcacggaccgcgtttccaaagatccatcgagctcctttcgattcacagtcgtatcttgagaaaggtaatcggatgtcatggcctttgtgcgaaccaaggatgctcggtctagaccgaatcgagaaaacttgatccaggagagtggtttcaaaagcattgagaaccaagaagaaattagaatagaaaggaaatattcggaataggaggaatgattcaatcgtttaaaggatcgagtcgagttttcccgattaagcttctaaggaaaagaacttaagaatcagaagagtttctaatgaaaggaactttagtaatctttagaagaaaggcaaagcaaagttatctaagtgttgggaaagctaaggaagagtgagtgcgagttatatagagtggtgaagggttgagccatgcaaaggagccgaacgaaggaaacttggtgaccaagtcggctcgcttggagccaaaggcgagaagaattggtgccctagttccttggtcggacgccatacaaggaatgcgccatatgtcgttgccatgcccaagggcgttcagtcgtggtatggatttattcaagaaggccatcaagttccttcaatttaacaaaactcggactaagttggagtcagacatcaaggaggctaaaagcaatctgattcttgtgagccaaacccacgaggaggacttttctgaagattaagagattgtcgagctagacaagaatttaggcttctggaaagaccagctcgcctcccttcctatctcgaactttgaccctcaacactttgcacattcttcaccgcgtctcctgtttcgtgaaagacatcgctacggaggtttatctagcgcatgttcaagcaggcgggggggctggagaagttatgcgggtggagagactggttgcatgggctctgccaccggggaattggctgaaactaaatacggatggcacttctcatgggaacccgggtcgggctacagtgggaggagtgcttcgagacagcgaggggcgatgggttcatggttttgccctgaatattgggttctgttcggcaccactagctgagctttggggagtatactacggtctgtatctagcgtgggagcggaaggttccgagactagagttagagatcgattcagcattagtggtggattttctcaagacggggataagtgagacacatcccttgtcgttcctagtacgtttgtgctacggcttattatcaaaggactggttagtccgaatttcacatgtgtatagggaggctaatcagctcgcggatggattggcgaactatgcattttcgttacctccggggtttcatgggcttggtgcttgtccggagagtgttttagcggtgtttggtgatgatgtcaatggggttgggacttcacgaaatgttttgttg

SEQ ID NO: 166993 - DNA, 576 bp, Arabidopsis thaliana landsberg; identical to SEQ ID NO: 1
  unsure (1)..(576): unsure at all n locations

SEQ ID NO: 166994 - DNA, 360 bp, Arabidopsis thaliana landsberg
atgaagccatcctttgttcttctatctattgcactattactctcatcatcactatcggatgcagccgactttggatcaccgtcacagccaccgtcgatggctccaacaccgcaaccatcaaactccaccgactgttccagcgtcatatacagcatggttgattgtctctccttcttaaccgtcggatcaacggatccaagcccgaccaaaacatgttgtgttggggtcaaaaccgttcttaactatagccctaagtgtctttgctctgcgttagagagtagtcgtgaaatgggattcgtacttgatgatacaaaagctcttgccatgcctaaaatttgcaacgtccctattgatcctaat

SEQ ID NO: 166995 - DNA, 2344 bp, Arabidopsis thaliana landsberg
tactttaaaagttgcaggcctgccaggaacttgggttcaatggatcatgaaatgtgtggaaggtccctctatgagattgctatggaatggtgagaagacggatgcctttaaaccgttgcgtgggctgcgacagggagacccactgtcgccgtatctttttgtgttgtgtatagaacggttgtgtcatctgattaaaagttctattgcagaaaaaaaatggaaaccgataaagatatctcagtccgctccaagattatcacatatatgttttgctgatgacctaatccttttcgctgaagcttctgttgaccaaatccgggtgcttagaggagttttagagaaattctgcggcgcttcgggtcaaaaagtcagtttagagaagtaaaaaatttacttctctaaaaatatttcgcgggatttggggaagcggatcagcgaggagagcggtatgaaagcaacgaaggacttgggcaagtatttaggggtgccaattctgcagaaacggattaacaaagagacatttggggaagttattgaaagagtttcgtcgagattaccaggctggaaaggtcgtatgttgagcttcgcagggcggctcacactcaccaaggcagttttgacgtcaatcccagtgcacaccatgagtactattaaactgccacagtcgacgttagatggtttggacaaggtgtctcgagcctttctttggggaagtactctggaaaagaagaaacaacatttagttgcctggactcgtgtgtgcttactaaggagggatggtggtttaggcattcgttcagccacagcgatgaataaggcgttgatagctaaagtaggttggagagttttaaatgatggttcaagtctttgggcacaagtcgtgaggagtaagtacaaagtaggagatgttcatgatcgaaattggactgtagcaaagagtaactggtcctcaacctggagaagtgtacgagtgggtttacgggacgttatttggcggggacagcactgggtaattggagatgggagacagatcaggttctggacggataggtggttgtctgaaacgcctattgctgatgactctattgtacctctttccccggctcagatgttgtgtacggcccgagacttatggagagatgggacaggctgggacatgtcacaaatagcaccttttgtgactgaaaataagcgtcttgatctattggctgtgatagtagatagtgtcacaggtgcacatgatcgtttagcttggggaatgacttcaaatgggcgtttcacagtcaaatcagcagttgcattgttgactaatgatgattctccgaggcaggatatgagtagtttatatgggcgtgtgtggaaagtccaggcaccggaacgggtacgggtttttctttggttgatagtgaaccaagcaattatgacgaactccgagcgtaagagaaggcatttgtgtaattctgatgtttgtcaagtttgtcgaggaggcatagaatcaatcctacatgttcttagggattgtcccgctatgtcgggcatatgggatcgtattgtaccaaggagattgcagcagtcgttcttcactatgtccttattggagtgactctactcgaatctaaggcaaggtcttatggcagagggtagtgactggtcgacgatgtttgctatggcggtttggtggggttggaaatggcggtgtagcaatatttttggggagaataaaacatgccgtgatcgggtgcgcttcataaaagacctagctgcggaggtgtcgatagcttactcgcgggtagtcgagctcaggtcgtcggggttaagagtgaacaaaccgatacgttggacacctcctatggagggatggtacaagatcaatacagatggagcttcacgtgggaacccgggtttagcttcagccggaagagtgttgaggaacagtgcgggtgcatggtgtggaggctttgcggttaacattgggcggtgttcggcaccgctagcagaactgtggggtgtgtattatgggttgtatatagcttgggctaaacaacttacacacttggagctggaagtggattcggaggtggtggtaggtttcctcaagacagggataggtgagactcatcccttgtctttcttggtacgtttgtgccatgactttttatcaaaggactggacagtccgtatatctcacgtatattggaaagctaatagtcttgcagacggtttagctaaccatgcgttttctttgtcgttgggtcttcatgtttttgatgagatcccgatttctcttgatatgcttttgaacgaggataatgacgggtctgcgcgcctaaaacgagttcgtttg

SEQ ID NO: 166996 - DNA, 2787 bp, Arabidopsis thaliana landsberg
agacaagaagacatcgagggacccgccgctgacgcccatgttttccatgcaagagaccaagagacatggaatctcttcactcccactcgatctccacgcaaccccatcttcactcgatttctcctccatcactcgaccttgttttctcctccataacccaataaactcaaccccatccttcttaaatcaacgctcccttttcttctttactcgacctcgtcatctcctcctcaccacctctcattcatttcgttcactcgacttcgtcatttcccaacatcaacaacgtcactcgactccttatcatcatcttcttcatcgcctcatcacactcggccacatctctcttcacctttccatcatcaccgcttgccccctctctttttttaacaactcgacctcgccattccgttcactcgacctccgtcaccaagccgtcttcaccacttctacctcaccactgggccaaggtgccatcgttctcccatctctcaagtgcatcggccactcgacttgcccaagctcacttgattcaacgctaatcctcgtcgttttcaccacttaagctccacggcttcactcggctgtcaataaccactcgatcacaagcccgctttcgtttcacagttcactcgaccgctcctctattttcacggtcaaacagtagctgctctcctcctcttcaagctcaccaatcaaccacaacctcactctaaccacaaaactagcttcactcgataagcaaaatcactcgatcaaccgaaaaaaaaaaataaaaaaaatttcaaaaccgacggtttactctattacatcactcgaccggttcacttgattggtttgtgtttttggtttgctgttactagcgtattaacgtttatttttgagttttgtccgttttcaggtttcatcatgagtaactacagcggagaatcctctatggaccctgattacaatgtagatgaagctgagtcctgatccgctagactgagagagcaacatgtttaccagagcttcagggatgaattcgaacgctctgcagcccgacgtaatcagagaagagctgaaatcaccagaggaaagagggcgatgtcaagtagatatgagctgattgatgaggatatcgagactgagtatgagccagagtcatggtgcagggagacgaagctgctgaacaaacccgacgaggttacagtggaggagtatatcaggttctttaagatgaatgatttctggggaacgcggtatccgtgctatgagactttagcccagctggggttactggaggacgtgcagcatctgttcgagaagtgtcatctggagacactcatgtcttacccttaccctgcctataaggaggagacaatcgagtttctttccacgctgcaagtggagatgtatgagggactcacagactttgagctggataccatgggattaggtttcttgacgttctcagtggatgaacagcggtatcagctttcgatcaagaagttggaaaaactgtttggtttccctagtggaaagggaaccaaacccaaatttgacagagaagagcttaaggatttgtgggccactatagggaacaatctaccgctaaactcggcgcggtccaagaacaaccaaattcggagtcctgtgatccgctactttcagcgatcggttgccaacgtcttttactctagggagtctacaggcaccgtgtctaacacggacatggagatgatagattatgcgcttatagggattctccggcggacgaaggggaagaatgtcttgagaggcgatctcaataacgcaccacctgtaatgcctctgttgatccatctgtgtggatacaggaagtgggcgttgacgaacgggaagaagaaggtgagaggagcactatgcgtgggtggcattgtgacgccaattctcgaagcttgtggagtaccgctcaaggaaccagggttagcatcgaggatgatggacttggatcatttgcgcagatgtgagttcttggagtttgacatggctggcgactttcaccgctataggttcgagcattcatcgattagaatcgccaacattcttctcccctgcattgatgctactaggattctcgagggcaggaacattgacttcaagcctacgcttgaagatctttatttcgagggcagtccgccaactgaggagatcagtcacaccgaaggagctacaacagaagatgttgatgagacagacgatatagatgaggcggagtttgacacgagtatgtatcatttcagtgagcacatacttccagagagggaaagcaagagtttgagcgaagctcacaggaacaacaacaagctgcagaagtggtgcaagaaacaggataagttactcgctaagtgcctcagggctatcaggtttctgaaggacaagatcagctgctcctctcccactacagctattccgcagggacatctccctcaggacatgccctcgaggagatatgacgcgcctgagccaagtcggcgcaggcctgagcctagagaggaggagattccgcatgtcccaccgaggcattcatcattcgagcctcgtgaatgtgggaggaagaggaggaccagactcattcgatctagcagcaggagtaaacgacttcagcagtctcgtagtttacgcgaccgcggtgctggccgcagtagaagaagagaggtcgagtatcctcagagcggtgctggctgccacagagctgatgagatcgagtacccacctgctggagctgatacggaacaaggcggttcgtctatggcctgggagcaa

SEQ ID NO: 166997 - DNA, 844 bp, Arabidopsis thaliana landsberg
  unsure (1)..(844): unsure at all n locations
ggtttgtatatgctaattggtttatgtacttgtaggtttggtcacgacaatggtaagctgacccggaagatcacaaaggtcttcacaaacaagtttaatgggccattttacagttggagctgtgtacctactgaaagaagacacatatacttcctcgaattcgcaataaattaacttctatctcttattaatctcttacatttggtttggtttggttgtttgatcactaacatcaaactctcctcttgttttgtagagtacacacacatggcatccatcactgctggtgtagttgaagaaaaattctttaaaatatgtcaaacgcgtatgaaggacatggtttctaaggcttgcgcaaaacgtgccaatgagcgaccgccatggattgagaagacattgtggaaggaaatgtgtgcgtattgggacacaaaagaagccattgccaagagttcaaccacatcagcagcttgaatgtctgactgtaatggtcttggtcctcacaaacatgtatcggggccaaagtctttcttacagattgagcaagagatagtaagttacatttgtttatttatagaatgatttttatttaagagtctgaattgttttgtgaacaacatttcaggaaattgagttgggaagaccacctactattggtgagatattcgttaagactcataccaaaaaagatgggacttttgttgataggaaggcgcatgaaattcatgaggcatatttgaggaacaaggaagctaagttggctgcccgtgagaatgatgaannnnnnnnnnnnnnnnnnnnnnnnnnagaactatctcaagaggaggatgatgaggtcttccttcag

SEQ ID NO: 166998 - DNA, 329 bp, Arabidopsis thaliana landsberg
aaagctaatcctaaagtttttttattatttgagcgtggacagcagagtgtggtcggattgtgatggagctctttgcagacacgacaccgtgagcggcggagaacttccgggccctatgtacacagggagaaagggatggggaagcttggtaagccactccactacaagggatcaatcttccaccgtcttgaacctaatcaaatgttctgtggaggagatttcactgctggtgatggaagcggaggcgaatgtttgcctttggttttgagtttgggtgtttccatcgattttttaaataatttagctaccattcaatgatgaaatagaaa

SEQ ID NO: 166999 - DNA, 399 bp, Arabidopsis thaliana landsberg; identical to SEQ ID NO: 73076

SEQ ID NO: 167000 - DNA, 2762 bp, Arabidopsis thaliana landsberg
cggagaagaggtgagatagcttatgggaaacgtgctgtggtagaagaagaagaggttcaagcggatgaacctatgtatgaggagccggttgaagaagaacaagttgtcgaggaggagatgatggaagaagaggatgttccaatcctgaaagctgtctctaagaaggggaagaagactccatctaccaagaagttcatctagtacctcaaggcactaagcttcgaaagaactaagcatcctcatgacgagactatggaggctttgggtatccgagaagatgtggagttcctatttgatatgtgcggcttatcaagatacatgacctacactttcgagagctaccaagactacacatgcgagcttctagcaaccttggaggttcacttcttttcgactcaaagagaagaaaaagcgggtaggggcttcggttacgccactttcgctgtgggaggacgagactactctctcaccatcaaggagctagacaacctctacggtttcccatccaaggacggtcttgaaccaaattttgacaagctcgaacttacgcagttcgggaacacaatagcggcaccgggcgagtttaactcatcacggtgcaagagctcatcgattcgcagcccggtgctaaggtatttccaccaatgcatagctcacactttttacgcaaagaaggtgacgggtcctatcaacgatagcgagcttcaaatgatggatgaagctctcaagttggttctaaggaataccaagaacgggagagttatggaagtggatcgggctggcacatctcttacggtgttatttttggattacttgatgggattaaaggactatgcggctcaactacacaaagatgaaacgcaaggggtcaatcgggattggaggtatgattacacttatgctagtagctgcgggcattgatctacgaggactggacaaatcaccggaatggattgacattgcctatttgaagaagaagaacattttagacaagacaaccccctccggtgtgcatatctacttgttcaaccacctcgatgagggaagctctaggctgctcctaccttgcaccaactacaccaccattaggcacggtgagaacattgacttctaccctcctattcatgctctctacgatgctcctgagaatataccaccacctcgctatgagcctccacacctgatagtaggatttttgtcaattaatcctaaaacactatcctgtcgttgtagtattttaggtgtcaatccaaatgggtgtgatgcagacagatgagatatgatcagaagttgctaagtcaagccagacagaatttggttggttttctaacagtcctagtgttgatgcataaaacagtaaaaagtcaaaaaaatgactgatatactcgatcgcagggtcgactgccagaagggaccttgtgatcgactataacaggatgacagagagtgaaaatgcagaaatggaccagtttactttatcacgcagtctcactgttagtagactggtgtgatcgagtagaatggttgaaaacataaaaatactaaaattcaatagcaagtgaatgaagcaggtaagtaaacagagaaatcaattggatgagaagttcctaaggatggggtaatcgaatagtgtggtctccctaatcaatttagttggttaacaaatctcaattaagctatccctagacaagaggttcaacaacagattaattcactctcgtgatagaaatccttaagcatagctagacactgacctaattcccattagcgatctctaactaagaaggcaataagaaccgactgttaaagccaataactgctctaaacggccaatcccttgggatagagacgattatccctggaattagtagatccaacgttccattaaacgccttctgggcgctggaacgtctgggatcggattccagttgatcagaaaggaataagcagtaaacacaactaatccagaagggattcaataaatctacacttaaccaacagattcgaccaggggttccacaactactctatcccatcctcagaaatcctaatcactactaagacaacatgcttaaagacaataacatagaaacgaaagatgaacaagcaaatgaaagcaaaatttgaataacttagaagaaaaatcgaaatacaaagttgcaagaatgaaaaacggctgctgaataatagtgcgaaattcgtgtctctgaaagtgcatgtctcagggcgaaacccttagccacttatttatactaagatatgaaagcgggcttcaagcccacttaacggcccatggacgatgtgatcaagagtgttggctcaaagtgggcttcctgatgggtttcgaatgggcttcgaatgggccttctgttctcttctcttctctttccgttgctcacgttatctggttcagtgcggattgatcaaagggtcgaggtggtggtcgagtaggttggttgaaagaatggtctaggctgcttcttggcctctgtgatcgagtatgttggtcagctgtcaggatggactggttcttctcctctacgatcgagtatactggtggactgccaaagtggactgcctggttgcctctacgatcgagtataattgtcaggatggactccttcatctttgtgattgagtagaactgcagaatggactgcctcatctcctctacgatcgagtatatctggcagaatggactgcctagtctcctctgcgatcgagtagaagtgtctggatggactgctgagctgagtgcttct

SEQ ID NO: 167001 - DNA, 565 bp, Arabidopsis thaliana landsberg; identical to SEQ ID NO: 2653

SEQ ID NO: 167002 - DNA, 468 bp, Arabidopsis thaliana landsberg
aagggaagaaaaacaaaggggaagcaaaagatcgagatgaagaaggtggagaactatggagataggatgattacgttctcaaaacgtaaaaccggaatttttaagaaaatgaacgagctcgtagcaatgtgtgacgttgaagtggctttcttgattttctctcaacccaagaagccctatacattcgcacatccgtctatgaaggaagtggctgaccggttaaagaacccttcgagacaagaaccattagagagagacgataccagacccctcgtcgaagcttataagaaacgaaggctccacgacctcgtaaaaaaaatggaggcgctcgaagaggagcttgcgatggatctagagaagttgaaactgttgaaggaatcgagaaatgaaaagaagttagaaaaaatgtaatggaactttccttcggaaggtttgagcgcgaaggagcagcagcaaaggtaccaagct

SEQ ID NO: 167003 - DNA, 2083 bp, Arabidopsis thaliana landsberg
  unsure (1)..(2083): unsure at all n locations
cggggacttcaaatcaatcatttatggtttgctgaaaaaattttaataatttgtaaagctacaaagaatgaatgtgaagagcttatccattgttttatgagagtatggacatatctcaggacaagtgattaacttggaaaagtcagctatcacctttggagccaaaattgacgatgatacaaaaagaatggattaaaaacagatcaggaatccaattggaaggtggttatggaaagtatttggggctaccggaatgcttaaggggttcgaagaaggttttatttgagttcttaaaggaaaaattacaagacagactcactggttggtacgctaaaactttatcctagggtggtaaagaggttctgttgaagtctattgcgatggctctccctgtgtatgcaatgacctgctttaagctacctaaatctctatgcacaaagttaactggtgctatgattgacttttggtggaatacaatgcaaaatacgaagaagattcattggattggggctcaaaaattaatattgcccaagtctctaggaggttttggttttaaagaccttcagtgctttaatcaagctttattggccaaacaagcatggagaatctttaagaatgaagatagtcttatgtccaagatctttaaaagcaggtatttcctcaatactgatttccttaatgcctctaaaggaacacgtccttcgtatgcttggcagagtattttgtatggtcgtgatttattgcagaagggattgaaaaagattattggcaatggcaaacaaaccagtgtttgggttgataagtggctttttgatggtcagaatagaagaccttcgagcattcactctttgatggatattagcatgaaagtgagtcacctcattgaccccatttcaggaaactggaatctgaatcttatgagtcagttatttccatggtcggatattctgattatgctgaaacaaagaccgatggtaaatcaaaatgattcttattgctggtctggcaataataatggcatttacacggttaaatcaggatatgatgtgattagtcgacaagctcatccagagatttttcaagaagctgcagcgaacccttcattaaaccctcttttttgcagtatatggagtctccatactgtgtctaaaattaaggttttcttgtggaaagtcctaaaaggagctgtggcagtggaagacagactaagaactcgtggtatcaaggcagtggatcgatgcttaatgtgtaatgaggagaatgaaacaattaaccacattttgttccaatgtccattggcaagacaagtttgggcgatgtctcttctgcaatcnnnnnnnnnnnnnnnnnnnnnnnnnatctttactaatatggatcatgttttgaactattgtcagaagttgagtagttctagtaatgtgagttatgctagtccttggataatctgggtcttatggaaacatagaaataagattctatttgagggagttaattttgtgactcaaagcattgtagacaaagcttatgtggattgtaatcaatggtgttcagcttaacaaggtgtttgtatcaagaactcaaagtcaaagttgaaatggagtcctcttccatagaatgagcttaaatgcaatataggagtggcctggtctaatcgttttcaagtttctggtgcctcttgggtagtgagagatgctatgggaaagatgttacttcatagtaggagatcttattctcatgttcattctatgttggatgcaaagattagaagttgggaatgggctcttacaagcatagcacaacatcattttgacagagtcacctttggagcctcaacacatgatattattaaagctctctacaaaccagaggaatggccagcattattaggccatacaactcagcttttgaacttatcgcaaaagaaaagtggctggtttatggctttggaaccaaaattgtgtaatacaggagcttatgagattgctaagagtgttattactgggcacagatggcagtcttatgtttcacggggttttccctattggctaggagatcctttgcttcagaaatgactcagccagga

SEQ ID NO: 167004 - DNA, 470 bp, Arabidopsis thaliana landsberg
  unsure (1)..(470): unsure at all n locations
gcctaaccgctaattctggcaacccggtggtgagttcaccaagcatcgatcttgctcttgtttacgccaatttcttgaatccaaagcctgacgaatctatactacaagaaaattgcgacttagccactacggattttttggtagataatcctaccggcacttccatggacccttcatggagtatgnnnnnnnnnnnnnnnnnnnnnnnncattatattaatccggtggaacacattgtggaggaatgtggttataatggcttgcctccatttcctggtgaagagcttctctctttagacactaatggtgtttggtctgatgctttgttgattggtcataaccatgtagacgttggcgtgactccggttcaggctgtacacgaaccggtggttcatttcgctgacgaatccaatgattccaccaatctcttgtttggaagttggagcccttttgatttcactgccgatgga

SEQ ID NO: 167005 - DNA, 1240 bp, Arabidopsis thaliana landsberg
tccactatcatcgaactggacaccaaaccatgtaacacagcagatcaaaggtaagtcttcacatcttctggtgaaaatcttcatagccgttggtcccggaactgggctggcgactttcgttgttgttctcatgttgtggatgcgtcagatgaagaggaagaataggaaggaagaaagggtcgtcatgttcaagaaactactgaatatgtacacttatgcagaactaaagaaaattacaaagtcattttcttacataattgggaaaggaggatttggaactgtttatggaggaaaccttagtaatggtcgtaaggttgcagtaaaggttttgaaagatttgaagggaagtgctgaagatttcatcaatgaagttgcaagcatgagccaaacatctcatgtgaacattgtttctcttcttggtttctgcttcgaagggtctaagagagccattgtgtatgagtttttggagaatgggtctctcgatcagttcatgtctaaaaataagtcattgacacaggatgtaacaacactatatggaatcgcgctaggcatcgctcggggattggagtatttgcattatggctgcaaaacaagaattgtgcatttcgacattaaacctcagaatattctgttagatggcaatctttgtcctaaagtctcagactttggccttgctaagctttgtgagaaaagagaaagtgtattgtcattgatggacacaagaggaactataggttacattgcaccagaggtcttctcaagaatgtatggcagagtctcacataagtctgatgtgtatagctttggaatgcttgtcatcgacatgattggagcaaggagcaaagaaatagtagaaactgttgattccgccgctagttcaacttactttccagattggatttataaggatcttgaggatggagaacaaacatggatatttggtgatgaaataaccaaagaagaaaaagagattgctaagaagatgattgtggtaggactctggtgtatccaaccatgcccatcagatcgtccatcgatgaatagagtcgttgaaatgatggaaggaagtttagatgctcttgaaattcctccaaaaccttctatgcatatctccactgaggttattaccgaatcttcttcactctctgatggcggggaagatgtataaaaagaattgttcataattattagcatgaagatcctattcttgtttgttttgttgatcggatagaaagaagtg

SEQ ID NO: 167006 - DNA, 404 bp, Arabidopsis thaliana landsberg
  unsure (1)..(404): unsure at all n locations
aaaaggaccgtcaagcacaagttctactcgaatagtaagcttgcctgccacaagggacaaggcaagctagatgatctgagaccttttacagcagcacaacgtcgactatgatgaaaccttcaatagttcaacccgatggtcaaacctgtcatcattcatgtcgtcctcagcactgtcgcctctcgtgtttggcccatccatcaactggacgtcaagaatgtgtgccttcatggccacctcgttgacccctctgctcctnnnnnnnnnnnnnnnnnnnnnnnnnnnnnnnnnnnntgaagcaggncctcggctgtggtacgacgctttccacatacatacacaccttgggtttgcatttcggcctcgacacatcctatttgtttgcaagatagagatgtgttgct

SEQ ID NO: 167007 - DNA, 485 bp, Arabidopsis thaliana landsberg
tctgagtacggtgtagatatgttaaaggcttggattcaatcaggtccagatggaaaagccgctgtttttttaagtgaaactctttcttctgttcgaatagataagtccccttttttattcatatggctgaagaatcgtttagttatcacatgttttacaccaaatgcctcaccgcaaaaaatccgtacgccctatatcttcagagtttagtgctggcatttcatatgtttgagctccaggagtcaattgctatattggaaggcataaaggacgttatcccacatgctggtctactttacatcatgctccatagttgcgctagattaattctgtgggaattttatatttagtacaagcgaaggtactacaaatttagtaaagtcgacttatttgcagataaactaatgttccatatcaacgaggttggtccacgtcgccaatggacatacaaaaactcctgggagttcaaggactatggtgagtgt

SEQ ID NO: 167008 - DNA, 541 bp, Arabidopsis thaliana landsberg
aaggcccagatgaggaggtaagtgtggaagccatgaataaagctattactgtatatgctaattgatcccatgagaatgtaaagtttatggttcttatatgtaggcagtggagcaagtgtatgaagcattagatagatgtgaggagattcttggaaaacatcggtacatctgtggtaacactttgactgaaacagatatcagattgtttgtcacccttataagatttgacgaggtaagttcatactttcaaagcaagaaaaagaagtacaccatatgtgaacgaatctctaatgttgaaacgttgatccaggtttatgcagtccacttcaaatgcaacaagaaactcataagggagtatccgaatttgttcaactacacgaaagacattttccagatccccggtatgagtagcacggttaacatgaatcacatcaagcagcattactatggaagccacccgtcgatcaacccttttgggatcatccctcatggaccaaacatcgattacacttcgcctcatgatcgacacagattctccaaa

SEQ ID NO: 167009 - DNA, 1030 bp, Arabidopsis thaliana landsberg
gtagatgcaatgaatgggtcattataggaactttaccagaaatagaggacaacggtctaatgggtctactgctgttcggagttcacagtcctctcctcattcgactacaagagcatgtcctcagacaactgaaccggtgcaacgcagcccatctctttcaccacataacactcctattcaagagacatatcagaattctactcacactccttctccacctgaaggtcaagctcaatatcaaatgggtttggacttacaaaactagaccctaaacgtcctccaagaacacattggtaactcctttaattgtataatgtgtatttttcaattcaatgacatcattaagttactaaagtctgttgtaggtttgaggttgataatgaagttgggaaggtggtctctaactacatcaaatgatacttcactgaacctcacgctaacatctcacaggcacctaagaagattgttgacacttggtttcacatttttgcggtaattgattagatttctgtttttgatttgtagaagtaggtttgcggtattaattacttttatttccttgacactacaacaatataattgggacaactcaattaacgaattggttaagaggcaatttacaattaaggcaggaatccgcttgtgtgatattgttcgcaagtggaaaagtaagtagaaggaaatagatgataaagcaatgcctatgtggatggatcctaaggtatggaagggcctcgaagtttttttgcttgatccatagtctgaaaagaaaagtggaaagtgttcaaaatcacgcaacactagtgtggccagtcatggtccgagtagacacacctcaggtcaaaagacttatgctaaacgagcattagaaagtgtaagtaatttatgcttttcacttttttctcattttcctagtttcatgatgatgattactactttaactttcatgttaggctgaaaagaatgaaggtcaactccctccaattgtctagatcatggagcagactcacaagagaaagaatggagaatt

SEQ ID NO: 167010 - DNA, 539 bp, Arabidopsis thaliana landsberg
  unsure (1)..(539): unsure at all n locations
atggatatagagctcgcccgaacgttcctagaaatcnnnnnnnnnnnnnnnnnnnnnnnnnnnnnnnnnnnnnnaaacgtcgaccagacgaccgtcagcgcgcgcattcgcacccttgagcaattgctgggccgaccgcttttcgtccgcaacaaaggcggagcgtccctgaccccnnnnnnnnnnnnnnnnnnnngctatgccccgacattcgtacagctatggcaacgcacgcggcagcaggtagcggtgccaccagggcatacggcggtccttaccgtcggcagcgaagtcagcttatggcagccgctgctacttgattgggtttnnnnnnnnnnnnnnnnnnnnnnnnnnnnnnnnnnnnnnnnnnnnnnnnnnnnnnnnnnnnncttggtcaatcaggttgctgccggcctggttgatgtcgcaattatgtacgcgcctcaacatagaccaggcctaaagatccatccactcatggaggaagaacttgtctttgaaacagaagatcggagtacaaacagcgccgaggacagtag

SEQ ID NO: 167011 - DNA, 225 bp, Arabidopsis thaliana landsberg
atggcgaatgggtgcgagatttgctgtgaaataatgatcgccatactcatccctcctctaggggtttgtctgaggcatggctgttgcactgtaagtattctttatctctgaatcttggttttgtctgaatcaagagctcataaatatgtaaattgtccatatttgacgtgcagacggaattcatgatatgtctgatcctaacgctcttggcctacctaccgggga

SEQ ID NO: 167012 - DNA, 1758 bp, Arabidopsis thaliana landsberg
gtatacctattttccggttgatacaaacaatacactttcaatttattgtcaattggttttgagataaattatttgtttactcatagtcatatgatttaagaaaacctattgcttggtatagtgaacgcaaagaagtgcttgatgactaggatgcaggagatgtccctcaattaccatttcacggcagagcaagaatccggatccactagacatgccttctttggctttaatggtagatgcacccttatcaacatttattaaaatactttatcctatggtcgaaaacttcatattttatttcttagatcctctaattttatattatgtgtagcttcaatttctaacttttattcttgaataaaaatatccaaaccaattgataatgattatccagtaagtttttccaataacaataaaatatatacattcaaatctatcttgtaatcttcaaaatctctcctttcaaatatattttggtacgttactctaaaatatagtttagactttaaacaatataattggacgttcgcagggactgcgggtgtatggagactggcggcgatggaagaagctggtggttggaaagaccggaccaccgtagaggacatggacttggccgttcgtgtaggtctacacggctggaaatttgtctttgtcaacgatgtttcggtacttccaattcttttggactataactaataaatgtgtgtccaaatctttacatcgtataaaaccagtccaaatcttaattaatattcgtcacatgtgttgttgttgctttgcacacactttatgcacagttgcacatgatttcatttgacaatatataatatgatttgtatttttacgagtggatatcaaataaacaaacttttaatcgtatttttcttaattctaaaaatatatgattgcgattgtaggtgaaaagtgagctaccaagccaatttaaggcattcagattccagcaacatcgatggtcatgcggtccagctaatctcttcagaaaaatgactatggaaattattcgcaataaggtacactactactattattcattctatatatctgaccaatcaaaacgaaagacacttttattctctatcttaatttatttcattctaagacacaccaactttttttttttgtccattatgagaaacaaacatccattgtgatgcatgccaatttaatttaagtttttttttgtatgatcttaagtaataatataatgttggtactaacgaatttgatttggtaatttgagcagagagtgacgatttggaagaagttgtatctggtctacagcttctttttcttacggaagatcatagtccactgcttcacttttattttctactgtgtcattcttcctacaagtgtcttctttcccgaagtcaacattccagcttggtcaactttttacattccctctatgatcactctctgcattgtcattgcgacaccaaggttagttactacttccttattcattttgatcgacaaatatatcacctaattatatattatatatcgttatttacaatggtttatctcatttcctagatcattctacctcggtaatatttttggatcttgtttgaaaacgtaatgtctatgcaccggacaaaaggaactttcatcggcatactcgaaagacaaagagtgaacgaatgggttgtcactgagaaattagaagatgctcttaagactaagctacttcctaggattggaaaacctagtaacatgtttcttaaaggt

SEQ ID NO: 167013 - DNA, 324 bp, Arabidopsis thaliana landsberg
  unsure (1)..(324): unsure at all n locations
atggttctgaaggtcctcgagctgctgcatgcgaagaaggtgttgggtacctctttgatggggagagagctttgttccgaatccttgacaaaagcgagcgccagttcgtcatcaagaacaaaagtgggagaaactcaaaaccaaaatttagtaggttaggagattgaatgatggaggaaacaaatgaatttgtgaaaagtttttgacaagaaagggaagtgaaggagataaagagagaattgtaaggattcgagaattctttggtatgggaggcggagagatgcggttgttgagttcgggaattgnnnnnnnnnnnnnnnnnnn

SEQ ID NO: 167014 - DNA, 675 bp, Arabidopsis thaliana landsberg
ggaaggaaaaccacacccagagattgttgacaatccatgactctgtttttgatgcgtggaaagaccgcgagcctattgggaatagtcagggaaaacaaattgttcataacatatacactaaaattagtggtgtatcattgaatggaaatttgtatttggttacttattttgaaacgactgatctcgtgtaccacctaattgaaatcaattcttcgagcgaaagcgtcgtgaagttttgtgatctaccatgtgggacgtcgaactttcttaaggatgctttcgtccttagggttttcgagggaggtcgattttcattgttaaagcaatgccatgcaacaaagaagattgagatttgggtgagcaagtacaagattaataataatcttgatagagatgtggaatggataaagttcatggaagtttcaagtcctaacttgccggatttagtagatggattcgactctcagccaagttactttattgaagataaaaggctcgtcgtgtgctcgtgcaacgaaactggtcgggcttggatctatgttttcggagaaaataagttgatcagtaaaattcaaatagattctgtggttggtccctggcctttgcattgtagctttttccccagtttggtctcaatacctctgaagtcaaactaaaaaagcagcattacaagtt

SEQ ID NO: 167015 - DNA, 394 bp, Arabidopsis thaliana landsberg
  unsure (1)..(394): unsure at all n locations
gtctttaccaccattacctgatcatcactcgaccccatcactctacctgttagtcgagtatcaccatcaccaccactcgactacacactcgatggcaagcttcagattcttcttcattccgcactcaatcagacactcgagcacaaggaagaaaagaagactccaactattcactcgacctcccacttgaccacnnnnnnnnnnnnnnnnnnnnnnnnnnnnnnnnnnnnnnnnnnttttaagtattagggtttcagaatatttggctataagtagcatgtacttcacatttttgcaaacaagttttttatctagttttattctgcagaccttgtgttctagaccttttgtaatccggatttctctttatctattcagtattcagtattcagct

SEQ ID NO: 167016 - DNA, 1465 bp, Arabidopsis thaliana landsberg
  unsure (1)..(1465): unsure at all n locations
tatggagatcttgctcttgtctggatgcaacatcagtgaattcnccagattcttanagtccttaaagaagttatggtatttagatctttccagcaacagaatcaaaggaaacgttcctgattggatatggagtcttcctcttttagtctctctggatcttagtaacaattcattcaccggtttcaacggttcattggatcatgttttagccaactcatcggtccaagtactagatattgctttaaactctttcaaaggatcattccctaatccaccggtctctatcatcaacttgtctgcttggaacaatagtttcacaggagacattcctctctcggtctgtaacagaacctctcttgatgttcttgatctgtcctacaacaacttcactggctctattcctccatgtatgggtaatttcaccatagtgaatctccggaagaacaccttggaaggaaacattccagacgagttttatagcggtgctttgacgcagacacttgatgttggatacaatcaactaaccggagaacttccgagatctctcgtgaattgctcattcataaggtttcttagtgtggatcacaacagaatcaatgattcatttcccttgtggctcaaggcattgcccaatttgaaagtccttactctccgttcaaacagtttccatggtcctatgtctccaccagatgatcaaagtcctcttgcatttcccaagctccagatacttgaaatatcgcataacagatttacgggaagcttaccaacgaattactttgcgaattggagtgtaaaatctctcaagatgtatgatgaagagaggctatatatgggagactattcgagtgatcggtttgtttatgaagatactttggatttgcaatacaaaggtctatacatggagcaaggcaaggttcttactttctactccgccattgatttctctgggaacaagcttgaaggagagattccagaatctattggtcttttgaaggaattgattgcactcaacttatcaaacaacgcattcacaggccatattcctctgtctttggcaaacgtgacagagctggagtcactagacctctcaagaaaccaactctcagggactattcctaatggactgaagaccctctcgtttttggcgtacataagtgtggcccataaccaactcagaggtgaaattccacaagggacacaaatcactgggcaatctaaatcctcctttgaagggaatgcaggtctttgtggtcttcctctccaaggaagttgctttgcgccaccaacaccacagccaaaggaagaagacgaagatgaagaagtgttaaactggaaagcagtggttatagggtattggcctggactgttacttggattgataatggcacacgttattgcttcattcaagccgaagtggttagtcaagatagttggtccggagaagcgcaaggaagacaatccagtt

SEQ ID NO: 167017 - DNA, 453 bp, Arabidopsis thaliana landsberg
tacccaccgccgggaaaccaccaccgggaaagccaccggatagccgccacccgggaagggcatcggacccatcccacccggtactcggtacatcccgcccggaacgccgtacattccgccgggaattccgttgaaagctccgggagggggaatgcccaccatcccgccaaccatcggggccggcacgccgtacatgccgccgggcatgccgtacatgccgccaggcatgccgtacatgccgccgggcatgccgccaggcacgccgtacatgccgcccatcatcatgccgggcattccgcccatcagcacgccaccgatgccgcccacgaacatgccgggcatgccacccatcatcataccaggcatgccacccctcatcataccgggcatgccacccatcatcaaacagagcatgccacccatcatcatgccgggcattccgcccatcagcac

SEQ ID NO: 167018 - DNA, 1065 bp, Arabidopsis thaliana landsberg
agaattggtggtcctcatggaatggcaatggagtggcaaggtgcgcctgctagcccaagttcatacccagtgaagcgtattttgcgtttagatcttccagttgatacctatccgaatgtaagtttcgctgtattgttttctttgcgacaatgaagttcaggtgaattaaccattcttctgcttttggttgttagttcaattttgttggaaggcttctgggtcctagagggaattcattaaagcgtgtggaagcaactacgggttgccgtgtgtatattagagggaaaggatcaattaaggatcctgaaaaagtaagacatgtttacatttttttctgtttccaaccatctttttaccaaactatgctcatattttgcattgatatgtttgttgctaggaagagaaactgaaagggaagcctggctatgagcatctcaatgagcagttgcatatcctcattgaggctgatcttccaattgatattgtggatataaagctgcggcaggcccaagaaataatcgaggagttggtcaagcctgtggtgcgtgttgtaacatactttttctcattttatttttgagagccacattgctttgaagttttgcaacaagttcatcaatgttctttttgttatttgcatgttttaagtcttagttaggcaaggtgggagttccgtagtaaaggagtctcagttttgggttagtctgtagtaacaagcagcaggtggtaagtggtaacagaccttacgccagttagttgagaactgatagtcttaaaggagggctaggagaattcatttgggaattatggattggtttaggatcttggtttgtgcattggtcgagagtcaagagacttttctcctgaactatcagataacttaaggttactcacataacatgctttgtattcttttcacaggatgagtcgcaggattacatcaagaggcagcagttgcgagagctagcgttgctgaattcaaacttgagagaaaacagcccaggaccaagcggtagtgtctctcctttcaattcaaatgcaatgaaacgcccaaaaacagggcgt

SEQ ID NO: 167019 - DNA, 1706 bp, Arabidopsis thaliana landsberg
  unsure (1)..(1706): unsure at all n locations
caaaagcctaatgatcctcctcctgctccttggtccttatgcccaatgggaatgaatccccagaaaagacagaagagcagacaccaagtggtagggaaaagacagaagagtacgcaacaagaagtgggggatacaaattcaggttcagggtcaggatcaacaccgactcttgtgtctggtttgtggcttgaaggtgatacaatgcgtgtgggattgtgttttaaagatttagctgagatgaagaaggcagtggactggtgttcgattaagaggcggcaaaaatgtttactaagagagacggagaaggacgtgtatgtggttgaatgtgaaagatggcactgcaagtggtcaatttgtgcttctagaagagaagaagacggtctttttgagataaccgagtgtagtggtccacatgattgttaccctgaacatctaaatgattttgatgctgagtgtataccatttcagattgagcgtgtggtcagggtacagcccactctctcaactgcagagttggataaatggtgggaaaaaaaatttggctttgcgcttgatcaagtggtggagcattgttcagaaggacttgtggaggatgcgaaagtgaaagctatcaaaagattctttggagattgggatcagagtttcagactcatacccaagttaatgtctgtgcttcactcttctaatggccttcttgtagactggcaatatgattctttgactcatgatcctgaacacgcctcctttcgcggtttgttttgggcattttcacagtctatccaagggttccaacattgtagacctctgattgttgtggacaccaaaaacttgggaggtaaatacaaaatgaagttgatgattgcctcggcgtttgatgcaaccaatcaatattttcctcttgcctttgcggttactaaagaagtatctgttgatagttggcgttggtttctcactagaatcagagagaaggtaacacagaggcaaggcatttgcctcatctccagtcctgaccccgatatactcgctgttattaacgaaccaggatctcagtggaaagaaccctgggcttatcacaggttctgtctgtatcatctgtgctccaaactatgtagcgtttctccaggcttcgactacaacatgcattttcttgtggatgaggctgggtcgtcaagtcagaaggaagagtttgattcctacatgaaggagatcaaagagaggaatccagaagcttggaaatggttagaccaattccctccacatcagtgggctctggctcatgatgatggtcggagatacggaatcatnnnnnnnnnnnnnnnnnnnnnnnnngctgtttgtaaaagatttcggaaagttgcaatggcagggggtgtgatgcttctgtttggtcagctgaaagacgcttttgctgagtcttttaagcttagccgtggttctcttaagcacggcgatgtgtacacggaacatgtcatggaaaagcttgaagagtttgagacagattccgatacttgggttataactataacgccgttggaaagagatgcttgtcacgtctctttggcccatcaaagaacatctcatcgggtgggggagagtactgactcaacttctggtattgttcagttgagtgacacatcatgcggttgtggatagtcgcataagagcccgctcccatgactgcacgctcccacacgctgagaaaaact

SEQ ID NO: 167020 - DNA, 515 bp, Arabidopsis thaliana landsberg
  unsure (1)..(515): unsure at all n locations
atgtacgacaacgagccggacgctcttccgtcgttggccgcggatgagcgcgggcgcgcccggacactggcgcgcctggtcgacggcggcagctccgacccggtcaggcagatcgcgcggcgcgagcgctggcaccggggcgaccgctcgggcgcgctgcgcgcgggggtcttcggggtcagtgacgggctggtgtcgaacacggccctggtgatgggcttcgccggctcgggcgcgccgcacacggtgacgttgctggccggggtggccgggatgctggccggcgcgttctcgatggcggcgggggagtacatctccatgtcgagtcagcgtgagatgtaccagcgggagatctcgctggagcaggccgagctcgaggaaaagcccgaggaagagcgggccgaactcgcgctcatctaccgggccaagggactgccgcgcgctgacgcagagcgcttncccgacaagatcatggccgaccgcacggtggccctggacacgctggcgcgggagga

SEQ ID NO: 167021 - DNA, 532 bp, Arabidopsis thaliana landsberg
accataatcgtttctagatctaagcaattccggtgaaattcctagcagctaaataacggaattagaagagatggaggatcgagagaaattaccttgggatgacgagagtagatcgcagcagtttataagcgaaagtgaagaagatgaaaggttaactcgtttagatagggaagctgatgagcgggaaaacgaaaaccctaagactacgaaccgtcacacttttcccaagaaaagtctcgtgaattgtgagaatttattttcctttttggctacagaattatgcggataaggaaggaagttccgacgtgataccacaattaccgggattgtgaattaaacgcaaaataagtctccgaattaattcacttcgaagacttggggtgcaagttatggatgtcggatctcgtatctttgctccgacccgagatccgtcatcattctttaaatgggcctgagtcaaagcctcaacgatgagtccagcattgtcaaatgtggagtgggccgagataagcccaccagagccaggtcgatt

SEQ ID NO: 167022 - DNA, 1352 bp, Arabidopsis thaliana landsberg
tagacagcttgtttctttgctgctcaaacttaccatcatcatagaaatggttcaagaaagctatcttgattcttctccaagtcttgagggaacctgcctttagttgtttcaacaaagaagcggcttccccatcaagtggataagggaagagcttgcacaataggtagtcctctgagactccattagctttgatgcttagaacgaggtcctcaaaacgctcgatatggtccattggctgctcatgagataagccaggcttaagctcatagtcgttcctctgaaagggtgggggtacaatcgctgaacgattagcatagaacatgtctagcctattgaaatccccgagagtacaacgtggttccaaagcttgatgaatagctgcaggaatttggggtttgtgtcgattgacacctccacccacttctacgattaggatggaatacatgctagaacaaattcttaagggccaagtgattacgaatcaacggattgatagtctgtacgatgatgttcaggacttgaatgctcggatcaacatagaggatgttagtgtagttcagtcagagagtagaattcagcaccagaccttagagtaaccactcacgactgcttgccacactgatttgcagaacaaatcgacactaagtcacagtgtcgaccgacacgacctcgatgtcgattgacactcttttggaagacacaatgcttcagcgtttgacggagcaaaatcgagtgggctcgatactgaagtgtcaacaacagatgatagtgacgatgcttaatggactgatgtttagatagatgaggttcatggaacgagcaggcagccacaagacgatgctgacgaattagttgatgagaatcgatctcaagcgatggtgtcgatcgacaccaccacctgtatcgatcgacacaccacacaggctgagccagagttatttattagagctggttttcgtgttgagttcactactgatactccagtcactacggtcacgtcacccactgcacctctactccttgatccacctcctaaacggctaaggtactcatttcctcctaaacctcctgatttcatcaataagagtttaaaatttccaaaaactgttttacggttaagcaagccacgagtttctcgtcgagcacttattctttcttttgatgattgttcaggaaaccggagtagaccacccatacctctgtcctgctctgctgacattcctcacttccttggtagaccgcacacaccgactgtttatacaccaccttggatgaagcgaggttctactaggaagtatttacttcctccatctgatccacctgatccccaaactccaccaaagtaaagctaa

SEQ ID NO: 167023 - DNA, 2129 bp, Arabidopsis thaliana landsberg
ggtttgaaaaattgggcgacatgcttgcagcttcatttatgcaatttgcaaaacaacaactgataaaaaaagtctttggagattgggatcaaagtttcagagtattacccaaactaatggctgcgtttcactcatattatgggctagttgtggactggcagtacaagctttttcaaatactgaatttgcttcctttcgtagtgtgttttgggcgtttccacagtccattgaagggtttcaacactgtagacctctgatcgtagtggacaccaaagacttgaagggtaagtaccctatgaaattgatgattgcctcaggagtcgaagctgacgattgctatttcccacttgcatttgcgtttaccacagaagtatcctcagatacctggcgttggtttctcacttgaatcagggagaaggtaacacaaaggaaagacatttgcctcatctccagaccccaacctgaaatacttaatgttattaacgaaccagggtctcagtggcaagaaccctgggcttatcacatgttctgtctggatgatatatgcacccaatttcactatgtttttcaagacaactacctgaagaaccttgtgtatgaggctggatccacgagtgagaaggaagaatttgattcctatatgaatgagatcgaaaagaagaacttagaagcgcggaaatggttagaccaatttcctcaatatcagtgggctcaagctcatgacagtggtcggagatacagagttatgacgatcgatgcagaaaatttgtttgcattttgtgaaagttttcagtctcttggtttgccagtgacagctaccgcactgcttctgtttgatgagataagattttttttttactcgggtctttgtgatagcagtggtagggttaaccgcggagatatgtacaccaaacccgtcatggaccagctcgaaaagctaatgacagattccatccctcacgttgtaatgccattagagaaaggtctgtttcaagtcacagaaccattacaggaggatgaatggatcgttcagctgagtgaatggtcctgtacgtgtggggagtttcagttgaagaagtttccatgtctgcacgctctagcagtctgcgagaagctgaaaatcaaccctttgcagtatgtagacgactgttactctcttgaccgattatacaaaacttatgctgccactttttctcctgtcccggaagtagcagcttggccagaagcttctggagttccgacattgtttccaccggtcattctgccgccacctaacgtatcaggtaagtcccaatgcaaaactactcctcgcactagcaagacgaaaagctgaacctgttagatggatttggtacgaaactgagtcaattctaaagaggtttttgtatggattgtgctaactgattggtgattatgtagtaacttttgactttcggcaagtatgattaaaccggttcgggtaatatatcgtagtgtcgtgacaaaaacatgtattgctgcttttgtttgtgaaaatcaacgtgagttttgcattttgctgtgccctgaactaacagtcgattaatcctgaatttgctttgacttggttaatagtcttaataaaccaagaatcatgactgaaaactgaactaaaatcggtatagacattactagttgcattgcattatgtttctactttcaagattaacttagtatttactatggcatggatacaattcaatacgaaagatagctttagtcaagactaggattcagaacaatctgaatacttaataaacgatggttccttagattcataaacatgaagaattatagtgtcatcatcaattttgatatatctttcttcatctttttatgtttctgacgccatgtgtttatctgtctttgtttgatctagtaaatgacaaagccaaggtgcctcctagtgatgaagagttgagaaatgcaattgttgatatcttgaaagttgtggactcgaaaacggttaggattcaaacctcaaaatttttatgtgcgtttagaagataaattgatctataagtctctaataatagctttgttatttcctgacagaccgcgattgctgacgtcctcaagcgacttggtatgagttaagatcagatcgtttt

SEQ ID NO: 167024 - DNA, 1740 bp, Arabidopsis thaliana landsberg
  unsure (1)..(1740): unsure at all n locations
tcatattaaatgctttctagaaaacgggtttttaaagtgcatttatgttaatctagaggttggcaaattaaatacgcagtactatagaaaaactacgagtaatcaatgtgttagagtcattaattaatgaacaattcttggaattcattcattttctttttattaactaatcaaaatatacaacaatatgtcatgttatattatatttaaaaataaatcaaaactaaaatcagaaaacaaaacaaattaaagaaataaaaatttctagagaacagaaacgacatataattctatttaagtttaaaatctaaaccctaaccactcttttataaacccaaaacgatatatgattttgtttaattgtaaaatctaaaccctaaatttcatttttataaacccaaaccaacatatgattttgtataatagtaaactctaaactctaaatacttttttataaacacaaatttaattttgttgaattgaaaaatccaaatcctaatttttatttataaacccaaaccgatatttaattttgtttaattatcaaatctaaaaccaaaatcttatttataaacacaaactgatatttaacctttttcaattcaaaatatacagattttatttccttattctttttcggattttaattttgattaatttttaaataaagtatgatattacatattgttgtattttaattggttattaaagagaatgtgaatgaagttggttcaccctaaaggtgagtcgaaaaagttttctaaaatttataaataaaaaaagtgaatacaagagttcacccctatttggtgaacctaagaccatgcccaacggctatattttctgagtatcagaagcccaaaaaatattttaaaatggaccaaacaatgtttttgggtctgagccgtatcacttgattgatatttctgacacccaataacaaatgacgtggcacgtgctgattgttgttagaaacgcgtttttatctaagcagaggaaaaaaaaaaaattctattttttctcaccgctctctcccgagaaaacctagaacttccctcttctccgccgattttccctctcctccgctgattttccctctcctccgccgattttccctctcctccgccgattcttccttctcgatcttgcgttcggtccctctgcttctcttccggcttcagctcttccattgcatctattcgagnnnnnnnnnnnnnnnnnnnnnnnnnnnnnnaccttctctcttctctcagctcatcatgaagtttgttggctgttatgagtttgcctctcagactcctcgcagtggagagnnnnnnnnnnnnnnnnnnnnnnnnnnntacaagctttaccatcaagatcaaaaaacaaatttatccttaagcatgtttggagaatcctcaagatatatcagaaatggtgcaattagtgtgagaccaaactttctgccaagaagaaagctaaactttcatctgtagaagaagagagtcttaaaaggcctataagtgtgaaggcagccaaggctttagccaagtccaaagttaagggaaagagtgaaggaggactgacgctggttctggtgattaacttcagcatatgtgggaagtgaaagagaaagatttgattgtcaaagagagactctccaagcagaagctacttgacaacctacttaataggtctgatggattgagtgagatggaaattcaacttaaaaactctcttatccaagagtatctatct

SEQ ID NO: 167025 - DNA, 1045 bp, Arabidopsis thaliana landsberg
atggcaagaggggcatttatagacgagagtggccatggaggagactacgaaggtcgtgtaaccgcgtttgtcatgataacctgcattgtagctgcaatgggtggtctcctctttggttacgacattggtatctcaggtttgtttcttgccagtcaagtaaacgagaattcttctctctgcttctttctttgttctcatggcggataaattatatgttttcaggaggagtgatatcaatggaggtgtttctaacgaaattcttctctgacgtgcttcgtcaaatgcaaaacaaaagagggcgtgaaacagaatattgtaaatatgacaatgagcttcttactctcttcacttcctctctttatctcgctgctttgtttgcttctttccttgcttctaccattacaaggctttttggccggaaggtctcaatggttatcgggtctctcgcttttctctctggagctcttctcaacggtttagctatcaacctcgagatgttgatcatcgggcggttatttctcggtgtaggtgtcggattcgctaaccaatctgttcctctttacctctctgagatggctcctgctaagatcagaggagctctcaacattggttttcaattagcaatcacgatcgggatcttagccgcgaacattgtcaattacgtgaccccaaagctccagaacgggatcggatggagattatctctcggtttagctggagttccggccgttatgatgcttgtcggatgctttttcttgccagatacgccaaactcaatccttgaacgtggaaacaaagaaaaggctaaggagatgctgcagaagatcagaggaaccatggaggttgagcatgagtttaatgaactttgcaacgcgtgtgaagccgcgaagaaagttaagcatccatggacgaacataatgcaagctcgttatcgaccgcagctcacgttttgtaccttcatcccattcttccagcagctaaccgggatcaatgtcattatgttctatgcacctgttctgtttaagaccatcgggtttggaaatga

SEQ ID NO: 167026 - DNA, 1267 bp, Arabidopsis thaliana landsberg
ccaccaattgtgtcattcactacaccgatttatcacccaaacatcgataacagtggcgggatttgtcttgacattctaaatctccctcccaaggttagactttgtttcatcatcttcctccatagctttgttgattcttcatgatagctatattcaacactagtgatggaatacatgaatcgtgtttaacaatgtatagggagcttggcaaccatcgttgaatatctcgacagttttgacgagtatgagattgttgcttagtgaaccaaatcctgatgatggattgatgtgtgaagtagtaagtttctacttgaaggaaacagacttattttcttttgagattttgatttggtttctttaaggttttgttatggtgtttgtttacagagcagggagtataaatacaatagacaaacttttgattataaggcaagagagatgactgagaagtatgctaaggttaaagctgatggatgcagcaccagcttacagattaaggtgcataaattagttatacttatctagtttgttgagtggagcttttaagtaaatgttgatgttttttctttagaatcatggagatgagaagtctggtgaaagtggaaatagtgttaagctgaagttgacagtggaatcttctttaagcatagcacatacagtgaaccgtgagactgcagggagagatgaacaagaggatggaaatgggaaaagaaaagcaggggttggttttggcgaggggaattcgtttggtaacgatgggataaaaacgagtaggaagaagttatctcttgcattgccttctcaatctcaaaagaaagacttgtgtggtgaagaagggctcacacgtggtgtttcagttgcttgcaaagaaaacaagaaaccaaatttgaatggaaagaagctttctctggggctgaagccgccgtttaatgatacctttgcgagttttcgaacttctgctgcgaagagtgacaacaatagactaagccgaaaactgtccctgagatcaccacttggagagttgaatgaagttagcaaacctgaggtacttgcgcaaactgatatgaaactggagatgaatcaaaatgaagacgcaaaaagttggcgcggtttgtttgagaactcggtatttgaagaaacatcaattgctgaatccattgttgttctagacagtgatgatagtggacaagaagaagaagaaagagtctcttctttgaggtcaagattatcactggcaaagaggagagtcctcaagtgtagaccttga

SEQ ID NO: 167027 - DNA, 142 bp, Arabidopsis thaliana landsberg
atggaggctctggtggtggtgcacaaggtggcctcagaaggaggaaaacgaccgaagacgacggtaagcgacgagagtggctcgcattcgagagaaaaaggaaagtcatttcaagtgaaaggctcgccggaaaacaattacg

SEQ ID NO: 167028 - DNA, 221 bp, Arabidopsis thaliana landsberg
atgggagatgaagatttaatagaattgaagttcagactcgcagatggtaccgacattggtccaagcaaatatagtcaattcatgactgttgcatctctcaaggagaaaatcattgctcaatggcctaaaggtaaatcattttctatgtttcttctcaaaagttttgctatttgtttaaaggtgaagttgaaaatctggttgtggacagaaaaagaaaacgc

SEQ ID NO: 167029 - DNA, 444 bp, Arabidopsis thaliana landsberg; identical to SEQ ID NO: 77318

SEQ ID NO: 167030 - DNA, 3941 bp, Arabidopsis thaliana landsberg
atggctactactcaatgcaactctcagatcttaattctcttgaaaagaaataaattgaaagatttctaataattttcaataaacaagtctgttaaaaccttcatcaccttgaccattattcattatagtgcctgatctgattcatataatatatatatctcctcctcctacttgcttgcttgaaagatcatcaacaaagttttattcccagaaagaaaaaagaaaaagatcattcatcagagttaagtcaatcaccaaaccatgatgaagaagaagaaacagagcagatcccagtcttcttctaccaagaaaacttttgaaccatcctcagattcttcaccttcacctaggctcctctccattatccgttctaaggtgacttctcatcttcttcctctctctctctcttagatctttgatttttcctataacaggttcttgagttctggatttgagctgaagtgcttgtcttttatctttttttttggtagttggcaagtagtaaagacttgaagcatatgttcagaggtatgaggagtagaaccgtgcccggattatcttctcaatctagaatcgtgagatgtcctaagtgccacaaacttctccaggaacctttagatgctacttcttacaaatgtggtggatgcgactcgattcttcatggtacaacagccttcttaagtagccccctagtcatgtttacaagtaacccacctcattcataagtgttttcttttttcgtgtgttctttctttggatgcagcaaaacgttgggaacctgacggcaatgatcacacaaacactattcctgaggctctcctttcttctcaaaaccgtagtttaagtgctgaggtagaatctccagaagatggtagtagaactccaatgagaactactcaccgggagtacaattcaaggccatcgacttctgttgaaagaggttatcatccagaaactgtttacaagcctgagacatctgatatccgcagagaatggatgagaaggactgatgacttcagtgagaccggtgattctgatgtgtttacttcagaaagaagctctccatataacacacgcagcaatgctgcgcaatgggcacaacatgagggaagatacgcagatccacctcgggttcctttctatccagcaagtccttccccttcttctgcatatgaatatggctacagtagtccttttcacgggtcttacgtttctgcatcagagcagtcttattatcatcaacaaccaaaccaattcgagcagtatagcagagaaggctggtttcaagaatcttctgttgcttcacctactcgttttccgggtgagacatctgatggaaagtactatcacaggtcttctcagtctcagctacatgatcttcagtatcataatctttatgaaccaagtagatctgaaaccccgcatcactctgtgtactctgagcgtagttatgtaccagctgctgcgccacaccgctctacatactctgagcattctgtagggatttctaagagtgacacaagtagtgaaaagagcattctaaggaacaaaaaacggtatgtcagggaaaggaatccggtagtgaagcgccatattcttccttcagccggcggtgcaccttttgcaacttgttcctattgcttggaacttctacagcttcctcaagtgtctccccaaggaaaacgtcaaagatatcaagtgagatgtggcagttgttccggtgtacttaagttctctattcgagagaaagcagatactgtcctggattcacctagctttgtggattatggcatggattttgcagatgagactgttactaatcaccaggattcagcatcagaaggtcatgaagagatttatcctgatggaagtcatctgacgtgtttagacgacgattctggagaaacaatctgcaaaagtaacgatgctgttatattgagtcaaaaaattctagaaacatttgaggataaagggattaaagaagacataaggaatatatccaccaaatttttagatttgaaattggaggcattacagcctcatctaaaacctatggggaaccgcagattaagggagcaacaacctacatcaagtgagactattggagagacttccaagattcatctagagcaatctcaggaagctcattcagaaaagtcaaccgagatggataataacatttgtgatatagaagagcctgaatatgagaagaacgaaattattaagccagaagaaattgtaggagaaggatcaggtgagtccttggaagttccagtaaaccagaacgaaaggatgagtgaatcaagtgaagaagatgagagagttgcagagagatcggtatctcatagtgaggaacttctatacaagaaagaatacgtcagtgaaacacgtgtacagtctgagaataccggagacacttacgagtttgaatgggaggagactcaagaaactgaagaatatgaaggtgaaagtacattagaagagatcggagacaaaccgcagttgcatttggataaatctaggtacactcgagattctatatgtgacagcagcttaagctatggtgaaccatttgaggatacatcagtcaaggaagatacggagcacatatcaaacacaatttcagatgcgaagtcagctacaacacattctcccttgaactctttggtgaatgagaatcagaggtttataggacatcttgaccaatcaggcgaggctacagtaacaatatccaggatccaggagcactccaagtatgaatatgagaatttaagcgaaagacaagagttggaaatgaccattagtgacagagtcacgtgtaagttagaggagtctagatacgagacaaatgaaactcttgagccgagcaaggtgggcgaagatggatctcttgtttctttcgagaaggtgagcgaggcattcgaaacaatcatagaaggcaagacaggtgaagagagactggtatctcatcaaatggattctccaaacgagaatgtagaaaattcttatggaacattagaaccggtttatctagaagaaagcgggtttgcaggtgaaagaacatgggaagggacaatagaagatagagcggggttacatttggaggaatatgaaagcaactatgagaattacagcagaccatttgaatggacttcagaaacagctccaacatttcgcatgcatgattatgagctagggacaatacttgaaccagacgagtatgctgacggaagatcagaatcaagttcacggggctccttcaatgacgatggaggttcagaagagagggtcgtttttcatgagtctcaagttgctatacctgagcagtcccactatgagtatgagaactcaagcaaaagacaagagttgagtgacaccgtttttgacatagcaaggtctgaattacaagagtatagatatgagagaaatgaaacacttgagccaagtaagatggttggagatggatctgttgttcctgttgagaaggcgggtgaaactttcataagcaaaaaggatgaagacagctcggtatctcatcaaatggagtctcaaaatgaagatatggaaaattcctacggaacaaaagaaccggtttatccggaaggaagcagatgtgaaagtgaaaattcatgggcagagacaatgggagatggagcggggttgaagttagaggaatataatagcaatccatttgaatggacttctgaaaaagctgcagcatttcatctgcatgagtatgaacgatggacagtgcctgaaccagaagaggatgctaatgaaagatcaataaccagttcacgggattcctttaatgaccatgaaaatttaaaagggatagctgtgtctcatgaggaggagccctggctagtggatgagaacagaacggaagctctaaaagttggtgtaatggtggaagatgaaccatcgctgcacgtgacgaa

SEQ ID NO: 167031 - DNA, 966 bp, Arabidopsis thaliana landsberg
attgtctcctctctgcaattccacccccatctgatatcagagcaaaacacagtttcaaatgtcatcggtgtaagaaaacagtggaccgtgattgaacgatgagtgaggcgactgcacttgcgattcatcatgtcgatggtcattatgatcattggagcgagtcaatggagaacctcttacgagcaaaggcgttgtggaatctagtagaagatggcgttcccgagccggcggcgggaatcgagactactgcagcgcagcagaagagtcttgaggagttgaagaagaaggatcatcaagtcaagtattacttgttccaagcaataaatcgggtcgtgttcgagcagatcttggatcgaaaaacatccaagatcatctgggaatccatgaagagaaagtttggaggaaacgagaaagtgaagcgttctcttctccaaaccttaaggagagattttgaggttctcgccatgaagaatgatgagaacattgatgactacttcaaaagggtgatgattgtttccaacaagatgagaagtaacggggaagacatgccagattcgaagatcgttgagaaggtacttcgaactctgacagaaagattcacatatgttgttgtgtctatcgaggagtccaaagacacagggagaatgacaatcgatgagctacagagttctctatcggttcatgagaagaaattcaaaaaaagcaaccatgaagaagaagctcaagctctcaatgttggaggaagaggaagaggatcctatagaggtcgagggagaggcagaggacgctctttcaacaaggcaacaattgagtgttacaactgccacaaacttggacattttgcctatgaatgtccaagcgggaacaatggtgcacactttgctgaaatcgatgagaaggaagaagttcttcttatggcatatgttgaacttcaagggactagaagaggagatgtttggttcgtag

SEQ ID NO: 167032 - DNA, 574 bp, Arabidopsis thaliana landsberg
aggatgtatacgccgggagcggcaacatgagtacgcgagactaaaatagctgtgtggtgggacatgaaggactgtccgattccagagggttatgatgctcgtctggtccgtccgagcatagaagcggcgttcaatgaactaggctactctggtcctatctccatcaccggctatggtgaccaaagagaaaccccttgtcagatcctgcgagggctctcttccaccggagtcgctgtagcacaaatcatacccggttagtccaattgctatcgatctctttgaatgaatttagtgctagcttggtttaaatttgaacaacatctcaagtcaatttcaacagaaagcagatgctcactcatgtattcgagtatgctggagtggcgagatcttaatcctcctccggctacaatgatgctagtatccgatcagtggcagcatgtcttcgcttgggatctgcccgtctacaacaaacacgaaatcaaccttttctggcttatcaactgagcgttcgcaggttcgcactgagacttgtggagagtggatctgagaaatacgtgagccaaaaggaatttgt

SEQ ID NO: 167033 - DNA, 1098 bp, Arabidopsis thaliana landsberg
agctatgaatttgttgactccatctgttgttgctcggaagaaaaccaaatcgtgtgttcagagcatccaagttccgcgttgccaaattgatggctgtgagctggatctctcatcttctaaggattatcatcgcaagcatagagtctgcgaaacgcattcaaagtgcccaaaagttgttgtgagtggcctggaacgtcgtttctgccaacagtgtagcaggtaaaccatgattattgttctgactgcattctctttactgcaaaatgctagttctgtttagtcgtccagcaataactttaacatgccctaatgttatggtagagaattgatttcttttctaatgttcgggttccatgctgtctccgaatttgatgaaaagaaacgaagctgccgcaaacgtctttctcatcataatgcaaggcgtcgcaagccacaaggagtatttccactgaattcagagagggtgttcggtaagaacctacactacacaagttgatattagcaatgtctcttcaggatctttccatctgtcaattctctctttctctatcacacacaccaacaacgaattttttgcttttacagatcgaagacagcatacaagtatgttgtggaatgggttgtcccttaacacgagatctgaagaaaagtatacatggggtaccacttatgagacaaagcctacacagatggaaagcggctttactctgagcttccagagaggtaatggctctgaggaccaactgtttactggtagcaccctctctttctctgcgtttcaaacatctggtgggttctcagcagggaaatccaacattcaacttccagacaaaggttgatatcttcacttctttaccacatcttgtatttgttgtgcatatttgctgatggattggccttttttagatctctggttttgaaactgagtaatatgttttggcaggtgtgggagaatgctcaggaggcctccatgaatctcatgatttctacagtgctctctctcttctgtcaactacttcggattcacaagggatcaaacacactcccgtggccgaaccaccgccaatatttggcactttccctagtcatttcatctga

SEQ ID NO: 167034 - DNA, 808 bp, Arabidopsis thaliana landsberg
cgtattaactggacgcaagatggttttgatctggcagttggtcttgacaaccagctttgggatactgtttccaatcgttaagtgagaacattgagaggtggtcacgagtcaagaataggatcattggcatggaacaatcacattctaacaactggaggaatggatggaaagctcgtcaacaatgatgtgaggatcagatcatctattgttggaacttacgtgggtcacactgaagaggtttgtggtcttaagtggtcagaatctggaaaaaaactagcaagtggtggtaacgacaatgtagtacacatatgggatcgttctctcgcttcctcaaaacaaactaggcaatggctgcataggtttgaggaacatacagctgcagtgagagctcttgcgtggtgccctttccaagcaagtttgcttgcaactggtggtggtgtaggtgatgggaagattaagttctggaatacacacactggggcttgcttgaattcagtagaaactggctctcaagtttgttcattgttatggagcaaaagtgaaagagagttgcttagctcacatgggtttacacagaaccagcttacactttggaagtacccatctatggtgaaaatggctgaactcaatggtcatacatcaagagttctttttatggcacagagtccggatggttgtaccgtggcttctgcagccgttgacgagactctcaggctttggaatgtttttggagaaccacctaagaccaccaagaaagctgccccaaaaaaatatacggatccatttgcataatgtaaatcatattagg

SEQ ID NO: 167035 - DNA, 872 bp, Arabidopsis thaliana landsberg
cagctgtagtctctaatctaaatcatctcctagaaagatcttatctttaaggtttttggtcgcttcaatagtgtttttggttgttttattagggagatgttcgtaagataaagttctgtcaatggtgtggaggaccaaccaagcatgaaatacctgacggtgaagagaaattgagagctatttgcacacattgcggcaaaatcgcttatcagaatcctaagatggtactgtttttgatatctctatctaccaacaacctttttgttttgtgtcaatcatgagaatgtttgattaaatgtgaaattgcaggttgttggttgccttatagagcatgaaggaaaagttttactttgcaaacgtaacattcaaccttcacacggtttatggtaatatacaaatcaaaaacatttcttctctttgtctctttgagttttttctagtgttgtgtgtgaagttatgtgaatgatagatggaactttgagtatgcaggactcttcctgctggttatctagaagttggagaatcagctgcacaccgagcaatgagggaaacttgggaagaagcaggagctactgtgaagcttatttcaccttttgcccggcctgatattcctcctattggccaagtatatatatagactatagatccctagtttgtgattcttcatatgattgattcttacatggctctgtttattttggatcagacttatgttatattcttagccgagctgcagaacttgcattttgcgcctggtcctgaatcattggagtgccgtctttatgcactagatgagatcccgtctgatgccttggcttgttcgtctatatatgttaccttaaacttggtcagtgtatgcattgagatgatta

SEQ ID NO: 167036 - DNA, 812 bp, Arabidopsis thaliana landsberg
aagttattatgtgtggttttaaagactctttcactatcctttgcaaggtcgctgaagcggtaaacataattctgaaccctggatttgcgtttgggactggagaacatcctactactaagctgtgtctattgcttctacaaagtttgataaaaggcggagaagctttcctcgactatggtaccggttcaggaatacttgcaattgcagccctcaaggtaaaaatctcacgcctttgatctttcaaaaaccaatcattacaacataaatcatcttatttaaatctttgtgcatcgctcatttaaatttgcagtttggtgctgcatcatccgttggtgttgatattgatcctctagcaataaactctgcaattcataatgcagctctgaacaacattccgttggagaaactggagctgcaccttgcacctattgagaatagctcttctggaagagaaataccattgcaaaaggaacagtttgatgtagtcattgcaaacatactcttgaacccggttatgaatctggcggatcatatcctttcattcgcgaaacctggggcaaccattggcatttctggtatcttatctgaacaggtaaataaagagtactgtattgttataacaagcaagcaagctacctgcaagtcataggaattgaaaattatactgtaaactgactaattcaatgctctttttgcagcttccaaatgtaagagaacggtactctcccttcttggaggacatttctgtagccacaataggtgattgggtatgcatgagcggtaccaagaaagaggagtttattgataactaa

SEQ ID NO: 167037 - DNA, 171 bp, Arabidopsis thaliana landsberg
atggcccgcgtaactgttgaagactgcctggaacacgtggataaccgctttgagctggtcatgctctcgaccaagcgcgcccgccagctggccaccgtcggcaaggagccacgcgaagcgtgggaaaacgacaagccgaccgtcgtcgccctgcgcgagatcgcccaaggc

SEQ ID NO: 167038 - DNA, 1484 bp, Arabidopsis thaliana landsberg
atggcaatggaagaatccgattccggtgaaacagcaacggcaaaaatttcgtctcttacgttgaaatctagggctatacttgcgactccaagcaacgaagaaatagcgattatcgtcgaacaagtctatacacctcaagaatccgacgaacacaaatcagcgcgagctctgtttgatttctgcgtctctactttcccaaattgcttaaccctaaagcttctcacggtgtatcgattttcttccgacgacgatttccgattacgatcgatctgtcttctaactgaaactctaaaagctcagcgattcgaactctctcttgtcactctccatgaaatcaaaccacttctgatttcttgcttgacaatgcaaaaccctaaatattgtgactcaaagattgtgagaatcattgtttctttagtagctgataaagttggtgtctgggaagagatgagtgattgtatactctcacttgttgtcaatgatccgattagggcttttgaggtctttatccaattgccatcatcactctacggagaattcatttaccggtttctgcagaattttcttgatgaagtttacaagattttgcttcgtcctgtggaatatggagttgaagtttggatcttggctttgaaatctgctgttaaaatggggattttgcttatggattcagaaatgagatttgatttgacaagagacattcttcacattgtttggaaatgttctcttgatgttgtgtggaatgatatggaagaagagtttctgctaaatggacttgattctcttgagattttcttggtggaagacgcgaacaagtttaagtggaatagtgatcaatgcaggtttgtggcagagtttgcgtttaagatttcagatatcggaaaagaggccaaggaagttgcttggaagatctatcgaatggttacaaagctggataagtatgtgcacaatccagctttcgaatttagcccttttcgcaatgagaataaatatcttggagtagatgatgtttgtgacttagaagacattttggatgctttatctccagtggaaatcatgagagaggtttcagtaggtcaagttcctaataggtcgagagagatagctatcacgagactttatgagttattttgtgatcacactgctgggaaaggggatataagtatttcagagattagagaaatccagccgttgctcatctcttgccttgcagagataggaattcctgagagcacgtttaagattctctgtcaggtggtgttccatgttttacatgagttgtctagctaccaagaggacaactggtttggtctatgggactacattgcaacagaaagcaaaacagagttcatgaagacagtttatatcttccagtgcttaacaatgcggctcgatgataaagagtttgtgattcatgcgattaataatcttcttccagagattcacagacacctaaacccaccaagagacttgttggtagatga

SEQ ID NO: 167039 - DNA, 1206 bp, Arabidopsis thaliana landsberg
tacatcggtcccttatgccttagcatccggaggatggctaagtttgatcatacttttcaccgtagcgatcacaactttctactgtgccattctcattaagagatgtatggaaatggatccacttcttagatcatacccggacattggctacaaagcctttggaaacacaggacgtgttatcgtctccatcttcatgaacctcgagctttacctagttgcaactagtttcttgatcctagaaggtgacaaccttaacaaactcttctcaaacgttggactcaacttcatggggcttgaattccaaggcaagcaaatgttcatcatcatggtggctctcattattcttccttcggtttggttagacaatatgaggattctttcttatgtttccgcgagtggtgtctttgcttccggggttattcttgcttctatcttttcggttggagcttttgaaggcgtagggttcaagaacaatgactcagaggtctttcgacttaatggagtcgctacttcggtgagcttatacgcgttttgttattgcgctcatccagttttcccaactctatacacttccatgaagaacaaacgccaattctcaaacgtaagttttttacataacggatcattaggttattcttgaccaaaactcacactaataattttgcatattttttttaacattttcaggttatgattatatgtttcacaatatgcaccttcatatatgcatcagtggcggtattgggttacttaatgtatggatcagatgttgaatcacagatcactttgaatcttcctactgataagcttagttcaaaagtggcgatatggactacattggtcaacccaatagctaagtttgctctcatggttacacctattattgacgcaatgagaagccggttttctcgagttttgcctaataaaagagcttctggatttttgctaagtacaatactagttactagcaatgtgattgtggcattgcttcttccgttttttggtgatcttatgagtcttgtgggagcattcttgagcgcatccgcatcggttatattgccatgtttatgttacttaaagatctctgggaaatatcaaagactcggattcgaaacattggtgctcatcggaatcactctaaccggtatcgtggttgtgataaccggaacttaccaagcggtcaaggacatttttggtcgattttga

SEQ ID NO: 167040 - DNA, 1071 bp, Arabidopsis thaliana landsberg
gaaagatatatgtgatagatacggtgagcacggtccaatgttatactccaagtgtatcgattgttttaaaatgttacctttggcatcagtcatatcaaatagcgtctacacaactcatggaggtctctttcaaagttctcgggtccacgaagagagcccgaatccatctttgttgttaggttctttagaggaacttgacaagattgagaggagacaagctggtgagaacgatgacgagaatataactcttaaccatgttttatggtcatgtccatggatggctgatggtctgagcgaaagcaattacaagggacttctttggggagccgattgcaccgagacttttctacaacaatcaaacttaaaggtaagtgtataacttgggtaaaaactgctctccaaattgactgatattccagttgtttatgtacaaacttaatcggtttgttttccatcttagatgattattagatcgcatgaaggccccgatgcacgagcagatcgagaagacatgggaaacatgctaagcggttactcaatagatcatgaagtagaatctggaaagctttgcacagtcttcagtgcttcaatgttctcacaggtcatttcccttggcacttttacaacaaacagagtccaaatgctacatattctgttacttttccaactggtttttcttgttatttttgctatcagggttcaagaaactatgaaaatgaaggcgcatatgcggttcttgagcctcccaacttcacagagcccgtatttgtttcttacacagtcgaaaatgtcccaagggtaagaaactggaaacttgtgacttttttagcattgctcttaggcttattcttgtgttttctttcatagttgcaacatcaaatcataagtgatggatcttcaactcaacaacagcaaatgtgggaaaatagaacaggacacggttttgcatcaatggggatttctaatccgccttcatggaccgttcctttgccaaatgacccgagtcagatccttcaacttcgagagcctcctcaagtctttgaaggtcttcctcttcccgacaacatccag

SEQ ID NO: 167041 - DNA, 1546 bp, Arabidopsis thaliana landsberg
attcccatacgtgtgaatatatctttgcatatgtcaatgagtcctgcatcaaaaatttaggtggagatcatgttgttcaagtagtaacgaacaatgccactaacaacatgactgctgcaaagttgttacaggaggtaagacccaccatattttggactttttgtgcaactcacacaataaatctgatggtagaaggtatttctaaacttgctatgtctgacgaaacagttaaaatggccaaagcgtttaccatttttatatacgctcatcaccagaccttgtccatgatgaggagttttaccaagagaagagatattgtgaggcctggaataactagatttgcatcggcttttcttactttgaaaagtttggtagagaaggaagaaaatttaaagatgatgtttgctagcaatcagtggaaatgtaaatgggcaaagcatccttaaggactcgcagcccgtaacaccgcaacgagtatgaaatttttggatggcgtggaaacgtgcttgaaagtttttggacctttggttagcgtacttagattgattgatggagatcaaaagtcgacaatgggttttctacatggagattagaagagacaaataaagagatatgtaaggcactaggcaatcaagcgaagaattacagtccaatacttggtaccattgatcagaagggtaaaaatggacttgatagtcctacttcattggatgacatattttttgaatccttattatttttataaggattggaatatccaattcaaccaaaatgtcattagtgctactttcaaatatgtggatgtcttttttccaaatgatcttaatactcagacgtatctcatcaacactgaacttgcaaagtatacaaaaaaagaggggaactttggacatccaaccgccattataggatgttctaagaatgaagaaaattatgatccaggtttgttttgttattatttttaattctaaatatgttccatgtacaatttactaataaattaaacttatgtttgttcagttcaatggtgaaatttttatggagttgaaattcccaaactacaaacaatggcaaagaagattttgtctttgaggactagttcatcagatgtgagcgtaattggagtacttttgaaggggtatttactttaaactacataagaaatattttttaatatattaacaaatatagtggatttgtctctcatttgttaaattttattaggtgcacaccaaaaagcaaaacagacttgatactaaagggatgaacaatcttgttaaatgtccaattcaatatgaaattgttggccaaacgaaagaagcaaaaggaaaagaatgtggatatactagttgcagattgtgctactcatgctcaagattggattgttgaagatgcttaagtggaagaaaacgtacccataaatgaagatttggttagggagcttgatgaatctgatcatgacgatgacgttaacattgattttgaaacgatgatgagcatggtttttagaaggagattgggtgatgacgattagaacctcattaaa

SEQ ID NO: 167042 - DNA, 444 bp, Arabidopsis thaliana landsberg
atgcaccgtttatcggcacatcaaagagatgagggcgacggcatgaaagagcgcggcatcatcttttctggtcccatggttcgagctttgctggaaggcagaaaaacccagacacggaggatcgtgaagcaccaaggcatagtggataacccagcctttcctgacttaaagatcatccaacttggaagcacgcaagcatggcttaacagccagccagatcatccgcaacacataagcaagttctccccctacggccagtcgggagataggctctgggtgaaggagactttctgcccagtccatgatggcgactacggcggaacgaactgggtggattatcgcgcaacccctcgatactcagaatcacaccccgcaggatgggagaacgctcccaatgatccggatgccttaaagtggaaaccatcaatcttcatgccccgatgg

SEQ ID NO: 167043 - DNA, 582 bp, Arabidopsis thaliana landsberg
tgcatcaatcctgactgttgcgtgacgacggaacagaaattcttcaacgagcagaccgccgacgaattgctcggatcaaaccaaagtgctgtcggcgtcccgccgacaggtcaaatatcggatagtctttccggcaagatgccgaaagcacgttatgatttcgtcctcgatgcgattgacaacacctcaaacaaggttctgttgctcgtgcgttgccgcgaaaagaaactaccggtcatcgcctgcggtggcgcgggcggacgccgcgagctgacttctgtgcgaaccggcgatctctcgaaagccagccacgacaagctgctctccgaagtgcgacggcgcttgcggaaggaacaccaatttcctgccgaaaattcagcgatgggaattgagtgtgtttattccgtggagaaaacttattttccgcagccagacggttcggtttgtgaaatgcgcaacgatacggaagatggcgcacggttgaattgcaacggcggcctcggctcggcgacgtttgtgaccggcgcgttcggcttcgcggcggcagggttgattgtgcggaaaatcgcggagtgtggatag

SEQ ID NO: 167044 - DNA, 1124 bp, Arabidopsis thaliana landsberg; identical to SEQ ID NO: 17505

SEQ ID NO: 167045 - DNA, 1704 bp, Arabidopsis thaliana landsberg
  unsure (1)..(1704): unsure at all n locations
ctattgttgatccatgggattcgatacaaatggggttctgctccaatctccagtgaaggacatgttgatagatttgtacttaaaacagggagatgtgaaacatgcacgtaaactgttcgatagaatttctaagagagatgtggtttcttggacagctatgatctcgnaggtttctcgatgtggatatcacccggacgcgttgttgttgtttaaagagatgcaccgggaagatgttaaggctaatcagttcacttatgggagtgttttgaagtcgtgtaaagatttggggtgtctgaaagaagggatgcagatacatggtagtgtggagaaagggaattgtgcagggaacttaattgtgagaagtgcattgctttctctttatgccaggtgtggaaagatggaggaagctcgtcttcagtttgattcaatgaaagaaagggatttggtttcttggaatgctatgatcgatggatacaccgccaatgcttgtgcagatacttcgtttagtctgtttcagttgatgctcacggaaggtgaactacttaatacaattcttcgtacatatttcaaaacttatgtgactcagtttggttatatagcttcttgtgttgttatgtgttagggaagaagccagactgcttcacctttggaagcctcttgagagcttctattgtcgttaagtgtcttgaaatagtcagtgaattacatggattagcgatcaagctgggttttgggagatcaagtgcactaattaggtctctggttaatgcatatgtgaagtgtggtagccttgccaatgcttggaaactgcacgagggcacaaagaaaagagacttactatcttgcactgctctaattacaggtttttcacagcagaacaactgcacaagtgatgcctttgatatcttcaaagatatgatacggatgaaaacaaagatggacgaagttgtagtatcctcgatgcttaaaatatgcaccaccattgcatctgtaaccattggaagacagatccatggttttgccttaaaatcttcccaaatcagattcgatgttgctttggggaattcgctgatagatatgtatgcaaagtctggggaaatcgaggatgcagtcctggctttcgaagagatgaaagagaaagatgtgagatcatggacctctttgattgcaggatatggaagacatgggaattttgagaaagcaattgatctcatcccagaatggagcatgaaaggatccaacggaatgacgttacatgtctttctctcctctctgcttgtagtcatacaggacaaaccgaactaggctggaagatttacgacacaatgatcaacaagcacggaatcgaagctcgagaagagcacttatcttgcatcatagatatgcttgcgcgcagtggctacttggaagaagcttatgcactgataagaagtaaagagggtattgtaagtcttagctcatcaacatggggagcttttcttgatgcatgcaggcgccatgggaatgtgcagctcagtaaagtagcagccacgcagcttctgagtatggaaccgaggaaaccagtcaattacatcaatttggccagtgtgtatgcagctaatggagcatgggacaatgctttgaatactagaaagcttatgaaagagagtggttcctgcaataaagctccaggatacagccttgtgtattgaactaagagaataa

SEQ ID NO: 167046 - DNA, 1857 bp, Arabidopsis thaliana landsberg
  unsure (1)..(1857): unsure at all n locations
atgaccgtatattgtttaattactattaaagcgggaaaattcttccacttcccccacgactcccaaggcggttccgtcatcatcactggctcgcgtgtaggtaaattcactttactctttccttgtcattttattttttacgcttctctctcaaagcaaagttcttttctttctctgaaccttcaatcttcctactctctacacaatgaattctgaaatacaaagacctgaatccccctctttcgacgacgacggctccagtaatgacctctgcacctgaccgaatgacatcacgggtccccactatcaatccacatgcactctccaatctcttaatcgattgggcgagctctatcggattctaatcgaagtaatgagggatttccagatgccggagccgaccgaatcaccggaggagcactgacccgggttcttttgcgtgtacgagatttacttcaaagggtgtggcttgacttttcctctccccgaagccctcgtgcgttaattatcggccctcgaaattgccttaccccaactaagccccaacctccttcgtaccattctaggaattatcaccattgcggcggaggctggatacgtcatcggggttcccgaactgaacgaacttctcagtgtgaggagttcttcgaagaaagtcgggnanttctcgacttatccgaacgcctatagaaatctcatctcgcatcttccgaataaagacgagaactggcatcacccgtggttcctagttaaaaagagccctgcctcgagcgggaacgtgccagacttgctctccacgaagtggatcaccaagcccggtagttattagctcatgcatatgagcttcattttacttcctgccttatcggaccaattctatttttccacttcgcagtttttattgcacctacccttcctactactgagttcggcgaattcttcaagattgccatcgaaggggaaaccctttggaactccttcactcttgaccggttcatagaagccaatcacaagcttaggatgagtccacccgggaacctacttccaacttccaccacctccacctctacctcacggaacttctgccagggctatcgcttctcgtcgaaaaacgttgtccaagccgatgacagaggcttgtgaggcgaacaaatcatttctctagtcggttgtcgacaagaaagaatacagtagaacactgctggtcgatgatggtagcgccgaaggggctagatctgctggtgccttcagacccacacctcatcgtgaaggtcatagcagccgatcatcccacaagagaccaatcaactcgtcgtgactcacctcggcccacttcccgatgtggactcagcagcgagccaattgctgacctgattcggaagaagagagacagaccatcccgcagcagctcctcccccaaaagagacaagtcgagggcccgaactgaccgctctcctcgaccgtcgtcgccaccccgatctatgggtcctcctcctccagtcaccatatctccctcgtccggataaggaggggaaaaagcagagcggagtgctatccctcggcgggatgaaactgaggtctgagatgccggaactaaagctgttttggttccttagacctagtcgctcacgggttagaaatttcttcccatttttttttgttatcacattttttgccatttctgcttattgactcagcgtccttcgaccggtccgacctctttttttttaaacagcgatgaaaacggaggggaacgtctttcgatgtttcaaaacccgaaaagacaccatccttctaaccttcgatagatggcataccgcaatccgcgagccattcctactccatgcccatcactca

SEQ ID NO: 167047 - DNA, 2882 bp, Arabidopsis thaliana landsberg
catcgtgccatcctattaaaggggagccatgaacttacatagtaaaagagaaagctagactgttttaaacaagaaacatttgtccaaaatattggatattgacttgcttaccatgactatgcagaaattggctgattacataggtttaccatgtcggatagctcgaggttgcagatactgtaaagagagccaccaatcttcttgccttgtcaagattgacgatgacaggaagctttcaaggtttgatagtgttaaacctttaaagccttcccattggccgtttttttgtctccctctctatgtacttaactacagccagattcctcagtgggtttacataagtagactctcaggttgttagcaaatcactatttgatgcctccacttgtggactttcagggcatggtatttaggaagtctatacctgcttctatttaaaacacctattgattctttatgttttactaacagatgggtatctactctccagggggtctacttgtgtatgtccttgattctgtgctttacaaatagttgctagctctggagtaccattgagttgttttgagcttatgttccacattttgagtaatacttgatatcatttctcaacagggaatatgtagttgacctcatcggggaaccaggaaatgtccatgatccggattcctctatcaacggtgaaacacagtgtcagattccttcacctcttcaaatgagtcatcttacagatttttccaggccttgcgtgcatagtacatctccttgtcagactgtagagtcaaagacttcacgcactctttctgaaaacattcaacgttcaggtaggctgcacttagctgaatatgtaatgtcataattatacgaaattgtcggtccatagtttgtaatacaatcagctaactgaattcttgtagggagtcaaggccaagtacacaaagaatttgagttgcctgataacgcagggacagtatgttgtgctcatattgatcaaacttgctgtgcaaaagtatcatcaatggttttgacagaatctgttcttcgagctctaccacttgatataccaaaccttagtgaagaaaagattgcccttaagaaacctgcaaagaagaaaccgttctattagaagatccaacagctatgaagcagccaaacttatcagttgaaccagagatagtagaggctgacactcgaaaagataaaaaaggaaggttacctgttgacgccatctcaccttacttgactattgaaccttctttggcatcagattggctggaggtctcatggaatgaattacatatcaaagagcgtgtgggtgctggtatgtccttctatgacttttgagtgtacaaaagattttctgatgaagcaccatgttaacaaagtctcttatgaaattttctctattatttttttcaggatcatttggaactgttcatcgtgctgagtggcatggatcagtaggtttcaactctaaaaaagatcatcatttaagcttggagtagttttgcatgcacaaatgctaattatgtttttgtttatgaaggatgttgctgtcaagattttgtctattcaagatttccatgatgaccaattcagagaatttctcagagaggtatgtaagcaagcggttttctctctttttataactaacttcacttggaacctctctgaaatatctcaatcctgtgattttgattgaaggttgctataatgaaacgtgttcgtcacccaaatgttgttctcttcatgggtgctgtgacagagcgaccccggttatcaataataacagaatatttgccaaggtaaacctatctcacatagattttcttgaaacgcttacattactaagtagcttatgtttccatcttactccttgagacagaggcagtctttttcgccttatccataggccagcttctggggagttgctagatcagaggaggaggctacgtatggcattggatgtggtttgtgctattccccattatgttaatgttttgatatatttctaagttaaaacatataaaaaatatatgtgtcctttcttggaacaggccaaggggctcaactacctacactgtcttaatcctcctgtagtgcattgggacctgaaatctccaaatctactggttgataagaactggacagtgaaggtaacgatgttaaaccaataaaaaaaatggactgctacaaagccttccatcgtctgtttctgtaacatatcaaacttgaccttgctcctgtctcaggtttgcgattttggactttcaagattcaaggcaaacactttcataccatcaaaatctgttgcaggaacagtaagctctcttaaaatttaactactggggatatgatggaaaaatatgttctgacatgtgaacttcttctctttgatatgttttaacagcctgagtggatggctccagagtttcttagaggggaaccgacaaacgagaaatcagatgtttacagtttcggagtagtcttatgggagttgattactttgcaacagccttggaatggactcagtcctgctcaggtaaccaacaatctctcccctttggttttcacacatgagttatagtacaccattagtattagagttttagttttagtattatcttttgagtcttgcatggtctggtgattaggtggttggagcagttgcattccagaacaggcggcttataattcctcccaacacctctccggttttggtatctctaatggaagcttgctgggcagatgagccgtctcagcggccagcatttggtagtatagtggacacattgaagaagctactaaagtctccggtgcagctgatccaaatgggtggagacaaaggggtaattccaactaaatcagctcccatactatag

SEQ ID NO: 167048 - DNA, 1655 bp, Arabidopsis thaliana landsberg
attttgagcgacgaatgacgtctcgaaagaaatcggttcttgacaacacttctccaatgatttggaagactgtttctggtaaattgatcattttgtgatgattttttctatgtgtggttgagaataatttgattttttgggtaacctacaaagaaaatttgacattattcacatgattacgaaagcgatataaatcgtactacattgtcaaagatttgtgtatttttttctttattttgatattgacttgtctcttcgttaaggtctttaatcaaatctagggttttcttgatcccaagtttcattgctaagcaatgtaaagtattgattttgattttctggtaaatttgttagagagaaagtcaagtcctggaattgaaggcttgaatctatcgagttttgataggcaaatggcaccaactacagagattcgtgaactcaggtttgaattatgatcaatctctctgtttttgttttcagattcaaatactctgtgtttttttcaatctcagggtgtttctagctacgtggaacgtaggaggaagaacaccaaacaatgatcttaacctcgaagacttcttactcgttgaaggcacagcagatttatatatctgtggctttcaagagattgttcctctaagtgcaggaaacgtattagtagttgaggataacgagccagcagctaagtggttagctctaataagtcaagctttaaacaaaccgaaacaggaatctgtttattcgaatgcagcttactctgcttcaagaacaactacttgtagtagtagtagttgtggtagtgaagaatcaagagcaccaagtagtctaagtttctttcaaagaccgaatcttaaggtcttgagcagaaattatagagtcgattcaagtcttttaaagacttgtaattgtccggttatcgatacttcggttggttgggaagcgaggagatcgaaaaggtttagtgatcctagtacagatagtagtaacaatgtggagcctgagaactttagggttcatgagaatttcttgtttgatgatgttcctgcgactaccaagatgccaggacaaatgagttatcgattgattgcgagtaaacaaatggttggtttgtttttgtctgtttgggctagaagagagttgattccacatatatctcatcttagacttgattctgttgggagaggaatcatgggtcgcttagggaacaaggtaaaacatataccctaataaatcaagattctgacacaagcgaaaagagaatctgaacctcttgtgtttttattgacagggatgcattgctataagcatgtcattgcaccaaacgagcttttgctttgtgtgtagccatttggcttctggtgagaaagaaggtgatgagctgagaagaaacgcagacgtagctgagattctgaaacatactcaattccctaaactcaccaagaaccctaattgtcacgcacccgaaagaatcattgatcatgagtatgtttccttgaagtcataatcattttcttattatactagcatatagaaactgctaaaagactctgttttggaatttgcagccgagtgctttggctaggagatttgaattacagagttgcattaacctatgaagagacgagagtattactagaagacaatgattgggacac

SEQ ID NO: 167049 - DNA, 1009 bp, Arabidopsis thaliana landsberg
atgcaatttgatgagtctgatgctagggtttggatttggtttgaaattaggcgtgaagatgatatagtggagcttttatggcaaagcggccaagtagttggaaccaaccaaacacatagacaatcctacgatcctcctcccattctccgcggcagcggaagtggcagaggagaagaaaatgctcccctttcacaacctccgcctcacctgcatcagcaaaatctcttcattcaagaaggcgaaatgtattcgtggctacaccattcttaccgccaaaactatttctgctcagaacttctcaactccactccggctactcacccgcaaagttccatctctctggcaccacgtcagactatcgccacgagaagggcggaaaactttatgaacttctcgtggctaagagggaacatatttaccggcggtagagttgatgaagctggaccgtcgttttcggtggtaagagaatcgatgcaggtaggctcgaacacgacccccccttcttcttctgccactgaatcatgtgtaataccagctacagagggcaccgcgagtcgagtgtcgggaactttggcagctcatgatcttggtcggaagggaaaggcggtggcggttgaggcggccggaacaccatcttcaggagtgtgcaaggccgaaacagagccggttcagatacaaccagcaacggagtcgaagctaaaagcgagagaagaaacccatgtgagttagtactcccataggttaacctaagcacccatgtcggcgggtgttactcactttaccggtgcattttatcagtcaaggcttatttttttttctttgtttcgtggtgtacagggaactgaagaagctcgtggttcaacgtctagaaagagatcacgaactgcagaaatgcataacctcgccgaaagggtttttatatttccattggagtttcaacaatggactctctgtttcatttcctttaaaccgtacctttgtttgtaaaacttgtttttgtttaacaata

SEQ ID NO: 167050 - DNA, 658 bp, Arabidopsis thaliana landsberg; identical to SEQ ID NO: 61479

SEQ ID NO: 167051 - DNA, 963 bp, Arabidopsis thaliana landsberg
aagattacatacctgagaaagatggttaaaccctgttggagaataggtgccggtatggagagaagtaagatcaatcccacaaaggttgatggtttgacatggtacaaagatcttggtcttcacacctttggagagttttccatggcaatgatccaagccaacagtgtgatggaggatcagtgccagatcgaatcagggccgcttacattcaacaatccgacagttcaaggcacatttgttggagtttacgatggccatggaggtccagaggcttccagattcattgcagacaacatcttccccaagttaaagagtaagacaccgaatttttttatttcctttattgttgaatctgccaggcacactaacactggtctcacatgaacaaagtttgcgtccgagggtagggagatttcagagcaggtgatcagcaaagcatttgccgagacagacaaagattttctcaagacagtgaagaagcaatggcctacgaacccacagatggcatcagtggggtcatgttgcttggcaggagtgatatgcaacggattggtgtatattgcaaacacgggagattccagagctgtgttgggcagatctgagagaggtggagtgagagctgttcagttatctgtagagcacaatgccaatcttgagtctgcgaggcaagagctatggtcattgcatcctaatgaccccaccattcttgtgatgaagcaccgcttgtggcgtgtgaaaggcgttatccaggtaaacattcatacatgataacgcatctgataacctgcacagagttttgcttcatcagtttctatgaaatacaaaagcttaagaaaatcatatattgaagccatatcttgtgtaaggatgtaaacctgactagcaaatgtgttatgacctttaaacagatcacaagatccataggtgatgcatacctcaaaagagcagagttgaacagagaac

SEQ ID NO: 167052 - DNA, 2392 bp, Arabidopsis thaliana landsberg
atgagaaacacgagacctattcatgttaggaataagagtacggaaccaggaacaccatcttcgcctatgatgacgtctcctctaatgcatcgtcatacacgttcaggatcaaatgctgggccagcttcgaatgctaagaaagctcagacaaaagcagctgctcagagacttgcggctgtgatgtcaaatcaaacaggggacgaggaagatagtgatgaagacctttcctttgactataatgctaccggaacagggagcattggactcgcagctggaagatctcatccttctcgctctcctgtggtaattaaaattaacagactcactttttcactgtaatgaagggattttatgtgacagagttttctggattgacagattaggaatcctacggcaaggcgtcaacagatggcaactccacagttagttgatgaggacaatgaggatgatgatttttcagtggatgtaacgagcagtagaccaagtattggacttcctggtggaagagcaatgagacctcagtttcctgtgatggtcagtctagttttaagttcttttgcctgccaagtgtatcttggtttcagctttcatatgttgttactcttttggtgcagacaaaaattgcacctccgagacgtacacaaccaacaaatgaaggaaataagaatgacggtaatgatgatgatgatgttgtttctatagattatacaattggtagaccaagtattgggcttggaagtgggagggctatgcggccacaatcttctatggtattgatcgactcttgaaacttgttgtttctaggtttttttattattttcatattttaactatttctcaaaatttcaatattttggaaagcacagaacaaaacccaaccacaagggcgtccggtgatggcagctcatcagcgagcagatgaggataacgaagatgatgagactccatatgtttatacaagcagcattccaagtgtaggacttcctggtggaagggctgcacggtcacgttctcctctggtaattagtttgttaaacacactcgttttgaatcttgtagttgtatagcagctataagaatgttgagagtcatgttgttagtagtgaaatttctgatatccttactattcttgctagttattattcgttaaacttgatatttcactttgtgtattacagactaaaaaccctccactgaggcatccacaggcaatagctcagccaccatccaatggagaaagtgatgttgattatgatgagtcgtatactagtggcatgccaagcattggacttgcaggtggacgatcaatgagacctcgcactcctttggtaattttagttcgtagctattctgtctcacattgatactttctctatttgaacttagtctctataatgtcccctctaatatgaatcctgaactagtacatgttttactacaatgatattttgctagcttttcagaaatctgtcattcaagaacatgtttaatattccaaaatatcatagtactagaaaactgtttattggtgttttgaagtttgtaaaagttttatcagcattaaccaggaaagaaaagtgtgtagttaacgtttttgagtatatacatcagcattaactttatcacgcctcaaagtgttttgttgcttttacgtcttctaaaacttactttaatttttcattagtcaattcgtactaaggaacaacctcagaccggacttccaacttcaggtagccgatcttcattatatgaggattccacagaatcttcagctatgtcaactttgacgcatccatctcagacaacaaaccaagtggagcaatctccatctgctcgttctgcaatctctaacaaatcatcccagtctctcactgctatggaccaacctccatcagctcgttcatctttcaatggtcgtccaataaagacagttcctttaatgtcatcttctgtgcctatatcactcaaaccagtgactcctgcatttcaatctaacacgccaaccaatcttcgaaaagataaaaggtaactagccatcattcttcacattcacctactcatttattgtcagtgtgtccttaattagtctagtgatttctgtctattagcaggttttccatggatttgggaagctcaggcaacttaagagagttagggagccaacgttctacttcagctttgcaagatgaggtttgacttctctagctcatgccttttatattttagatttcttaagttcataaatttttgacttttcgtttcatttcaggttgatatgctacaggaagaaaatgaaagtttgttagaaaaggcgatgcccagaaattttcacagttggcgtcaagatgcattacattctttgtgaaagtagataatcctatctaaaattttt

SEQ ID NO: 167053 - DNA, 314 bp, Arabidopsis thaliana landsberg
atggttgcggaaagtgataatcgtgatctgacggtggatacggcggcgagctgtctgatgttgttatcaggaattggagaacacgacggaagaaagaaacgtgttttccgatgcaagacttgtgagagagacttcgattcgttccaagctttaggaggccaccgtgcaagccactcgaaactaaccaatagtgacgataaatcagttcctggatcactaaagaagaagcctaaaactactacgacgacgacggctcatacttgtccgatttgtggcttggattttccgatgggacaagctcttggtggtcacat

SEQ ID NO: 167054 - DNA, 2287 bp, Arabidopsis thaliana landsberg
atggttctcctacgtgatctccgaggtattactaccaccggctcggggtgtgcgtcctggaatgacacccgaacagaaatatcttaaagattgatttccgaggcgttcttggagtctgtttggttggctcggttccttcgaccaaatctgaccccaatagtttacccccctagctcattgtctttgtctgaaggcgacgagtttcatgagtttcgtcgccccagccggccgtacgtcttctctattcgtgacctctggcgtttcggcttcccgaggtttattcgacggtcaaacttccatatatgcgtgaccgccttctttcttgagaagtggaaaagtcttctttattcccgaggtttgcgcgcgtgctttcttcttccgagcttacgcgctgttgatgtgttttaatttcttcttgggacccaacgcacctttatatctctatatatatcgagttgctcctcagaattcatttatctaaagtttccgaagaaaaatgtgaggtttgcttctttttctctgatcctgatttctttgcatcgtttttctttttcctgtagccctccgccgttgtttagttagcatttgatttttccggtcataaaaattccatcctccggtcctcatttcgtcagacagttccgagccgaggatgagtgcttcttcttccaacgcctctctctcggcctccacgggtagccttgctgattccagggattctaatcaccgagatgatcttcctccgatttataaacgcagaatggtctagacttcgtccgaaggttctgatgctgcatcgtcttcgaacgcgtccgaggtgactccctttacggctcgggagaatgccactgctgatatcgctcgtgagttggattttccttaggatcccgagccatcccttatccgaagacaccgcgctccagtcgctaatgaggctggaacgtcgaattggcaaaacgcgcccgagctgttttttccggaggtaaagatagagcatttgttctttgggctggacgagacggagaatattggtcaagcgttcgagcagtcggcttttgagaaagccaaaaagaagaaacggaagaaaagcaagaagatggtgaggtcggatcctcccgcctcgtccttgtgtatcgagcggtcattgtcggatctaagagctcaattcggtttcgaaaatgttactcttcgcgttcccgacccgaggctgattccccttgagggctttttcactttatacgacggatttttctacctttgctttctcaggttgcccatcgcgaggctgattctggactatgtgatttcgtatcagatagccctttcgcagataacagcccgatcactaagacatcttatcgggatattggtgcgtggttatgagactgagaagagggtcgcgcttgcccaccttcgaaattacttgcaaatccggcgagttccaaaatctgaggtggataaatattacatttctccggccaagaacaaaaagattatcgaaggtttcccgagcaaggatgatgcctacaccaacaaaatggggacttttgggtagtttagatgttctgtgattgagttgtctgtgcccgaggtgattaccatgatttatgctaatatgctttattttgttgatctttctttgcagatcgcccgattaggtttctcgaaccgtgtcccaataacctcatttcctgtcatcgagagctatcggcccgcaagtgtcactggacaaagcacttctctcgagaccgagtttaacgagtgcttaaattacttcacggcatttgttctccgtccagctcggaatcctctgaccaccgaaccgagttttttgtggacatgcagacctccaaacccactattcgagaggtttacgagaaaaagaggattgccgccgagagggaacgtgcggccgatgagaaacacgtcgaagaagagcgcggcgatgctgaaggtatagatgtcaatcccgagccttccgcggctcgggaagttattccttagactgctgcgcccgctgaaccgggacttgctgagactgacgtcgtcggtctggttactttctgagccgcttttgaatatggtttcaggctatgggttcaatgaatcagatggtccaatcttacgattagctgagagcaatctgaggatggattttgaggtcgttcgctataagcgaatgcttgccgaggcgaggcggctaagagacagcgaggtggcttgggctgcgcagaaggccaggcgagaggcttcaaaggtctttctcgctaagtttaaggtggcctag

SEQ ID NO: 167055 - DNA, 1962 bp, Arabidopsis thaliana landsberg; identical to SEQ ID NO: 8730

SEQ ID NO: 167056 - DNA, 599 bp, Arabidopsis thaliana landsberg
ggtaacgctccgctcggcgccagtcggccagttgggctacccgttcgccgtgcaggtgaacgtgacctaccgcctcgcggcggactcagggctgcacgtcaccgtcaccgcgtccaacaagggcggccgttccgcgccgtggggcaccggacatcacccttacctcacgatagcgaccccgacggtggacgactgcgagctcaccctgcccgccgatcagtggctcccgacagacgatcgtggtatcccgtccggcaagccgcaggacgtggccgggacggacttcgacttccgcaccgagcggacgctcgcgggaacgaagctggaccacgcgttcaccgggctggaacgtgactccgacggactggcgtgggtccacctgaccggcggcggcaggcgcaccagcctgtgggcggacggtgcctacggctggctgcaggccttcactggcgacgcgctcgaacccgggatgcgccggacagcgctggccgtggagccgatgacctgcccgccgaatgccctcgccagcgaaaaggaaactggtggtgctcaagccgggcgagtcggtcagctgccggtggggaatcgaagctcgctcc

SEQ ID NO: 167057 - DNA, 560 bp, Arabidopsis thaliana landsberg
tctagcttgattatactctatgccattttctctttatcttctctcatgctaaaatctgaaggaacagagcatatagttggtgacagcaatggctgggaactctttacaaactataccaactggacacagggaagagagtttcatgtcggcgatgtcttaggtaatttttctaactcctgtactacgatgcctaaatacagcagaaccaatgttgcaatcccatacatactatctcaccaaaaaagacgatgatttatgtcaattctgcctctgttcttcagcagtcttctgttccatatcaatagtaagaaaacatgataagttatttccagcataacagcatttaccttgctaagtctgtctctcttcttcaacagtattcaactacaaaagtgaccagcataatgttatgcaagttaactctacagcatacacagattgtggattagacaactacacaactctcttcaccaaaggtaacgactcaataatcctatcagaagttggaaagctatggttcatctgtggagtggatgatcactgtgtaaatggcctgaagc

SEQ ID NO: 167058 - DNA, 1444 bp, Arabidopsis thaliana landsberg
atacgtataatggatgaagcattgaggtttacgcggaatcacttggagtctttgacaagtggtaacgtatccagtgcaagtccccacatcttgaagcatatacaaaactcattgtacatacctcgatactgtaacatagaagtactagtagcaagagaatatatatcttactacgaacaagaagaaggttacaacgagatcctgctaaagtttgcaaaacttaacttcaacttttgccagtgtcattacatccaagaaatcaaaactctcaccaagtgacattctcatcttcaaccttgttcataacattggtctcgatctcccaattgattttctttttatggttgcagatggtggaaggacttagatcttgcatctaaactaccttacattagggatagatctgtagagagccatctcgggggtctgggaccgtacttcgagccacagtattctcttgggaggatcatagtggctaagaccatcatgataatcgttgttgcggatgacacatatgatgcacatgcaactatacccgaagctacggttcttacggaatattttcagaggtgctatatatatgtgtgtgtgtgtttattcatatctttaaaatttattcaagcgtgtgaaaaatcttggcatgaccaggttgaatattggtgccgatgataaactatcaggctatttgagaatcgtcctcgaaagtgtgtttaaagttatgggagagattgaacaagaaatgtcaccgaaaggaagatcatacagcgtgaaacaagtgttggaaagggtaatgtataagctgaacatgaaactaaccaatgtacatgtatagttagtggactctaattagttctttgattccaaacatcagttcaagatcattgcgaaggcgtacaaacagttgacagagtgggcacggaaaggccacgtaccaacctttgatgagtacatgaaggttggattggtgacagctgggatgggtgattatgcaggatattgctttataggaatggaagatatcaatgagaaggaagcttttgagtggctcaattccaatcccctactcatcgacgctctgaatgtactgttccgtatagcaaatgacgtaggaacctacgaggtacaccgcaaatcttagagatctcattggttttctagtggtttctgttttcctcttcttttagtctttcatgaacaaatgatatttgtagaccgagataaacagaggagaggtggctaatgggctcaactgttacatgaaacaatatggagtcaccaaggaagaagcatcccgtgagttgcgtaaaatgtacatatacaacaaaaaagtggttgtggaggagttcatgaactcacatgaccgtgtaccgcgccaggttctgctgcgatgcctaaactttgcacgcctcttcgatgtgatatacacagagggtgatggatacac

SEQ ID NO: 167059 - DNA, 393 bp, Arabidopsis thaliana landsberg
atgagtacaaccgaaatactgttcttcttcctctccgcacttgctgtattcagcgtttttatgttgctggtgagcaaaagtcccgtgcacagcgtactatggctgaccgtggtgttctttgccatctccggtcattatgtattgctgaatgcacagatcctcgctatcgagaacctgatcgtatatgcaggcgccatcatggggttggtcctgttcgtgatcatgctcatgaacctgaatgcggaaaccgaaccccagaaacatatctggatgaaactggccggcgttatttccgggggctgtttcctgatggtactggtatcgcttatccggcaggcgagcgatatgcaggcaaaaacggtgctgatgaaaacaggtaatatcggtttgatc

SEQ ID NO: 167060 - DNA, 843 bp, Arabidopsis thaliana landsberg
ctctcgctctccatcacaaggaaaaacaaactcgatcttcttcatcgtcaataccattaaggatgagatccttataaaccctggcactggccatcgaaccgtaacgtccactccgctttcctataaatcacttcccatcaattacactctccctagttgtagtcaccaccacatccaatcgttactccatgatcgactccatagagacgaccattggttgtgcgatcacttagtcccaaagatctcaagtgctatcagctcaggttttgttgacttgaccgtgagcgtcgcggttacttacaagtacgtccgtgtcgacgaggcagcattaaagatatcgaggatggttctacaagggttcatgagcgtagaggaaacaaagagtttgaacgcagagtcgtgttccatttgtctccagagtctagtctccagttcgaaaacagcacccactcgcatgagttgttcccatgtcttccacaatggttgtctcgtggagtggctaaaccgcaaaaacacttgcccgatgtgtaggactgtgctctatgatcgatgatgatgattggaacagaggatgcaaattagggtgtcatctagctactctattgcattttatgaaatttagttatcaaggtttaaaattctaaattcaagaagaggtttgaaatttgtaatagcatcattaattgtaatcacataaactctaaactttgctgtttttaagttcacatgcaacttatagactcatcaatgttttcctcaacagactacacagcttatattgtaggtaagtcttgttagtcttacacagcttagatcatgctcattgcctttgtcttcttctct

SEQ ID NO: 167061 - DNA, 3284 bp, Arabidopsis thaliana landsberg
tgttcttctttgtcttctcaagaccagactcatctttcttcttcctctgtctcttctttcctactttgtcattaaaatcatccgcaggttctgtaaaatcgtcgagatcttcttcaacttcgtctaccaattcaggaacagaaatcgactttttaactaatctcctccctgtgaatttcgattcctcgttctctccttcaagttctttcccccattcatcgttagaagagtctaactcttgcatcctgcacataagtagagaaacaacaaggaaaacgttaaaaccctagatattgtaatgaagaactaaaaaattcgatgtatcgtgtagatcaaacataaaagtagctatgtttgatgtttctatggatcgaatgaagtattgatgatcaaaaaaacctaattctcagtattgtactcgaacataaagagacgaaatctacagaaccgcttctacgatacagaaacgaaacttgaaaaccctagttctttgcataaaccgtagatttcatagaaaacaaaaggaagaagaagaagaagaagaaaacattacatattctcttcgtgactcatgttttgtttcgctcgctgtgttgttgaattcgcacttcgcagaatgtttgatcagaacaagtcttttatagaagagtggccgccgtttatatgtataacaacttagcttcgtgaagtccaagctatcggattgtgagtttttttttctgtcagcaaaaacgcggagagaaaaaacttatttttgaaaaaatggaaattttctatattccattcttttactccaataaagattttctcaaaacaaaatttattttaattgagtaataaatgtaactatagattctttaacatctttagtgataacaaacaatgtttagaagagagaacgaatgtaagttacatttcaataattatctattttgaaaccaataaatttaaaatttaagaacttttacatttccttttggatttattcactaattaatatttttcaatctccatcctaataaaaatgatgaaaatcaataaataaatacattttcattggaaaaaatatcatacaataaattgtatctgaattcatttgttcacatcagagctgacctttactcaaatttgcaacaatattgcaagtatattgcgagggacattgcagttaacgtaaagtcgtcgcaaatttgcaatggaagcggtcgtcgcaaatttgcgaggaaactgcgggaaatggcaaggaatttgttacggacacgtgtttttcgcatctccgtagcaaatttgcgacgaatttacaacgaacgttgtcctagcataatttacgatggaattgcaaggaatagttaggtacgcacgttttaaataaaaattagtaggtgggtggtaggtagattggtaggtgaaatccctcgcaaatttcatgcaattccttcgcaatatttttggtttttcccctataaataccatatgttagttgacggaaaatcacaactcaaacaaatacaaacacaaagaaaaaatataaaaacaaacacaaaaaaaaaatgtttggaagcggtggagaacatgatatatattcactccgacagtggatgtataatcatagagattcagttaccggtgatgtcacgaaggagtttaccgatggattgcgcgggttcatgtaccaagcaacaaatgaatcatttgctcgtgcaaatggttcaatatgcccatgtcgtaagtgtctcaacgataaatatttggaatttaatctagtgaagaagcatctatataatagaggatttatgccgaactattatttatggttgcgtcatggggaaggttgtagagatagtgcgggcagtagtaatatgaattatggtgttgttgaacctactgattattatgaaaattatggtcatcatcaagaatctgatcaagggtataaccatgaaaatagatttcatgatatggttacagatgcatttcatgaaactactactgcatttcatgaaaatattatcgaagaacccaacgtagatgcacaacgcttttatgatatgttagatgctgctaatcaacctatctacgagggatgtagagaagggcaatttaagttatctttggcatctaggatgatgacaattaaagctgataataacttaagtgaaaattgcatggattcttgggctgaacttattaaagaatatttaccagcagataatatatcggctgagagttactatgaaatacagaagttggtttcaagtcttgggttaccatcagaaatgattgatgtatgcattgactattgtatgattttctggaaagatgatgaaaatctgcaggaatgtcaattttgcgggaagccgagatatcagactactggtggaaggacgcgagtaccatataaacgtatgtggtacttgtcaataaccgatagattgaaacgcttatatcaatcggaaagaactacggcgaaaatgagatggcatgctcaacatacaactgcagacggagaaataacgcacccatcagatgcaaaggcatggaaacactttcaaacggtatattctgactttgctaacgagtgcagaaatgtgtatcttagcttaaacacagatggatttagtccatttggtttgtctgggcgacaatattctctttggcctgttatcttgacgccatacaatcttcctccggatatgtgtatgtaaagcgaatttctattcttaagtattctagtgcgtggtccaaagcatccgaaacgagcgcttgatgtcttcttgcaaccgctgattcatgaactcaagaagttgtggtatgaaggtgtacacacgtttgattactcgagcaaacaaaatttcaatatgcgggcagtgctaatgtggacgattagtgacttcccggcatattgaatgttatcgggatggacaacgcatggaagattatcttgtccctactgtatgggtcgtaccgatgcgtttcagctaaagaaaggcagaaatcatgttggtttgattgtcatcgtcggtttcttcccctacatcatctgtatcaaaggaacaagaaattgtttaggaagaataaagtagttcgtattcctccgctatgtttttggaaatgatttgtttgagcagatcgattattatggtgctcatgaaatatgcaaacgtgaggggtaattaacatactacaacgaatatgcctgatgaatatggaagcactcacaattggcacaaacaaagtttcttttggcaaatcccatattggaaggatctcctcttgcggcataa

SEQ ID NO: 167062 - DNA, 415 bp, Arabidopsis thaliana landsberg; identical to SEQ ID NO: 64293

SEQ ID NO: 167063 - DNA, 4376 bp, Arabidopsis thaliana landsberg
atgactgacagagtcatcagagctgatgtagaaggagttttgagagttgaggatgggcaagcctacaatgaggctggtcagagattggatgatcatggactcatcctacctgaggacgccaatgaggatcaagcgcgcctcaatgcgcaaatagctgccagagacgcagtagggctcgctgtcgatcgacataacagaggtgtcgatcgacaccatcgggagcagcacgacgacgcgattggtgtcgaacgacacaatagaggtgtcaatcgacaccaacaccagattcctgcagctattcctccagctacggaaccacgtcgtactcttggggatttcaacaggccagacctgttctatgctaatcgatcagcgattgtacccccaccattccagagaaacgactatgagctgaagccttgctactttgctttagttggccagcatccgttccaatgcttatctcatgagcagccaatggatcatatcgagcgatttgaggaccttgttgtcagcatcaaggctaatggagtctcagaggactacctactgtgcaagctcttcccttattcacttgttggggaagcaacttcttggctgaagcaacttaaactaggttccctcaagacttggagaagcatcaagatagccttcttgaacaatttctacgatgatgctaagtatgaggagttgagaaacaagctgtctacctcacacaaggttcagctgaagctttcaaggctgcttgggttcgtttcaaggagtaccaacgagactgcccacatcatggtttcagtgaggtacaacttcttggtacctttttcagaggagttgattggagataccagatggctctagatgcagcgagcaatggtaacttcaatgcacgttaccccgctgatgttacctctcttatagagaatcttgcttgtagcaacaacactaaaaaagctgacttcgagaggaaaaagatagttgaagctgtttcaggcaatcagatggcaaaggtgaattctaagctggattcggttcacaacttgcttacagggaagaagcatgtccactttgcagctgaggatgagaccattgagcgtgagactgagtcagaagagggagtattctacatcgatggtcagggctataggaaagagagaaaaagagttcctccaactacactcaaaagcctgctttccagaagacctttcctcagagcaacttccagaagacatatggtaattcagctaccaagccctccctcccccccctcccctccaccctcagcagagacaagaatggaatcgatgcttgagcaaattctagagagccaaacaaagcttgttgtggagtttaatggcaagtttgatgctgtctacacagatcttaatgggaagatcgacaatctaagatctcatatatattagccttctcctacattagcatttatcactgcagtcacactgcgaagtggaaagcagctaaacccaattctttagcgtgaacgttcagctcagacctcatctatcccagttgtagaaaaagcctcaatgtcgattgatacatcagggtgtcgatcgacaccaattgatcttgacggctctgtatttcctttatcgtgtggatacgatactttcacagaggaggaggaacttcttcccgatggtgtcgaacgtcacccacctcatgtcgatcgacaccaataccacataggcaacccagtgctgacgtttgacagagcaggatcgatgccacacaatagtgtcgatcgacactcacctagtggcgatcgacacaagacttaaactgccccaatatgccttgcatctccatctgttactatacaagtctacacaccacaagttccttgtctattacctcgacagtccaagtaggagattcctgagatgcattgcatgggtatcatggatgagattctacttcagttgcctccagttgatatagagaagttgtcaccctctcttcaaagtgatatgatacgagatgatgctccagagaagcaagatgacaagacaaagataatggttgtgtcagaacaggtactcagcaacagcaagcgtccacatgaggccaatttcagattcgttgctgagaatcaatctgtagagatggtgttgatcgacaccatcacctgtgtcgatcgacaccatcacctgtgtcgatcgacatcccaaacgggctaaaccagaattgtataatgaagctgctttgcaagttcagatcacttttgatatttgaggacatgttgccacgtcacccacatcacctctactccttgatccacctcctaaacggctaaggtactcatttcctcctaaacctcctgatttcatcaataagagtttaaaatttccaaaaactgttttacggttaagcaagccacgagtttctcgtcgagcacttattctttcttttgatgattgttcaggaaaccggagtagaccacccatacctctgtcctgctctgctgacattcctcacttccttggtagaccgcacacaccgactgtttatacaccaccttggatgaagcgaggttctactaggaagtatttacttcctccatctgatccacctgatccccaaactccaccaaagtaaagctaatgactctaaacaagcgcttagtgggaggcaacccactggtttgctttttcttttccctttctttctttcttttcttttatttttgactaggtgagtacccacgctacgcgtgggttgttattttgaaaattgtttaaaaagaattatgcttaactattttgattactaatttattttattttcgtatatgttattatgtagttaataaagttatattcattttatgtaattatatttgtatagttagattcacttttgattcaaatatcaattatttttttcatgtataaatcttcttatctatatacccaaaattctaatcttttttaactatcaagaattacttacatcaataatatatgatacaatgatatgcaattatgttacttatttggtttgaaagttgcctaacttgattctaagcaaacaatttattgtttcatgtattctctcctaatctaatattccaatcacatcatgataaactcatggctaagtattagattgacataattttaataacaaatgtataactaactactcatttgctttaaaaaatttcacatgaaaaaaaaaaagaagcaaaaattaaacagtcttttaaatcaacacttttaggtttctctctttacatttgcatatggctatattggagagagtgtcgtatattgaattttttggtatatctaacgtctcaaaagaccattacttaaaaaacatgcatgttattattaatgttaccaatttatcataaagcacaaaaagaccatgatcatatcatgtagaccaaaaaatgtaataataagaaaagattaagttaaaattactaaattaaaaaaggttaagtagcaaataggtaagttgcaatacacaaaattttctagccgttatcaaatactgactattaaaaaagagaatattacactgtgggacacttttacaaaaatatttgtcgttttaggcacttccaaaagagaaggcactttggcttgttaaattgtccaatttgccctcaatcttattttctctttctctttagcaatatttcttttattcttcaccatctcttttacgaaaacttctcttggtcctctctctatttttccagaatcaaaattaaatattataggacaacttttatattcataattcaaaattcaaatttgaatctcatagggtttatcatcatcctccctatctctcaacaatctaacggtgacacaaaacaagactatctttgattactaacccccactccgtttcctccgtagcttccaacgtcacctcctccttagccacctccctcacggccaccactaccgtatccttttccaccacaacctctactatgtctctcgtaatcaccaccgcctcctccatttccgccaccacctcctccgtattcattaccgccaaagaataaattatcttaattggatagtcatagccgttggtttttttaagattgtgatttattttgcaatttaaatctttgttttgatataaacttgagattcagttcctttaaaaaacttcttcttcttcaacaatggtggcttgatttgatttttgctctctctcatgggtcaaatttgtttcatctacgtagcatcaagattacggttaatcgaatctcctgttaaaatatggacatgatatatagaatggatatagataagtaaaaatgtttcccaatggatatatttaaatggactcgttataatggacaccaaaaaattgtttgttaatttttc

SEQ ID NO: 167064 - DNA, 1301 bp, Arabidopsis thaliana landsberg
tccacaaccgccatgacttttaggctagaaggacacgagcatcgtgtatccattgttagctctggtgatagtttggaatgtgatgcttgcgatcgatcgtctggtgacgggttctcttgcagtgaatgcaagtttactgttcaccagaaatgtgcgtttgtgttgacagaagatatattccaccacccttctcatgctgggcattgtcgtaacttctcacaaccggagctcctattcacaacaactcaaaatgtcatctctgcggtaaaagcaccgaacaccttctttatcattgttatgattgtaaagtcaatttggacaatgattgcatgattgatggcatatgtgccctagcccgtctgagtaagccattgcatcccattcttctactcatggttgattttagctctgatatgtggtgcgactattgttatgagggtggcaaacatggttatttctgccctcgttgcaggttggtgattcatgagagttgtgtctccgtatttgactcaccagagattattcatccttctcatcgcagtcaccctcttaagcttatcaccaatggagctccagattacacggaagaccgaagttgtcatatatgtggaaaagaaactggaaacttactataccattgtgatatttgtaaagtcaatttggatttggaatgcgcggttgaaaatcccataccagtcgctctttcagatctcaaggtccatgagcatacactcacactcatgccaagattgatatccttcatttgtgatgcttgtgggacgaaaggcgaccgtgctccttacgtatgtgttcaatgtgatttcaggatgttccatcaaaagtgtgctcgtttaccacgtgtcattcatgttaatcaccatgatcaccgtgtttcgtacaagtatcctcttggtcctggagaatggagatgtggagtttgttgggaagagattgattggtcatatggggcttattcttgttctctttgtcctaattacgctattcattcactatgtgcaacaaggggcgatgtgtggaatggggaagagctagatggagtacctgaagaagttgaagatatcgagccattcaagaggaatgatgacaacacaattactcattttgctcatgaacataacctcatgagcctccacaaagacgatgaagaaagcagcttatgtggagcatgtgttcatcccatcggctcttacacattctacaagtgttcaaaatcatattgcagttttattctccatgaaaggtgtgctaatcttgctaagaagaaacgacattttcttagc

SEQ ID NO: 167065 - DNA, 1338 bp, Arabidopsis thaliana landsberg
tacaaatgtttatcgtggattcaaaagttaatgttattgcatttcaggctttggatttttgtccctctcaaggaataatgcataggattgttaaccctcaaaatgtcatgatagatcatcagttgggtaaacttcgtttgatagattggggccttgctgagttttaccatcccggaaaagagtataatgttcgagtggcctcgaggtaatatccgataccacagcttaattccacctgtcttgaaaagcaaaagagggtcattcgtagatgccaatgattgaaacttttagctgtgcaatcaaagcttcttgtagttgttaaatgcattagactaaaaacctgtgaattaattgccagatacttcaagggtcccgagcttttagttgatctacaggattatgactattctttagacatgtggagtcttggttgcatgtttgctggcatggtgagaactaataatcccctcactcttctctctagcttcaatgctgaagctattgcaagcatttgaatttccgaatggtagtcgttaatactttgctgttgcttattcacttgtcaaatattgatgctgcagatattccgtaaggaaccgttcttttatggccatgataatcatgatcaacttgtcaaaattgccaaggtatattgctagtctacgacttattggcataaaattacattgtaaacttaaatccatgtatatgatttctgattgaaacgtgtgcataggtgttgggaaccaatgagttagatcattacctaaacaaatatcagctagatcttgaccctcaactggaagcacttgttggaaggttttattccatccctgaatctctctgtctttaaaagtcaaaattgttgctgttctcaactctggctcagttaattttataccaatgagttaaaacctgaagtcactcttatttgtagacatgtccccaaaccatggtccaagtttatcaacgcggacaaccaacatttggtctcacctgaggtactactctttttcgaaaaacatagttttgcttcgttctgggtgtattgactcattgtatacatctttaggcaattgattttctcgataagcttcttcagtatgatcatcaagacagattaaccgcaagagaagccatggtaaaaatcctcttcatgtgcacacatcttttgattttgttttacccgatgatcttcatgtgcacacatcttttgattttgttttacccgatgatcaagtcaaacttataatctctggtttctctattgatctataggatcatccatacttcgctcaagttaaagccgcagagagcagcagactacgaactcagtaa

SEQ ID NO: 167066 - DNA, 868 bp, Arabidopsis thaliana landsberg
ttttttaaagaagtataagcagcattggtttatctcaaatcatgcctttttagattgtttcgttactggaacatttggcttagttaatagtatggttcgatcagatctttattacttggtactagtccatcacaaaatactctgttgaccttatagggacatatcatgagacgtgtagtgtttttaatcagctagtaaatagtttaagctcattggatctatatggtagtgactgttaacagttgcaatctcagaacttggtgcttaaacactgaagataaaacgtatatgtcacgtaatatgattcttccttgttgttgttgttgaatgaacttacgcaagaattggaaggagcttattgaagtattatcttgttgactccggatatcccaccaggactgggtatcttggtccacatcgtaggatgcgatatcatcttggtcagtttggtagaggaggaccaccagtaactgcacgagagttgttcaaccgaaagcattcaggtttgcgatctgtgattgagaggacatttggagtatggaaagcaaaatggaggattttagatcgtaagcatccaaaatatggtctgactaagtggattaagattgtaacagcgacaatggcactacacaattttataagggattcacattgggaagatcatgattttttacagtggcaaagcatagaagaatatcatgttgatgatgaagaagaagaagaagaagaagaagaaggagaagaagaagaaggagaaggagaagaagaagaagaacatgttgcatatgagcctaccggtgacagagcgatggaagctttacgtgacaacatcacgaacgaatgtaataaaagtcgcttaccttattag

SEQ ID NO: 167067 - DNA, 759 bp, Arabidopsis thaliana landsberg
tccatcctccgtgatgtttttttttttataagaaaatatcatgcaagttagaaatctttgaactgtaaaaaagtatctttgaacatactcatggagcctctcttctccagctccatgcatctcctctagtttctcgtcgctagtggtttcggggcacttgtcgatgtccctttaaacacaagtgcgcaataggaaactggaactgagcttgttgaatacaaggagaatctggctagtggctactaactgatgacaccttaaagtttcaacgtttttttggtccaacacataagcattatgttacttggtaaattatcccatattaatagctcaatatatatattaatcttttgtaggttattcaacaaattgttctccattctttagtatttttcgtttggtttgatattttatatataatgggtaattgggtatggtttcatttatgattctgcgtctttctctttacacttgtacattacgaagaaaaaagtgaagcataaacaaaacgaccaatacaaagtgggttacatttgctgcggaagtttggttttatttcactgcaaggaaccatgtttctcctccaaacttgattgatgaaggagttagatggctcaagaatccgcgcagagacaagcgactgctttgattatggagattaaaagcatcattcgttgtcacttggatccgttatcgagagtccataggttgagtcctcagggagtttcgctgtcaggttcttggttttctctctttaag

SEQ ID NO: 167068 - DNA, 1480 bp, Arabidopsis thaliana landsberg
atggcgggaaactacaattatggcggtagtggcggtttctatcgagattggatgtacaagagattcgatgaagtgacggggaatttgtcagccgaatacgtcgcaggagttgaggaattcatgacattcgctaatagtcagcctatagtacagagttgtcgaggtaaatttcattgtccttgtagtgtatgcaagaatgaaaaacacatcatctcgggtagaagagttagtagtcatttgtttagtcaaggatttatgcctgattattatgtttggtataagcatggagaagaattgaatatggatatcggaactagttacacggataggacgtattttagtgagaatcatgaagaagtgggtaatgttgtagaagatccatatgtggatatggtgaacgatgcatttaattttaacgtggggtatgatgataacgtgggtcatgatgataactatcatcatgatggtagttatcagaatgtggaagagccggtccgtaaccattcaaataagttctacgacttgttagaaggtgcaaataatccattgtacgatggttgtcgtgaagggcagtcgcagttatcattagcatctcgactccgtttgcgagatgtttacagattttttaccagaaggaaaccaggctaccacttcacattaccagaccgagaagttgatgcgcaatttaggacttccatatcatacgattgatgtttgcaaaaacaattgtatgttatttaggaaagaagacgaaaaagaagatcaatgtcgattttgtggcacacaaagatggaagcctaaggacgaccgtcgaagaaccaaagtaccatatagtcgtatgtggtatctacctattgcaggccggttgaagagaatgtatcagagccataagacagctgcggctatgcgatggcatgctgagcaccaatcaaaggagggagaaatgaatcatccttcagatgcggcagagtggagatatttcccagagttacatccccggtttgctgaagaaccccgtaacgtttatctcgggttgtgtactgatgggttcaatccatttggcatgtctcgtaatcattcgttgtggcctgtgatcctaactccatataatttaccccctggtatgtgcatgaatacagagtacttatttcttaccattctgaattctggaccaaatcatcctcgagctagtcttgatgtcttcctccaacctcttattgaggagctaaaagagttgtggtgtactcgagtcgatgcgtacgatgtttcattgagtcagaattttaatctaaaagcagtactactctggacgattagcgactttcccgcgtatagcatgttatcaggatggactactcatggtaaattatcttgtccagtttgcatggaaagtacaaagtctttttataaacccaatggacggaagacatgttggtttgattgtcaccgtagatttcttcctcatggtcaaccatctcgt

SEQ ID NO: 167069 - DNA, 702 bp, Arabidopsis thaliana landsberg; identical to SEQ ID NO: 16695
  unsure (1)..(702): unsure at all n locations

SEQ ID NO: 167070 - DNA, 767 bp, Arabidopsis thaliana landsberg
agatatataggatttaaggtgatatcaaacccatcgcattagcagcatgtaatcttctaatcttattattatcattattttccttgtgtcttcaatttagtcccataatcttcgatgcagataacctacattgagaagcaactcagtggttacccctatggattacccgatgaactagagttggtggagaaaaacaagagagttgaatttcttaaactagatagtgaagatagcagagattttgcggtgctttttgctggaggaatgagaaatttggtgatgtatagaagccgtaacatgagttggactcgagttatggagcatcctgaaaagtattcatatcgagatatgattgcattcaaaggaaagttttatgctcttgattcaagtagaaggggacgggtctttgttgtcgaagtttcttcggaagttacggagatcccctcagtcagaggatcgcaacagtcttctaaagaaagtctggttcagtcaggcgaggagttgttgctagtgcaacggttcacacctgctgggcggcgttatgacgaatatctatatacatggttcagagtgtttagacttgatgaagaaagagggaagagaaagtgggttcaagttaatgacttgaacgaccgagttatctttcttggagctcagacgaatctctgctgctcggtacataagctcccatgtgcaaaggagaattgcattgtgttccttaaatcaaatgatggtttcatctttgacaatgactcggtccttttgtt

SEQ ID NO: 167071 - DNA, 2149 bp, Arabidopsis thaliana landsberg; identical to SEQ ID NO: 21403

SEQ ID NO: 167072 - DNA, 690 bp, Arabidopsis thaliana landsberg
  unsure (1)..(690): unsure at all n locations
ctatctctttatattatattgggagatgctttccgaagacgagannnnnnnnnnnnnnnnnnnngtgatgacgtcaattccagacgacgtgatcatggagtgtatagcgccacgtgtcccgaggtacaaccattcgatgctatccctcgtctctaagcaattccgatctctcgttgcgtcgcctcgactatacaagacacggtccctcctcggctgcaccgaagattgtgtgtatgttctcatcgaagattgtatactcgaagttgctcgttggtatagtcttaaccggagaaccaaaagaaacatgcccggcactgttgaaaaccggttggtccttatctcgtcactcccgcctatgcccacagcagcaagctatgttgttgtgggttccaacatctttgtaatgggtggaagatacgactggaatgttgaggagtgggaagcccaaccgccatcatcgattgcgttatgcatcgactgtcgaactcacacgacccgtcttgttgccgacatgccggttgggcttatgacgaatgtatctaaggtcattgacgagaagatatacattgtcggaagggtgtgggcatcggctaccattgtggaatttgatttacgaacggaaaagtgggcggatggtacgaaaccaggctgggaggcggatgataggtggctcacatgtttatcaacgac

SEQ ID NO: 167073 - DNA, 1122 bp, Arabidopsis thaliana landsberg
tattcgataatcagatttgatctttgtttgattaaggaaaatttcatatatataggcttctctatccccacggcgtctttgtttgttcaagaccacaacgggtttacctcttagggaattgaattttttaacttctatactcgctgttcgtatgatcaagaaaaggtttgttaccgaacttatgacttcagattgttgtttgttttgtcttttgagagtgtgaattcatggttctgtgattgcttcttatcagacttgttgttgtgctgctagagaaaacattcgtttacgacttgaatactcttgtcatgcttgatactatcgacaccgtgccaaatccaaaaggtatctcattaagttccctttgtcagtttttaccgtattagttcattgtaaacagacatgtaaatgtatatcttcgttcaggtctatctgcattctctccatctcttgaaggctgctacttagctgttccagctagtacgacgaaaggatctgttttggtgtataacgtcatggatttgcagtctcatagtgaggtttactagatgcttcacctgatttttggtttaaatttctaatttgcatagaaaactaagttattaatgaacttgattgtattgtctctctgtttgttaaactcgattacagattgatgcacatcgttctccattggctgcgattgcactgtcttcaaatggaatgtacattgctacagcatctgagcaaggaaccttgatccgagtccatcttgtttcagaagcaactaaggtgaatagtttgctcttttaatacatcaccattttgtttttctacagattcttaatcgtttctttcctctgtttgcagtcatatagtttcaggagaggaacatacccatctactatatattcactgtcttttggaccatcgacacagcttccagatatattaattgcaactagttcttcaggctccattcatgccttctctttaagtttggccataaaccaaaggttaggattaagaatcacactcttacttcccttatacatactgtgattcctaacatttgcaagagtttttcagaagcaaaaggtctactagctttcttggatcggttcttcccgacagtgtgagtga

SEQ ID NO: 167074 - DNA, 695 bp, Arabidopsis thaliana landsberg
gagctgcggggatacacctgggaacccctgatgtgttccctaagttcctcgacctcgattacctcaggggaaaggattatcttgacaagacaactccggcggattactacatcgtcaagttcaaccatccgaagcttggaccttctttgttacccctaccttgcgagaaccaaacttcagtgaagacaaggcataacatcaacttcatgccttctccttctaccatgaacatcgacatcggaggagctagagaagatgaaccagaatatactcaagctgactatgagcaacaagagtattttactcaagctgattatgagcaacaagtcgaattcgagcaacatagtgaacagacggagcaagagaccaacaaattcgagcaagctcaccaagaagaagatgctgatcaaggaggagatgagataactgaagttcacaagaagctcagtgtgcttgaagagcttgggaaccttcacaccaaaacgatgaagggtttcaagaagaagatgagaacaatgaaaaagttgctgaagagtatggctgctcaaatcaaagacttccagagcaagccaagggcaccgtctcccaccccgaagtaagaagaaatggttccacgagctcagctgcaaggagggctgaaaggatcgatcaaccccaagctttatcatttgagcctcgggaagtgatctccaagt

SEQ ID NO: 167075 - DNA, 430 bp, Arabidopsis thaliana landsberg
tgttctttgcaaattatgcttgatgcaatgtctctgtttattggagttttgtttttgactgtttaaggatcaaaactagccgaaatgacagaaaattctcatttcaggttgtggagctaaaagtgaatttgcattgtgatgaatgcatcaggaaaatacttaaagccatcaagaaaattgaaggtaacaattctgtaaattttctccttatacatatatagccttgtaagattatgattatggtttatatttctaaataagagtatttgatgaaattacagatatagaagcatacgatgtggacacacagctcaacaaagtgacagtcacagggaatgtaacagaggaacaagtgattagggttcttcaaaaggtgaggaaagctgctgttaaatgggaccaagacaatcaaaccctctttaccaactag

SEQ ID NO: 167076 - DNA, 1059 bp, Arabidopsis thaliana landsberg
aagatgtctccgataccggaaagggcaaagcttcacatagctatggtggtgtttcagacaggctacgctggtaatcacgtgatcgtgagatatgctctaaacttaggagtaagcaagctcgtcttcccactttaccgcaccatcgtcgctttctctgttcttgctccctctgcttacttccttgaaaagtataattacacttctttaaaccaaactaaatcttatatcttcaattctttaattcttgatattatttgtatatttctaacagaaaagaaagaccggcgatgaaaatcagttttctgattcaattcttccttcttggactcgttgggtatgatcttgtctttatatcttggagtcaagatcattgacaaaacacttttgattacaatactcatttttggttatagaataacgttaaaccaaggattttacatctttggattggacaatacctcaccaacattcgcatcagcaactgaaaatgttgttcctgctgtttcattcctcatggcagcgttgctcgggtatgttcttgattctttattggagataacttgggaaacaagatgtgtagcttgcggaccaattattgtggaccctcaaagtgggctctgataccactcatatctcatttttattatgacacaccaacaattgtagaatagagaaggtggaatggaagaggaaagatggtatagccaaagtggtggggacaattgtatctgtcgcaggctctttggttataacactctataaaggaccaactatttacgaaccgagtctgcgtttagtgaaccaacctatcaaagctgaagaaacagaggaacaaaacaagaactggacgttgggatgtctctgtttgatgggacactgtttatgttggtcaagttggattgtgttacaatcaccattgcttaaaaagtacccagctcgcttctccttcgtctcctattcttgctttttcgcagtgatacagttctttggaatttcggcttatttcgagagaaataaagagaggtggaagataatatcaggaggcgaattatacgcgtt

SEQ ID NO: 167077 - DNA, 1045 bp, Arabidopsis thaliana landsberg
tgacctggggaggagctgttcagaggagaacggtgaagcagagcaagtcaggggtttggtgaccaaatcacttagtttgacgaagaagttccttatagctagcattgttggtcaattttccaagctggtcgggatctctttgtttgggaaggaaatcatggaggtctcgcagaggtacgatgaattgctggagaagattattaaggaacacgaagaaaatcccaacaatggagaggatagagacatgatggatgttctattggaagtttgtgcagatgacaacgccgagtttaagatttccaggaaccaaatcaaagcactttttgtggtaatgtcttgagtttcttccagtgatatatatctttaatgtctgtcacatcaaagtctttatattgtgcatgtggttgtaggagattttccttgcaggcactgatacttcagcacaaacaatacagtggatattggcagaactcattaaccatcccgagattcttgaaaagttgagaaaagagatagaatctgttgttggggttaggagactgattcaagaaacagatctccccaacctgccgtatttacaggctgtgatgaaagaagggctaagactacacccgcaatacgccaatcttggtgaggaatgcaacagaaggatgcaagatcggagggtattacatagggcagaacacaacaatgatggtaaacgcttatcccgtgctgagagatccggattcatgggggtatccggaagaatttcagcccgagaggttcatgacttctcctttaaaagggaaagaagatgagaaagcacagctagccttgaacttcattcctttcgggagtggaagaagaggatgtctcggaaaaaacttgggttatatcttcatgggagtagccattggaacaatggtgcagggttttgattggagaatcaatggagataaggttaacatggaagagactggagaaatgacgctgaccatggctcatccacttaaatgcattcctgttgctcgaatcaacccagctagctttgatccttagttga

SEQ ID NO: 167078 - DNA, 3047 bp, Arabidopsis thaliana landsberg
atgagcgggaacacaaaatacttattccgccaaacacttagtcattttcgagcacaaaacccaaacacaaaacaacttttcgaaaaccctaagaaagaaaactctctcagtcctcagtcgtcaatccgacgaacttactattccggccaccgattaaaccctctgttgcctctccgtcgccgtcgtgaaagctctcggtgcaactggaacctctgccggcactcaatccgctctatatatgtccacttcgagattgaatcgaaggcaagtcattttctatgttgtttttttctcctttgacactcaattcgttaccctagatctgtttccatcaatctctgagactcaataaccgatgtttgtgtgattttagaatggttttctttatcgattcttaaaatttggtttactttgcatgcctttgtttattacgaattcatatgaatttcgtcttattaatgttaacctgaactgctttaggtgcctgtgaacaattttgcattcgaaattgtgtatttatttgggcattagagttgcaaattttggattttggctctgtaatgtttgattttttattgagtgataaaacttgagaatttcattgtcagattgattaagcttcgtttgttgtctgaatcgtattggtattgtcacatcgatttagttattttgttatgtcaaactatcattgattcactttcttgaatataaaacattttgctcattctatatattttgtttaatttgtaagtgttgctgagcgaatcaatggacatttggaagcttatcaattctctcttttcacaggaaaggttagtatcattgtctcccttttgtgaattgttttctcttgtcatagttagtatataagtttgagttatttgtgaatgttgtctgcttgttctgtgattgtttacttagaagaattcttttcagtttcatttattttaaaacatgctaatataatctagtaactgtacttatctactgaattgttttgatagagtgatttgtaaatgttgtattttgtgtttgtttatattgaagattcttttgagttacatttgtttaaaacctgctactataatcgagtagcatgtacttaaaacctgaattgctttgattgattacgtttataagtttgaatttatttgtgaatgttgtctacttattgtgtgattgcttattcaagagattcttttctttacgcaatatggtatgctgcttaggttactaaaggttaatttatgttacggttagcacatagaatggtaaccaaggattgggtgcattttggcaagtaagaaatataattataattataattatattccttaggtttcagtaagggttttgggaagtttacttctttttttttctctctttctacttctgcaacaaagagctgatcctgcttatgagagaggggttatcaagtttgtacggtatgtggctgcggctttgggagatgatatgattgtatgtccttgcattgattgtcgtaacatagatcgtcactcaggctgtgtagttgttgatcatcttgtgacaagaggaatggatgaggcttataagaggcggtgtgactggtatcatcatggagaattggtgtctggtggtgaaagtgaaagcaaagtcagtcagtggaatgatgaagtagttgagttgtatcaggctgcagagtatttggacgaagagtttgatgctatggttcaattgggcgagattgcagaacgtgacgacaagaaagaagacgagttccttgcaaagcttgcagatgctgagacacctctatatccaagctgtgttaaccatagcaagctgtccgcgattgtgtctctgtttagactgaagaccaaaaatggctggtctgacaagagtttcaacgatcttctagagacattgccggagatgctaccagaggataatgtgctacacacatcactgtatgaggtgaaaaagtttttgaaatcctttgatatgggctatcagaagattcatgcatgtgttaatgactgctgcctattcataaagaaatacaagaagctccagatttgtcctaaatgcaatgcttcacgatggaagacaaacatgcatactggtgaagtaaagaaaggtgttccacagaaagtgttgcggtacttttcaataatcccacgcctcaaaagaatgttcaaatctgaggaaatggctagggatttaaggtggcattttcacaacaaaagcatagatggaaagctccgccaccctgttgattcagtaacatgggatcagatgaatgcaaaataccctttatttgcatcaaaggaaaggaacttgaggcttggtctttccacagatgggtttaatccattcaacatgaaaaacacaaggtatagttgctggcctgttttgcttgtaaactacaatctgcctcctgacttatgcatgaagaaggagaacatcatgctgacattgttgattccgggtccacaacaacctggaaatagtattgatgtatacttagaaccacttatagatgatttatgccatctgtgggacaatggggaattgacatatgatgctttcagtaaatcatcatttactctcaaagctatgctgctttggacgattagtgattttcctgcttatgggaatcttgcgggttgtaaagtgaagggaaaaatggcgtgtcctttatgtggtaaacatacagaaagcatgtggttgaaattcagcagaaaacatgtctatatgggacatagaatgggtctgccaccatcacataggtttagaaataagaagtcttggtttgatggtaaagctgaacatcggagaaagagtagaatactaagtggtttggaaatttctcataacttgaaaaatttccaaaataattttggaaatttcaaacaatctacaaggaagaggaaacaatcggagtctgttaaatcaggatcaaatagtgatgatctatctagtgactcggaggaggatgaggaagaagaggcagaagtagatgaggaagagttatcaagatggaagaaaaggtcaatcgttttcaggct

SEQ ID NO: 167079 - DNA, 3841 bp, Arabidopsis thaliana landsberg
  unsure (1)..(3841): unsure at all n locations
gcatccatttgaacgtcttttggacgctggatacctatggtcgaattcccacattagccagcgaaaaccgcataggggccaacgaatccagaagggatctaacctaatcttaaccacctgactaacctagagattaccctaatctaatccatcctcaagaaccctaattactactcaagcaacataactaagaacacaaacccagaaattactgaaatcatatcaaaatgtagatctaaacaagataaacaactttgctcaagaactaaatgaaaaaacgaaatagattaagagtaattaaggtttcaagattctaaaacacaaagaaaaactacagaataaaagcttggtcctttggacaaatcccaaagagcatatttataataaaatcccaaaaaccctagattcactagaagaaaagagacttgaggtggtttggatggatgctcgatcttggggatcgagtaaagagggtgctgcaaagtctgtgcctttgcctccatgctccgagtgatcaattggtcgagtagttgcttcttcctctgctattcgtatgctcaaatgtctggttgagtggggaataaggaggatttgtagagttggtcgcccttgatcgagtaaaggggtcgagtagcgagtagaccgatctgttgcttcctctttggctgccttgagcgagtgaactggtcgagtgaattgctgcctcctctatagctgcctagatcgagtgaactggtcgagtagattgctcttctgcttccctcctggttggatagagtcgagggtcgagtagaatccttttaagctctttctgcacctgaaaacacaccaaaacatacaatatgtatgcaaaacgatcctaaatgcctaagtgtgcaaaataagctaaatgtgatgcaaaatgatatgaaacaatgagtgattactaagctaaatgatgataaatacatgtctaaaatgagtaaaatacagtgttatcaactttcccaaacttatctcttgcttgccctcaagcaaacaaaaatcttaagttgaaggagaggtttgaaggtggggattcaaaaaccgaagcatgaatatagaacgggtaagctcaatgtctaggtagctaattctaggttgcaagatgatagacccttacttaaaaacgttagccatactcgtcacaatgcaacctaacaacctgatttaatctattcaagcattcacatcaaccaattccctttaacatttattaagcacgaacaatggatcaagcaaggcaatggttatgaactcatttgtttttttgcttaggctaagagacaaaaatggtccctctaatgacatggtcgaaaatcaggggactctcatagaaaagattgagctttaaaagaatgctaaagataaaagctaacggacccatacaagaacagactcccatctacccaatgatatatagtatatatgatagctcagaagatgatcccagtcccttagatgtcctaactctaccctttttcccattctttctctcttttggttcacgatctaaggcgtgcttctttaaaacgattcaagagtctagcgggtttgcttntaaacttttacaaggtaanggcttttctctaatcttagcacagcggggcgtttacccttttcttttattacaaatgcctaagttctttgaattgcaaaccctttactagactaacacttttgtatcccccttaagaactctaaactcttactctttttttgttttgtttttcactctcattatctttcccactcaatccatacacaatccctaccctaaatacaagtctccacctagtcctagctaacccaaaaagcgtgggctaggtctacatgaaagattgctcttgtcggcccatacctaacacgttatcttgtcggcccatacctaacacgttataccaagctcaatcaaaaaagacctcacaatcacacacaaatgatctttggcttgaaataaagctaggctaaaggtatgggaaactgctctaaaaatgagagacagctacttggattgacagagggtggtgaagtgaataagataatccaagtatgtatatggtagccatgagttcataaacaatgtatagacatgataattgcaaattcagttcaggttctaaacgctcatcacgttcccgacaagctactcacgaaatacttggattgctctataagaattacgttggtggaattggacctaaggttctcccaatgcacgttgtcgaagcattcactaaacaatttcaaatcaaggtacgatttccaatttcttggctttctttgtttatgaattacaccttgttttcaaccaactaatcactaaagtcaatacattttgttagatggattactggaaggcttatcggacactaagatctgtccgagaattggttaggggtacaccagaaagggggtacgagcaacttccggtatacttgtacatgttaaggagggaaaatcctagaaccttcacgcgacttgaagtggatgaaactcagcgatttaagtacttgtttcttgcgtttggtgcaagtattttaggattccctttcatgaggaaagtggtggttgttgacggtacttttttacagggaaaatacttagggacacttcttacagcaacagctcaagatggtaactttcagatatacccgattgcttttgccgttgttgatactgaaaatgatgcctcatgggaatggttttttagacaactcagcagtgtgattccagatgatgaaagtctcgccattatttcagacagacaccaatccattaaaagagcaataatgacagtttatcctaagtctagccggggaatctgtacataccacttgtacaagaatatattagttcgctttaaaggtcgggatgcatttggcttggtaaagaaggcagcaaacgctttcagattagttgattttgaaaggatatttgatcagattttagctttgaatcctgctcttcatgcttaccttcaaagagctgatgtacgtttgtggattcgtgtgcatttccctggtgataagtacaacttgcttacaagtaacattgtggagtcaatgaataaggtcatgtcaccagcaagaagccatcctattgtacaactgttagaagaaattacatccatgatgacgagatggttttcagacagaagaaatgatgcattgaatttgtctacatatcttactcatggagtagagaagatcttgcaggtttcatttctaatacaaacataatttatacacgtccgtatattggtgattatagctaactaatgacaatgtattttttgtagagtcgtgtagagtacgccaaattgctaagtgaggcttttcgaccagttactgtccgagcagggacttgaatttgaaatagacatcggtcaggtcaagacatagatgcaaatcaagtacaagttacgtttggagcatctctgcatgttgttaatttgaaagactagaaatgttcgtgtcataggtttgatctaaaaaagattccatgtgcccacgcgattgcagctgctgaaaaacgaaaactttctcggatatcattgtgtcatccttactttcagaagaattatttatgcaagtcctatgctaatgccatcatgcccaggaactttgatatacctgttcccgagaatgtcgtgtcgaagatatgtttaccaccggaagctcgtcaacaaccaggtagaccaaagaaatcgagaattaagtctgcactagagattgctatggagaagaagaagcctagaagacgacacacttgtggcaattgcaagcaaattggacacaatcgtaagacatgcaaggcttaa

SEQ ID NO: 167080 - DNA, 458 bp, Arabidopsis thaliana landsberg
  unsure (1)..(458): unsure at all n locations
aggttatatgatttgtgcccaaagtattattaggtagagttttgggttttggtgtatccaaggccgattttgcgggttccacataattctcaataggttgttatggaggagataatgaanctgcaagcatatcctctggattctgaggtaaaacaaggaaaaaacccaagaaaaaatgtgtcttggtgccaaaatccggttccacatatgtgaacttggtgccgaaattccagcaaaagattgttttaaaagtatctgctaatgatgtaataataaggagttgttttgggaagacaactctttagaagttagtgaggaagctgaggctgtgtcagaaactaaggttgtgaaagaggaggttggtcacaactcttcagaagctggtgaggaagatgaggctgtaaaggagcataacgctgctgtggagaaagaggttagtccaggtggttggaagcagc

SEQ ID NO: 167081 - DNA, 566 bp, Arabidopsis thaliana landsberg
  unsure (1)..(566): unsure at all n locations
attcattttgtgaaaatccttttgaatttatgattatgaaaggacgagtgtgcttcctttgggggatgtctcagtgtcggtcctgttcgagtacctctcgaaacgtgtnnnnnnnnnnnnnnnnnnnnnnnngttcgaggagctagccggtttctacgacccgagatattccgggtccgcaatccgagcccacgggattcacaagaccataggaatacccgagttcgaccggtacttcagcttatacccgcctgagagaaagcagaagatgtccgaatgggaccaagcaagaaagggggcgtatgacgaagctgtccaagagatcaaagagaacacatggaggcttgcgaagaagcagattgagaggatcatgaagctgaaaagcagcggatgggacattcagaggttggacgtacgccgtcatttggaagatcgtcaagagagatttgggacaatactgttttggatgaaagcatcaaggttgtgaaacgcttcttggtgaaagacaaagtgtgagttatttgttagtggatttttgattttggaaaacataaacaaaattatgt

SEQ ID NO: 167082 - DNA, 1069 bp, Arabidopsis thaliana landsberg; identical to SEQ ID NO: 72032

SEQ ID NO: 167083 - DNA, 886 bp, Arabidopsis thaliana landsberg
acgattagttgtgaactccaaaagcgggattgttacaacgttactagttgtaaacttaatctaacagaatgtatttgtaaaaaaaaatgtgaagtgtttgaagttcttcattgcgacggtttactcttcggcctcacaagatgttttgaaattatagtctggaacccatgttcaaagcaaacaaagtggattgaacgacacatacataaagtacgtactactaatactcctggatatgcttttgggtgcgataaaaaatgcggtgatcgtcgatacaagatcttgttgtttccagcagccagctggcattcctgtaaattctgtttgaaatatttagaggttgaaatatatgactttacgtctaactcttggagagttcttaacgttgaaattgattttcttcttgaatttcctactcgttgggtatccttgaatgggaattcttattggattggtgcagatgaaaatacacatgaaggtgtcattgtgacatttgatttttcagctgagatgtttggacgtctttctttgccttttttggcatatccttgtgaagatcatctttctatgttcgttaaaaatgatagaatttcgatattacatcaaacgcgtcatccatattctgtggaaatttggatgacgggatctgtgatagatggacaaaaagtgtcttggagcaaactcatgagatttgatgctgaaaactttgatattcggttcaacctgcctaatttcttcattcaggacgaagagaacaaagtcgttgtattttgtgataaaaaagaaggggttcatagagtttacgttattgaagactataaatgtacggaagtttatgctaaaaaagtcgaccattataaagagcctgtcatctataattatgttc

SEQ ID NO: 167084 - DNA, 731 bp, Arabidopsis thaliana landsberg
ttcatcgataggtggatccaaacagtgactcgtgagaaacaaaccaaggagattactcttgtcaacaatataggttgcatgacaccttttgttagatataatagtcttcacttgtccccaagtgcattctgtcatcctagcctcacttcactctcacttactcgatataagttactcgagaaagccttcaagaactgctgcaatcttaagatcctgaagctttatgacatcatgtccgatgttagtgtccttagcaacgttttcaaagcttgctcctctcttgaggtgcttgtgttgcaaatcacattcttaaaccaagcaagtgcgttgaagatcgaaaacaagaaattagaattcttgcaagtgacttggccttgtctgatgaataggatggaagtgaatacacctcgtttggtgatttttgacatcaaatctatctactgttttggctactcagttgaagcccctaaattaagcatgtttaaaagagattattgggttggtggaatgagttaccctcatcttagctaccatatatcaagtctcgctcaggtacaagtacaagcaacatgcatgcctttggatataattttgaacataatattttgttttgacatggtttgttgtattatgaattcaggagaaaataagaatttggcttgagcttatggtgagccaaatttatcatatgaaacggactggatccttatccgtgagtgtcgatgtgagaa

SEQ ID NO: 167085 - DNA, 1152 bp, Arabidopsis thaliana landsberg
  unsure (1)..(1152): unsure at all n locations
cttatattcttttagaaacataaaaataaaaaatatntatggtgttcgacatgttttagatgcgtccaatatggaaaggaatgagagaaagaaagacaaccaataccaattttggttacctatgggagaatggtgtgggttgtcccattggtaccgtccccatgcaaagagtcactaaagaagatctattgagattagactcatttggcgataatcataaacctcgtggctcttggaattataccactgatgattctaatagtaacaaccagaaacatgtacgttgcttcttttaattaaaaatattttgatatatttatactgattactgataataagaattggttactgaatgaaaatgaacgctattagtttgcggtggctcggacggttggctcagacaagaggttcaatggagcaacaatggatctttgtttaaccgctcctaaggttaggctaaaccaatacagtgcttctcgacttcacattcagattggaaatgatttcctccaaaccggctttactgtaagttatttgatttaatttgtttgtcatctagataaaagcaccgatcaacaagctctagttacttaatttatttagtaactaacaaaatatgtattatattgtttaataaacacatattatatgtactaattcaggtaaatccaacattgtacaaggacagcaaacctcggactttcgtctatacaaaagtgagtcacgctattagtaaaaaatttcttttaatttttatattttgtatacatattagtaagtaaatgtatatattgatggaacagtcaggtgaaaaatcatgttacaatagctactgcgacgttggaatgatacttgttcgtcaagatattccacttggtatggcattatcgccagtgtctgttcgtggtgctaggacaactcattatggagtcttcggtctaattaaggtttgaataattaggagtatgacaaagcattcaaaattttatgcttacatatttgtgtgtttcttaaactaaggacaaaattcacctattattttcgggtaacaggaccaaataaatggaaattggtggttgcaatttggtaatgctgcagaggaaattggattttggccgtcgagtaggtttcatcaaagctagagaaatttgg

SEQ ID NO: 167086 - DNA, 1418 bp, Arabidopsis thaliana landsberg
tctccttccatttgcatttggttgtggaattgtgtgcattggatctccagtttcagttttttttgttgctgtctttgctttgcaaatcaaagttggctttgatatttcttccctcttacttcattctgagttacattttacagggaaaacatacaggatccgtgttcacaatgttggtatctcgacaagcttgaacttcaggattcacaaccacaaattgctcttgattgagactgagggtcgctacacctcccaaatgaacttcaccgattttgatattcatgtgggacagtcttattctttcctggtaaccatggaccaaaacgccacaagtgactactacattgtggcgagtgctagatttgttaatgaaacagggtggcaaacagccacaggtgttggcattctccattattccaattccaaaggacctgcttatggtcctttgccactttcagcacctgatgttaatcacccttggtctgcaatgaaccaaccgagagccataaagtatgtctagaaaactgttcaagcaaatgaatgtttcacataaacctgttgccatgtaaatgtgatcctgattcttttgatttgcaagcaaaatacatctgccagtggagctcgtccaaatccgcagggatcatttcattatggtcaaataaacatcactaacacatacattttgagaagtttgcctccaacaataattaacggggcacttcgtgctacacttaacgggatctcatttgtgaatccaagcactccagtgaggcttgcggatcgcaataaagtgaaaggagcttataagctggacttccctgacagaccttttaatagacctcttcgtttggatagatctatgatcaacgcaacatacaagggctttatacaagttgttttccagaacaatgacaccaagatccagagcttccatgttgatggctattcatttttcgttgttgggtaagcgaaacctttgcaccttgtcatctattcttgttcattcttttaatatcctatcaaaagtctggtgttgatgtaccatgttatccaggatggactttggtatttggtcagaagacaaaaagggttcatataacaactgggatgccatctcaagaagcacaatcgaggttaatacaccgtagcatcactcaaaattactctgatctgcaggttttcttaatggttttcttgttatttaggtataccctgggggttggacggctgtactgatttcccttgataatgtcggagtttggaacattcgagtagagaatcttgacagatggtatcttggtgaagaaacttatatgcggatcacaaaccccgaggaggatggaaagacagagatggatcctcctgacaatgtcctatactgtggtgctcttaagaacttgcagaagtattcttcataa

SEQ ID NO: 167087 - DNA, 1242 bp, Arabidopsis thaliana landsberg; identical to SEQ ID NO: 17780

SEQ ID NO: 167088 - DNA, 1352 bp, Arabidopsis thaliana landsberg
catagcattaagtaaggatttgataggctcttgtctttttccaagttttgattgtataatcttctgactatggcgattccgcaggacgggctgtttcttgtaacaaattccattgatcttgtccacagctatccgcttgctgtcttaaccccaaatgtgaatgagtataagcgcctggttcaaaaagtactgaattgtgaagtagatgaacaaaatgctgaagatcagttacgttctttggccaaacagtaagtacaaaaatgacttcataggtcatctagaggacactatggaagtatctcacacacacatcaccaggctcatctggtgatttggaaccaaaaactctggtgataataatgttattcgtctgtgtcattcaggattggtggtgtcacgattctcaggaaagggaaatctgatcttataagcaatggggagacaggtgagtaactttttagctattgtatctttccgttagaggacgttgagaccgtgaggtgtgattatctctatttttgtagtaaaatcagtaagcatatatggttcaccaaggcgctgtggtggacaaggcgatattctctctggagggtgagctcaccactctttgatccagtatcattagattgctcgggttaccacggttaaaagttcaacttttgtagccactgatagtctgcctaatggatttggtttcatatagtgttgcagtgtttttgtcatgggcacaacagcttaaatccgatcctgaaaggttagatacatcctatattggctctgcgcaaactttcatttctaactcaattattgactgtgcaaagtggttttgacaatctctgaaacccaacaaaatttcagtccctctgagaatccagctatcttgggatgcatagctgcatctggccttctcagaaaggctgcatctctggcctttacaaaacataagagatcaactctcacaagcgacattatcgaatgtttaggggagaggtatggatttctttcttactgaaactgctgcattagagaatccacaaaaacatttcgtctcaatcataatgttttatcgacttttttcgacagtttggaggatatctgccctgcatcttaatctcagaacacatgaagtagagttgtcttgccttctacaacatcttattgtctgtgggaaactttagaagtgtctgttctcttgtgtctatttacctcacaactgttttttctgaataatagagcttgaatgctgtgattaccaagtaaagattgctatagaaacagatgatatcgcgctgttcttcctcattaccattgtgagatttactatagaaacagaggcgaaaggatcaagataa

SEQ ID NO: 167089 - DNA, 522 bp, Arabidopsis thaliana landsberg
atatgcgattgtttggcttagaatggttagcgaacatatgcatgtcttgaccgagtaaaggatcgatctaagtctaaggaacaaagacgatgaaaccggtacaagagttggttagaattaaaccaaggttagaaagacttccgctgtgtaataagagagcgattatagaatttagcctcgtaaaggcaattctatgttgaatcgcgaaaaattaagaggttcggccgatcgtcggatgggatggatcgagaaaagtgttcgaggaagcacaaggataagtgcatccgaacacacccaagggtcgcccatggatgcaatcttaccgataaagggagaaagcaccaagaatgggtaaggaacatgattcaccatataggataaataatgcggccgccttcatgtatctatctcctcagccatggtgcaaccgatcaaagatcggtaaaaccaaaggctgactcgatggataaccaacgggaaagtccacggtgggaacccatggccaaaatggatgttggaccc

SEQ ID NO: 167090 - DNA, 1288 bp, Arabidopsis thaliana landsberg
  unsure (1)..(1288): unsure at all n locations
atggattccgaaggagtgttaatgccgttgatccacaagcatcgtatgatgccttggaatgatctgagaagaggtgattgctgtggccgttttgaatctattggtgatggttattactgcaaaatctgtgatattttcgtccacaagaaatgtggcgagtcctccgaatatatcgagcatccatctcaccccaatcacactcttcagcttctaagtactagaggaaatagccatgactgcgatttatgtgaaaggtacatcgcgtatctattattctatcgttgtgagatctgagacttcaacgtggatctatactgtgccaagtatccaccaccagaggttattaacatttccaagacgcatcaccacaagctcaaccttctcaaggagctgatccagtttgattgtgatgctaagtgtggcactaatgattatgggtttccatacaaatgttatgaatgcgatttattcttccacaaannnnnnnnnnnnnnnnnnnnnnnnnnnnntcacactttagaggtaaaccactcttaccacccgtggcaccctcttaagcttcacactggtcaactaccgaattattctgaccgaaaatgtcgtctatgcgcaaaagaaattgaagttggattgttttatcattgttctttgagtaatttcaccttggatatgtcttgtgttttaaatccaccacaacgatatctttggaatttgaaagctcatgaccaccaactcaccctgctcccaagtctccgttctttttcatgtaacgcttcgggttgagtggtgatcgaagcccttacatatgtattcaatgtgactttatgatccatcaagattgtcttgaccttccacgcctcataaacgttaatcgtcatgatcaccgagtttcacgaacttctgttcttggtgttgtaaattctgtatgtgcagtttgtcatcagaaggtggattggacttgtggaggtttttcttgtcagaggtgttctagctatgttgttcattcgaaatgtgcgaccagaagagatgtatggaacgggaaagaactggaaggagtacctgaagaaatagaagatatagagccatatgtggtaatagatgacaatacaatacaacatttcagccacaaagagcattacctaagactccacgttaatgatgttctatgtaacgacaacaagcggtgcaaggcatgcacccatcccatctttcttcaatccttctacagttgtatggattgtgacttccttctccaccaaaattgcgctggatttcctagaatgaaaag

SEQ ID NO: 167091 - DNA, 1365 bp, Arabidopsis thaliana landsberg
ccggtttcaagagccacatcgtaagtaatctctctgtttctctctctctgaacatatagactcatgtcacaattctattcgtttgttgcagaacattcctgtgaagttcttctccaagtatatcaaggggaaacacgaaggaaagaccgtaaaattgagatcagattcttcgaagagaacatggaaagtgaagattgagggccatacgctcaccgacggttggaaagagtttgtggaggcacatgatcttcgaatcagtgacttcgtcatcttcaaacacaaaggagacatgttcttcgatgtcactgctttaggatccagttgctgtgaggtccaatacgcaccatcttgtagtcacggtgaaaacgaagagagtgatgaaattggtaaaactattcaatgagcatttagatttatctagactctttactatttgtgaaccgttaattttctgcttcaggggaatcttcaagaaaggagaaagaaattgaggagaatatagaaacagaaccagatcagttttcatcagatctaacatgttttagccaatctgtgaccacttcaaacctaatgagagattcagtggttagttagttgttactatattccatatattgattttacagtttaagtatgtgtgagtatatataatccccaatgcaatttgatgactgatgcagggtgtgcccagagatttcgcaaagcgatatggtttcaacataggaaggcatgagatagttttgatgaacgaagaaggaaagccatgggaatcagaagttataagttataagtctggtaaagttattgtagctggaggttggaaaagtctctgcactgaaagtaaattagaagttggagattcttgtacatttaaactgcttcacaacgccaaaatgcccgtgtttcggctctgcaccaggctcccaaaggctggagcagaggctcggccactcaagagagctcgagtccaaagatggagccaagagagtagatcgaagcatgacgtgagggagaagatagctgaagaaggagaaccttctcgtcgcaatcgcacatctaacaagtctactggtgatcaaggaaagttgcagcaaacgcaatcttgctttatctttgatcatgtggctaaggtgaaccagagcgttgataacatgggtaaaaggcaatgtataaatgagtcttgttgattttcaagaacatctacaaggtctagctaacttgtccaacttttgtgaaaacaggaaagcttctgagaaagaaacatgtgaacaagaggattcctgaaacagaagcaaagtctttttcattatacaagtcttgtttcgttgcatatgtaacagattggaacctacgagaggatacact

SEQ ID NO: 167092 - DNA, 1650 bp, Arabidopsis thaliana landsberg; identical to SEQ ID NO: 398

SEQ ID NO: 167093 - DNA, 1334 bp, Arabidopsis thaliana landsberg
gaagagggagaagaatagcgttgcggttgtgactgtttctgagtcaagcctcctgctaatcagatggtatgaaaaagaaaaatccttttcaacaattgaaattcttttgggttaatttggatgacaagactaaaagggatgttttggtagtagactttcgaaagcttattgaatatattcagaatgagtatggcaaggaagtaaaacgatattttcggaaatgtgtaatcagcctcatatcacttcattggagatactggaagtgccacatttgttctcaggttaactactgttttacagattgcaagatgcacatcttagataagcatgtgcacaaatatgaacccgagttcagtgatcgtcctaagtatgtggatgagattttggctgacatgatatgctgtggggattggaagccagtggatatagcgcaggcagcaaatctgattaatgatagaattaagagccagaaaaagtttgtttatgttaatggatggtgtagtgattggcctgaagcgaaagatcgcgagcgggaaaacgtactcaaacagtttgccgaggttctaaaatcttcttgtgccaaggagaattgtactctttcatgtaccctttgggactggttgagagattacacagaagagaatctggaactacctggagttcctgggatctatcttgatcaatgttgcttctttaagaaccctcaatgcatctgcttcttagatcttaagcaccttgaacacatcctcaagtattttagacagctcaccacagatgttcgcgcgagtttagttccaaaagtagtgaatcagttttgggaaaattcccaggtcaaggaaagaatcgaccttgagggagtagctacttataatctgcttctggacaagagactgctgtatgaagaagagcttgaatcggatcagatagggacagtagagcattatgaatccactggcatttatgaggatgtgatgcctaagggtgataagatagtctcttggattcttgactgcccaaaaatcgataaggaatttatgtctcaaatggcaaaggtggcaaagggcttacacaatcgtgagatatggttagcagttttgagaatcgtacagggcctggttaggaaaaaggaaagctactatgataagcgacggaagatgctaagctatgagaagatgttgtgtgaggttgagaccatttgtgacagagaagacactaggaagaatgttaatcagcggagcacatatgagtttgcgcttcgaccggaatgtgagaagcttgtaggaaagcaagatgataatagaaaatatttctggactgttgtaaaagatgttttt

SEQ ID NO: 167094 - DNA, 2397 bp, Arabidopsis thaliana landsberg
  unsure (1)..(2397): unsure at all n locations
gatctctgataacgtcctaatgactcacgagacccttcacttcctaaagacctctgaagctatgaagaacgtctctatggtggtgaaaaccgatatgtctanagcatatgacagattggaatggcctttcattcaagttgtgttgattcgcaaaggttttcatcctattattatttcttggattatgcagtgtgtgtccacagtgtcttattccttcctggtgaatggagttcccatgggagaggttattccttcaaggggtatcagacaaggggaccctttgtctccttatctgtttattctctatggagatgttcttccaggcctttgtgagaaaagtcagagagatggccaacttattggaatcagggtagctagaggatgcccgcgaataaatcacctcttgttcgctgattataccatgttcttttgtaaggcaaaagcaaagggttgcagagctctccagcagattttggctatgaaaccgcctcagggcagttaatcaacaagctgaaatcatccatcttctactctaggagaaccacagaggctgtgaaaaccaaggtgaaagattggttgcagatagaaaaagaaggtggtatgggcaaataccttggcctgcgtgaacattttggtagacgcaagaaggatctatttacttccatagtagacaagatcaagcagaaagctatctcttggagctctcgattcctttcaggagcaggaaaacaagttatgcttcaaagtgtccttacagctatccctgtgtatgctatgtcttgcttccttcttcccctatcactctgtgatagaatccagtctaccttgacaaggttctggtgggataagacagatcagcagaggaagatgtgctgggttgggtgggatcgcctagccgttcctaaagttagaggaggtctgggattcaaaaacttcaaagcctataatgttgctctccttgcaaagcagagctggcgagtccttccacacccttcttgccttttagctcgagtcctcttaggcaaatattgccagaatgagtccttcctgaaggccctgagtcccacttttgcctcccatggttggcgcgacctcttagcagggagagatcttctgagaaagcaacttggttggactattggtaacgataaatctgtgctagtgtggcaagatgcctggcttgcccatgataaacgaattcaaccggttggacctgcccctcttctatccaaggattggaaggttaaggatctgtttctccctaattctgtagattgggatgaaggaaagatagaagctgctatcccatttgtgaaggatctggtcctggcaattaggcccagtagagctgggggtgctgataaacgaatctggctgggagccaaggatggtttatataccacaaagacaggttataaagctactctttgtgatgttgattctgattcctctcgggatccggttctttctttcaactggtttgatgaagtgtggaatgttcaatgctcccctaaaatcagacttttcctctggaaggctgtgagtggtgccttgcctgtaggctcgcagcttgcaattagaatcccctcctttgatcctgtttgctgcagatgtggagagttggaaacctctagccatgctctcttcaactgcatgtttgtccagagagtgtggaggcttgcacctctggagggtattgatttattccttgtgtttacagatgttaaacttggcctctcttggctaaagaagaagaagacgctcccttctgtgggtttggggtactgtgctttatacccttggatttgctggactctctggatcacgaggaatcaaaaagtattctcaaacatacttttcagtgaactcgaaaccattaacaaagcaatccaagatgccaaggaatggcaatttgcacaggaaccaaactctcgttttcaggttaggagctccatgggtctcagagctgaagttttctctctgaattcgacggtaatccacacagatgcagcgtggagtgttctgacatgctctgcaggtctaggatggaccctcaaatctccaggaatccctcttaaaaagaactctgctctatctgagcatgttccttccccgcttgttgcggaagctttggtcgttcactcggctctttggtctgctcacaatttgggtcttcacgatgttatcttgaaatcagactgccaggtccttactatggctattatctctcagttccctttgtccgaaatccatgggatccttcaggacatcacttcaagttcaacctccttttctagcttttcttgttgtcatatcccaagaaccgccaatgtgattgcagattcgctagctaaaaacagctctatctttgtattctcaaaactattgattaatgca

SEQ ID NO: 167095 - DNA, 1089 bp, Arabidopsis thaliana landsberg
  unsure (1)..(1089): unsure at all n locations
atgaaaaattgcaaaggtttcgaattgtcagaatctccgacaaggctgataattttaattccagaagcggcagcttcttcgagcgttctatctctctcgttctcttactctggtgcttcctcttcctcgtctactccaagcttggccaaagccatgatgattatggtaatgcaggtaagtgttcttccttgtttgagagagattccgttatcatttcaaatgttaattaaggaaacaaatttagggtcttttaacttggggggtatattccagagattgctatattgtgttcctctgaagaaatcaatttattttgtagatagaattgggaattacactgatggatcagtctcaaagacactgaattccacgagttctgtcttccctcaggccactgagaaagaaaacaacttttgtctcctgagaaaaggccagttacaagatgtgtatgagcatgttcttgtgaacaacgctttgttgatctgcaaagttgtgttgccagaacgaagaataagcaagaaaactctggaagctcgtgatcctagatatgtcaatcttgaagacaagagtctcaaagttaannnnnnnnnnnnnnnnnnnnnnnntgggactcgttataggttagaaccagatggaaatgggtataactacgcttctgctatgaagggtgctaaagttgtggatcacaacaaggaagcaaaaggagctagcaatgtgcttggcaaagatcatgataagtatctaagaaatccctgttcagtgtcagataagtatgttgtgattgagctcgccgaggagacactggttgatacggtgagaattgcaaattttgagcattactcttcgaatcccaaagagtttagcttgtcagggagtctgagtttccctactgatatgtggacacctgctgggagttttgcggctgcaaacgttaagcagatccagtcattccggctcccggaacctaaatggttgagatatctgaaacttaatttagttagtcactatgggtaaaagtttaactgtactctgagtgttgtggaggtatttggcattgatgctcttgagcaaatgcttaagatcgtttgt

SEQ ID NO: 167096 - DNA, 2023 bp, Arabidopsis thaliana landsberg; identical to SEQ ID NO: 19900
  unsure (1)..(2023): unsure at all n locations

SEQ ID NO: 167097 - DNA, 734 bp, Arabidopsis thaliana landsberg; identical to SEQ ID NO: 56003

SEQ ID NO: 167098 - DNA, 590 bp, Arabidopsis thaliana landsberg
agtgggttgtgaaagtgtatagagcacattcgggtaacgctttggttggaagtacgcaacctagagttgaacggctgattggttgggtgcttccatgtgtgggttgggtgaaagtaaacacagatggggcgtctcgtggaaatccggggctggcttctgcaggcggagtactacgggattgtgaaggagcttggtgtggtggcttttctctaaatataggccgatgctcagctcaacatgcagagctatggggaatgtattacggattgtatttcgcatgggagaagaaggtgcctcgagtggagttggaggtggattcagaggcgatagtgggtttcctcaagacagggattagtgactctcatccgctgtcattcctggtgcggttgtgccacaactttctacagaaggactggttggtccgaattgttcacgtgtatagagaagctaattgtcttgcggacggattagcaaactatgcaattttgttatctttaggctttcattcttttgatcctgttcccgatgcgatgtcatctttgttaaaagagaaaactcttgggtctactcgactaaggcgagttcgtttg

SEQ ID NO: 167099 - DNA, 1536 bp, Arabidopsis thaliana landsberg
atgagtagaatcgtgaaacatccggctatcgctctgttggattccggcattacgtttaaagaagtccggcaaatccatgccaaactctatgtcgacgggacactcaaggatgaccatctcgtgggtcactttgtaaaggcagtggctttgagtgaccacaagtacttagattatgcgaatcagattcttgataggtctgaaaagcctacattgtttgctctcaattctatgattagagcacattgcaagagccctgttccagaaaaaagctttgatttttataggaggatactctcttcgggaaatgatcttaaaccggataattacactgtcaacttcttggttcaggcgtgtacggggttaaggatgcgtgagacagggcttcaagttcatggtatgactatcagacgtggttttgacaatgacccgcatgtccagactgggttgatttctttgtatgcggagcttggctgtctggattcttgtcataaggtttttaattctattccgtgcccggattttgtgtgtcggacagcgatggtcactgcctgtgcgagatgtggggatgtcgtttttgcgcggaagttgtttgaggggatgccggaaagagacccgattgcctggaacgcgatgatctctggctatgctcaggttggtgagtcaagagaagctctaaacgtgtttcacttgatgcagttggaaggtgtgaaagtcaatggggttgctatgatttctgttttatcggcttgcactcaattgggtgctttagaccaagggagatgggctcattcttacatagagagaaacaaaatcaaaatcactgtgaggcttgctactacgttggtcgacttgtatgcaaaatgtggtgacatggaaaaggctatggaagttttctggggtatggaagagaagaatgtgtatacatggagtagcgccctgaatgggttagccatgaatgggttcggggagaaatgtctcgagcttttctctcttatgaaacaagatggtgttactccaaacgctgtcacattcgtctctgttctcagaggttgtagtgtggttggttttgtagatgaagggcaaagacattttgattcgatgaggaatgagttcgggatagaacctcagctcgagcactatggctgcttggttgatttgtatgctcgtgcaggccgcttagaagacgcagtaagtatcatccagcaaatgcccatgaagcctcatgctgctgtttggagttctctgctccacgcatacagaatgtacaagaaccttgagcttggcgtgcttgcatctaaaaaaatgctcgagctagagaccgcaaatcacggagcttatgtcctcttatcaaacatatatgcagattcaaacgattgggacaatgttagtcacgttagacagtcaatgaaatctaaaggagtcagaaagcaaccagggtgcagtgtaatggaagtcaatggagaagtccatgaattctttgtaggagacaaatctcacccaaagtatacacaaatcgacgcggcttggaaagatatc

SEQ ID NO: 167100 - DNA, 707 bp, Arabidopsis thaliana landsberg
atgtggcgcgccacgctgccggacggttcgctgaagtacgccttcctcgacagcctgatcgcgatcaagccgatgtacctgatccgttggggcggcggcgcactgatcctcagcggcatgtgggtgatggcgtggaacctgtggcacaccgccgccgacgcccgcgcgcgcttgatccatccgattccggtgccgatccccgagccggtgcccgaccaggtacccgccccgctaccggcgatgggttaaggaggaagccatggcctacaaacatttcgaattcatcgagaagcacgccgcggtgctcggcatcttcaccgcgatcatggtgtccttcggcggcctcgccgaaatcaccccgctgttcatggaagcgcacacggtgaaggcgccggccggcgtgaagccgtacgatccgctgcgcctggccgggcgcgacgtctatgtacgcgaaggttgctatctgtgccactcgcagatgatccgcgcgttgcgcttcgagacccagcgttacggccacttctccaccgccgaggaatcggtctacgaccgcccgttccagtggggcttcaagcgcaccgggccggatctggcccgcgtgggcggcaagtattccgaccagtggcagcgcatgcacctgctgaattccggcagtgtggtgtcgcaatcgaacatgcccggttacccgtggctgggacacaacacca

SEQ ID NO: 167101 - DNA, 1898 bp, Arabidopsis thaliana landsberg
tttaattttcatgacaccaaattttcttggttttgacttttggcacaagctattgagctgataaagaacaataaagtgaaagcgattttggggccattgacttcaatgcaagctcattttttggttgagattggccaaaaatcacaagttccgattatctcctactctgcaacaagcccgtttcttacttctcttcgcagtccatatttctttcgtgctacattcgaggactcctctcaagtaaacgccataaaagctattatcaagttgtttggctggagagaagccgtacctgtttacgtagacaacacgtttggagaaggtataatgcctcgtctcaccgatgcattacaagagattaatgttcgaataccgtatagatctgttattgctctcaatgctacggatcaagaaatctccttggagcttcttaagatgatgaccatgtccactagagtctttattgtccacatgtacccttctcttgcctcaagagtctttattaacgctagggagattggtttaatgaaaccaggatatgtctggatccttaccaatagtgtgaccgatgacttaacttggatgaatgagacagaggttgaggctatggagggcgtacttggtgttaaaacttatgttcagaaatccaaagagctggacaagtttaggtctcgatggaggaagatttcccgcagatagagctgagtgtctatggattgtgggcttatgatgcaaccacatcactagtgatggccgtcgaagaagctggaatagatatattgactttcagtaatgcagatcctgggaaaaatgtatctgaacttgaagctcttggtttatctcagtttggtccaaagcttctccagacgctctcaacaattcagttcagaggacttgcaggagatttctgttttgtcaatgggcaactgcaaccatcggtgtttgagattgttaatgtgatcggtaccggagtaaggtcagtaggattctggacggaggaaaatggtcttgtgaagaaactagagcagcaaccgagttgcatgagtaatttatctacttggaatgatcatcttaaatacattatatggcctggagaggctggttctattccaactggatcgaagattcctacaaatgacaagaggttgcgcattggagttcctaagagaattggtttcactgatctcgtgaaggtcacaagggatcctctcaccaattcaactatagtcacaggtttttgcatagattattttgaggctgtggttcaagcaatgccttatgacgtctcctatgagttcattcctttcgagaaacccaatggtgaaccagccggtagttacaacgacttggtccaccaagtgtacctaggggtaaaaatcgtctctcaagatagtatctacattaaccatcttagtgaactcttcttttcttccctctgttgcagagatatgacgccgttgtgggagatacgaccatacttacgaaaaggtccctttatgttgagttcacattaccatttatttaaatcaggcgtaggattagtcgtctccattgaagaccaagtgaaaagagatagtgtccctttcctgaaacccttgtcatgggaactgtggttgacttcctttgttcttttcttccttattggatttactgtttgggctcttgaacatagggataacccagacttccatggacctcctaattaccaagctagtaccattttatggtttgccttctctaccatggtttttgctccaagtacattgaatcttccttccccctctacatctctgcatatattgaagtttctatacatcagtacatcacaaatattgatgaatactcttaagttgctgtccgcaggagagagagtatatagcttcgaggcgagggtccta

SEQ ID NO: 167102 - DNA, 672 bp, Arabidopsis thaliana landsberg
ttttttataatgaaaactcattcttctattaatgaattaatatcacaaagatcatcttactaaaataaaaaattcaatggatcaatcagaatttcctttcaatatcgaagcttataaaagataatttcatattgaagtgaggtatatcatcaactggattaaagtgtgtcacaaaaaaattgaagaagattatcttagagctccacctcaagacaacctgcaaagaattctgcgtgttagcgagttgtgggggttttcaaggatgattgggagtattgattgcatgcactgggaatagaaaatatttcatacagcgtgggaagaccaatttactcagggagataagggaaccaccattgttatttttgaagcagttgcatcccatgatcaaaagatctggcatgccttttttaagtgtccaggcacattgaatgatataattaaatgttttagatcgttcacctaatgctcaacattgcatattgcataatatgattgttaatgatgaacgagagacatatgctcaacattggtccgattataatcaatctgaggcaagtggttctagtacaccagaaccattctcaattgaggtgttaccagaatttgcaagtcatgtgcatgctagatccgagttacgtgattcaaatttacatcatgaattgcaagcag

SEQ ID NO: 167103 - DNA, 923 bp, Arabidopsis thaliana landsberg; identical to SEQ ID NO: 10188
  unsure (1)..(923): unsure at all n locations

SEQ ID NO: 167104 - DNA, 1557 bp, Arabidopsis thaliana landsberg
agatcaaacgttaaacgtattcatgtgtgtgtatgtgatattacatggataaatggctatgcatgtatattctatatgacgttgatgtgtggtcgtgtggatatatgcgtgtgtttactgtttagctcaatttttatattcttagtatgtatgcttgatgtgtgtaattagtgtatgaaaagaaaatgacgtggaactcccgaccaggcgcgagtcaaggaagcgaggcgttcggcgacggcagcgcggtcgtctccgcagcccatgcgttacaatttacaagatctctttttctatgataccttctttcattatttaattaatcaccaatttataatgtctttaattaatttggagttttctagctaattcacatttcttattatattgactctttttcactgtttttatgttttcccatcagctttcttcttgtccacgtaaacatttccaaacatttttattttaaaatttctttatacttgtatacataaatacctaataccttgctggtaatatatggtcaaaattagtgaaaccttggaacatttcctgtaacagctcttattactctcacagtcgcagtgatagatatatagtagaataagttagcaaaatacaataattgtaaaaacacatttaatacataagcatgtgagaacatttttacgtgaatccaattgttcattgaataattaaatattaaattgattgttaattgaggattcattgtctaacgagaaatccaaagagcagatgtactttcaaattaaatgaaacatttaagacaacattaaaccaaacgaaaattgaaaaatgaaaaataaaagacacctttttgtttgccacacaatttacgctttctctatctatttatatgtacatacattcactttcaccagaatctcatcaaacacacagtctctctctagcttaacaaaaaaacacgaaacactttgagttccatgtaagcgtccgttgtcttctctaagttacaaaagccctaaaaccctactctcaatatgaatagtttcgagccacaaagccaagactctttgcaaagaaggtttcatcaagacaacagcaccacacaacaacctcgtgacaccacgacacctttcatacccaaaccggcttccaaaaaccataataatagcaactccagctctggagcggccgggagatcattccaaggctttgggcttaacgtagaggacgatcttgtttcatcggtggttcctccggttacggttgtgctagagggacgttctatatgtcaacgcataagcctagacaagcatgggagttatcagagcttggcttcggctctaaggcaaatgtttgtcgatggagctgattcaacggacgatcttgatctgtcaaacgccattcctggccatcttattgcttatgaagacatggagaacgatctccttcttgccggagatcttacttggaagtaattttcctcccctaacattaattttctttattattgtcaggatggccatatatatacaaactatatataaaacgagccttattttaaacatagga

SEQ ID NO: 167105 - DNA, 1126 bp, Arabidopsis thaliana landsberg
gggaaaggaatatcgaccctgatattgttactttcagcgcattgatcaatgcatttgtcaaagaaggaaaggtctctggggctgaagaattataccgtgagatgcttcgaaggaatatatttcctaatacaatcacatataactcattgatagatggattttgcaagcatagccgtctagaagacgcaaagcacatgtttgatttgatggttagcaagggctgctctccggataaaattactttaaatactctcatagatggatgctgtagggcgaagagggtagatgatggaatgaagcttctccatgagatgtcgagaagaggattagttcctgataccgtttcttacagcactcttattcacgggttctgtcaagtggggaatgttaatgctgctcaagaccttttccaggagatgatttctaatggtgtgtcccctgatatcgtaacttgtaacactctgctggccggtctctgcgagaatgggaagttagaaaaggcgttggaaatgtttaaggttttccagaaaagtaagatggatcttgatactgctacttataacatcatcatcaatggaatgtgcaagggtaataaggtcgacgaagcatgggatttgttcaatagtctccccgtcaatggtgtggaaactgatgtcgtaacttacaatatattgatcggcgtatttgtcaaagaagggaactttttaagggctgaagacatttacttggaaatgctctgtaaaggtaatatttatattgtcacatataactcaatgatcgatggattttgcaagcaggatcgtctaaatgatgcgaaacgcatgttagattcgatggctagcaagagctgctctccggatgtagtcacttttagcaccctcatcaatggctactgtaaggcaggaagggttgatgatggattggagcttgtcagcgagatgtgtcaaaggggattagttgctgacacaattacatacaacgctttgattcatgggttttgtaaagtgggtaatcttaatggcgctcaagatatattcgagaagatggtttctagtggtgtgtcctgataccattcctttccatagtatgctggctggtctatggactaaggcggaactacaaaagg

SEQ ID NO: 167106 - DNA, 403 bp, Arabidopsis thaliana landsberg; identical to SEQ ID NO: 72666
  unsure (1)..(403): unsure at all n locations

SEQ ID NO: 167107 - DNA, 601 bp, Arabidopsis thaliana landsberg
  unsure (1)..(601): unsure at all n locations
aagaaattttataattggggcatacttggaccaggtagaattgctanagagttcgccgcggccttagcgcttacaacagactccaggttatacggcgtagcttccagagatanagtccgtgcccaggactttgcccagacatttaaagcagaaaagtattacagcgattatctaagcctgatgcaggatccgcttgtagatgttatctatattgccacaccccacgcataccattttgaattagctaaggcatgcctggaaaataataagcccgtcctttcagaaaaaccgcttacacttgacgccaaacagacccagattttactcgccttatcccaaaataagcaggtatttttaatggaagccctttggacccggtttatccccatgacggtttctattctggaaaatgttcaaagtggcattttgggcgagctccgatatgtcaaagcagacttcgggttcccagcccccttcgatcctggaggcaggttatttaatccctctctcggcggtggttcattactggatgtcggtatcaatcaactatttttgtgctccttacttttaggtacgccagaaagcatcgctggtgtcggcc

SEQ ID NO: 167108 - DNA, 244 bp, Arabidopsis thaliana landsberg
ttggcggaaaatataattttgtagttttgacgggaaaatatgatttttggtttttgcggaaaaatgtaattttgcgatttatgcgggaaaaaaaaatttcatggttttggcgagaaaatataattttgcagttttgacaaaaaaaaacataatttggtggatttggcataaaaacatgattttacagttttgacgaaaaaatatgatattacagttttggtgaaaaaaaatgatttagtattta

SEQ ID NO: 167109 - DNA, 593 bp, Arabidopsis thaliana landsberg
atgattaaggcagtgatgatgatgaacactcaaggcaaaccacgtctagctaaattctacgattacatggtacgatgcttgttgagatatgtttttcaatttcggtttcttcgatcaaagtgaccgattttgtaaaattgggtttttgattttggtttttttggatttcagcctgtggagaagcagcaggagcttattcgcggcgtgttttcaggttctcaatcactttctgcatcttacgatacctaacaatttcataatctgtatcgctaagatctgggtcgatcgtgaaacttgagctgaaattttgtttttttgttttgtttataatttacagtattgtgcagtagacctgagaacgtaagcaattttctggagatcgaatcattgtttggaccggtaatggcgtcttcgttgtttatgctatataaccacaatacttagtttaacaaaaaaaaacgttgctttggacacttattatttagtgtgtttgcaggactcgcggcttgtatacaagcattatgctacactctattttgttcttgtatttgatggttcagaaaatgagcttgctatgcttgatctcattcaag

SEQ ID NO: 167110 - DNA, 341 bp, Arabidopsis thaliana landsberg
tagtatgagactgatgttgtaagttgatgtctgctgtcagtgactcctaccgaaattaggtgttgggtcgcagctcgaaccatggagctgggtctcatattcccgcacatgtcttccggtatgtatccagtcggttctccatgaacaagaggtcacttggcatgttctattgtgttcgggtagaaatgtggctattcctttcagatctttacgttagtagagggatgagtccccagtcaacgtgtttgttttggatcctttattcatgcgcctgggatcggccaatcaacgtgggaatggtagtcacgtctcttttccttttcaaaacacgaggaattttg

SEQ ID NO: 167111 - DNA, 1352 bp, Arabidopsis thaliana landsberg
aaatgcggttgcattactaatgcacaaatgatctttaagatgcacaataacaagaatgtggtttcttggaacacaatggtaggaggtttttcagcagagggtgatacacatgggacgtttgatgttttgagacagatgctggcagaaggcgaagatgtcaaagcggacgagataaccattctaaatgcagtgcctgtttgtttccatgaatcattcttcccgagtttaaaggaacttcattgttactccttaaaacaagagtttgtatacaatgagttagtagccaatgcctttgtggcttcttatgcaaagtgtggctcactgagttatgcccagcgtgtgtttcatggtataaggagtaaaacagtgaactcttggaatgctttgattggcggccatgctcagagcaatgatccgagattgtccttggatgctcatttgcagatgaaaatttctggattgctacctgatagttttactgtctgtagtcttctttcagcttgttctaaactaaaatccctgcggttgggaaaggaagtgcatgggtttataatccgaaattggttagaaagagatttgtttgtttatttatcagtactctcattatacattcattgtggggagctatgcactgtacaagcattatttgatgcaatggaagataaaagcttagtatcttggaatactgtaatcaccggttaccttcagaatggatttcctgatagagctttgggcgtctttagacaaatggttttgtatggaatccagcttcgtgggatttctatgatgcttgtgtttggtgcgtgttcgctgctaccttctcttcgactggggagagaagcgcatgcttatgctttgaagcacctcctggaggacgatgcgtttattgcatgttctttaattgatatgtatgccaagaatggttctataacacaatcatctaaggttttcaatggcttgaaggagaaaagcacggcatcttggaatgccatgataatgggatatggaatacatggcctagcaaaagaggctataaaactctttgaagagatgcaaagaacaggtcataaccctgatgacctaactttcttaggtgttctaacggcttgcaaccatagtggtctgatccatgaagggctgagatatctggatcaaatgaagtcttcttttgggctacagccaaatttaaagcattatgcttgtgtcattgacatgttaggccgagctgggcaactagacaaggctctaagggttgttgcagaagagatgactgaggaagaaaacgttggaaaatggaagtctctgctcagctcatgcagaatccatcaaaatctggaaatgggagagaaagt

SEQ ID NO: 167112 - DNA, 624 bp, Arabidopsis thaliana landsberg
atggcgagcactgagccagagcgtgagaaccgtgaagatgaaaccgaagtcaacgaagatgaagacaccggagctcaggtagctccgatcgttaggcttgaagaggttgcagtcaccaccggcgaagaagatgaagacgccgtcctcgatctgtatgttactcgttccgttaatattctagtttcctttcctctggttaaagtgagtgttggattttcgatagaagatgagtgtcggatttttgatagaagatgtattcttctgggtttatgattttgtaggaaatcgaagatgtatcgattcgataaagaagggaaccaatggaaggagagaggagctggaactgtgaagttattgaagcataaggaaactgccaagccccgtcttgttatgagacaatctaaaaccctaaagatctgtgccaatcacctcagtatgtttgattctctctcgaagaagatctttttttttttcttcgaaagggctaaactttatgtatcttttgttgaaattatgcagtttcgtctgggatgagtgttcaggaacatagtgggaatgaaaagtcttgtttatggcacgctactgatttcttcgacggcgagtagaaagaagagcttttattca

SEQ ID NO: 167113 - DNA, 168 bp, Arabidopsis thaliana landsberg
atgagctctgcaagcaaaacatggatggttgctgcaagcatcggagccgttgaggcattgaaagaccaactaggggtgtgtcgttggaactacgtgatcccgatctgcgaatcagtatctacgcaacaacttaagatccgtgtcgcaagctaagaaagctctcttcct

SEQ ID NO: 167114 - DNA, 419 bp, Arabidopsis thaliana landsberg; identical to SEQ ID NO: 20666

SEQ ID NO: 167115 - DNA, 1662 bp, Arabidopsis thaliana landsberg
aaaatgggttgttctctctcgataccctttgatccgtgtgtaaataaagtctctcaatggctagacatgaaagtaagttatactcacaatctcgagaagaatctcgcagctttggagaaaaccatgaaagagctcaaggctaagcgggatgatttggaaagaaggctcaaaagagaggaggctagaggtctacaaaggctttccgaattccaggtatggcttgatagtgttgcgactgtcgaagacataatctttactcttcttagagatagaaatgttgaaattcaaaggctgtgtcttagccggttttgctctaagagtttaacgaggagctatcgttatgggaaaagtgttttcttgaggttgaggtaggttgagaaactcaaaggtgaagtttttggagtgataaccgagcaagcttcaacatctgtgtttgaggaatgacctcttcaaccgacaatcgttggtcaagacacaatgctcgataaggcagggaaacatctcatggaagatggagttggtattatgggtatgtacggtatgggcggtgtagggaagacaacacttctcactcagctctacaatatgttcaataaggataagtgtggatttgatattggcatttgggttgtcgtgtctcaagagtttcatgtggagaaggttcaagatgaaatcgctcaaaagcttggtcttggtggagatgagtggacacagaaagataaaagtcaaaaggggatttgtttatacaatatcttgagggaaaagagttttgtgttgtttttagatgacatatgggaaaaggtggatttagctgagatcggagttccggatccaagaaccaaaaaaggacgtaaattggcatttacgactcggtcccaagaggtatgtgcacgcatgggggtcgaacacccaatggaagtccaatgcttggaagagaatgtggcatttgatttgttccaaaagaaggttggacaaacaacacttggaagcgatccggggatcccccaacttgcaagaatagttgcgaaaaaatgttgtggcctaccattggcgctcaacgtcataggcgagaccatgtcatgcaaaaggacgatacaagaatggcgtcacgctatacatgttttgaattcatacgctgcagagtttataggcatggaggataaggttcttccgcttttgaagtatagctacgataaccttaagggggagcaagtcaaatcgagtttgttgtattgtgctttatatccagaagatgcgaaaattctgaaagaagatttgatagagcattggatatgcgaggaaattatagatggaagtgaaggtatagaaaaggctgaggacaagggttatgagattataggttgtcttgttcgcgcatcattgttgttggagtgggatgatggggatggacgacgtgctgtgtgtatgcatgacgttgttcgtgaaatggccttatggatcgcttctgaactgggaatacaaaaggaggccttcattgtgcgtgcaggtgttggcgtacgtgaaattccaaagattaagaattggaatgttgtgagaaggatgtcattgatggagaacaagattcatcatctcgttggtagttatgaatgtatggaactcacaactttgctcctgggaaagcgagaatatgaagtatcggag

SEQ ID NO: 167116 - DNA, 3940 bp, Arabidopsis thaliana landsberg
cctgctatacatctgccatacatgcttaatggagtggaagtgcctacggattttgttgtgcttgagatggttttttatcctaaggatcctctaatcctagggagacctttcttagcctcagtgggagcgatgatagatgtcaaagacgggagaataagtctcaaccttgggaagtacatcaagctgtagtttgacatcaacgaaacttcgcaaaggacaactgtagaagaaaatatcagggctcaacctcagccttcgaattcaatcacccgacaaagcacaacctttacacgtgacttgcgagaactcaaaaagaaatctgatgagcaagaagaaaccatagagaagctagctcagatagttgaggaacttaagagtaaactggatcagatgcgagagaaagctcaaccaaaatgcgggattgaaactattcctagaaaaaagtttacttcaagatggtctgaggagatagattatccaccagaagagaaagaggcctatttcgaggaaagaagaattgagtattcggctactcatctctcaagagaggatgctgaatatgatgatgagatcagagaggactatgcagaccctctctatcacccattttcttcttaaagagtttgaggagtcaagctagagactttaaacaagctcacttgggaggaattcccaagactgtttctgtaaataaaacttttattttcttgttatttttgatttgtttttggttgtgtttgtgattctcaggaacagagaaacagtgtggaggtagagtaaaaatttaaaaattttactctacagagcaacaggggatcgagtattccagaaattcaagaatttgaaaaacctctattgcactcagaggccatgaggtcgagtattattgatgattctaaaaaccaaaattttgaaatcatatctatgctcgacagacagaagctacagagacttatagggagtttaacaagtttacagaggattacagaaggttctagtcaacagaaaacagtgcttcagggcaaatagacagaacgtggcccaccacctctcacctttgttcccccacgcattttaagagataacaaaatcccttccttccttctccaccactcgatctcaccctatcctctcccaccgacatcatctctctcccactccaaacactcgaccacgaagactcactctacctcacgtctctcactcgaccaaacctcgcaatccctcttcctctccaaacacttgacctcaccagtcactcgatctcacccctccggcttcgtctctctccttcactcgaccacgaaacaaccgtcgccgttcgctccacctccttcactccctccttcactcgacgacggtactcgatttcgccatctcttccttctcaccactcgacgttcactcgaccgcgctgcccttcacttcgccggaagcttcaccgtctcaccgtcgcctccttaccactcgaccgcaactcgacctctccgtgcttcatcttcatcttcatttactcgacttcgccggagctccttgccgttccagcttcgcatactctctcaccgtctctccttcactcgaccacttcacacttcgcctcaacatcttcgccggagtttctcgccattgaccgtgcttccgtcatctccgttcactcgacctcgccattcactgcgcctccattcgtctctttactcgactgctcctcaaaccgccaccgtcttctctaaattcgccgtttactcgaccacgttgttacgtctctcattcgtgtacactcgaccgctatacccgaagccacaatatcactgtactcgaccgtttcactcaaccgcgtacttgactggtttagtgtgtgtgtttatttgaactaacatattgatatttggttttgagttacattctttttcagggaatcaatatgagtaactacagtggcgaatcctccatggatgcggattacaacgtcgatgaagctgaaccttggtcaactagaccagagagagagcaacaggcttatgagagcttcagagccgagacccaacgctcagtagctcgacgcaatgaaaggagagctgagattgctagaggaaagagagcgatgacctgtagatatgagttgatcgacgaagatattgacgtcgagtatgagcctgagtcatggcacagagaaacgaagctgttgaacaagcctgatgaagttacaatggaggagtacatcagacttttcgaggtgaacgacttctggggaacgaggtacccctgttatgagactttggcccagttggggctactggaggacgtacaacacttattcgagaattgtcatctggagacgctgatgtcttacccatatgttgcttacaagaaggaaacaatagagtttctctctactttgcaagtggagatgtatcaaggacttacagcagatgagctggagagtgaagggttggggttcttgactttttcagtgaacgagcagcgttaccagctatctatcaagagcatgaaaggattgtttggtttccccagtggaaagggaactaaacccaagttcgagagggaagagttgaaggatttgtggttaaccattgggaatgatatagcgctcaactctgcgaggtctaagagcaaccagattcaaagccctgtgatccgctactatcagcgctctttagcaaatgttctgtactctagggaatctacaggcaccgtgtctaacacagacatggagatgattgattctgcactcaagggcattctccgcagaacaaaggggaagaaggtcctgaagggcgacctcaatgatgcaccaacggttatgcttctgttgatccacctgtgtggatacaggaagtgggcgcacaccaacgagaagaagagggtgcgaggagccctttgtgtaggtggtgttgtgacaccgattctgattgcatgtggtgtacctctcacgtctccagggtttgatccgaggatgatggatttagatcatttgcgtcgttgtgagtttctggagcatgacatggttggcgatttctatcgctacaaattcgagcactccttgacccgaacaaccaacattctgcttccctgcaccgaggccataaccatacttcagggagaaaacattgacttcaagcctgcgcgtgattacctctactttgagagcgctccaccgactgatgacaacgtccctacaatagaagctacagaggatgagattgctgagacagatgaggatagggaggaggagtacgatacgagcatgtatcatttcagtgagcatgtacctctagcgcgggagaccaagagcttgagcgaagctcacagaaacaacagtaagttgcagaggtggtgcaagaaacaagataggctactcatcaagtgcttcaaggccatcaagtttctgacagacaagctatgctgctcctcttctaccacagttattccgcagggagagcctcctcaggacatgccctcgaggagatatgacgcgccagagccaactcgccacaggcctgggccaagtcaccacaggcctgagcctagtgaccgagtagtcccactagtccctgcgaggcattcatcattcgagcctcgggagctcgggagaaagaagaaggctgcactcgctcggtctggcagcaggagtacacgacttctcaagtctcgtagcttacgcgacagcggtgctggccgcagcagaagaagagaggtcgagtatcatcagagcggtgctggccgcgacaaatgagcagcggtcgagtacccccagggggaagctgagacacaatagggagattcttcgatggcctggcagcaatcacaggcagctattgacgactaactctgctccttcttccactgacgtaaacacctcactccaccattgtaatataccatctcctgtttttattttgtttctggatgtgttttttcc

SEQ ID NO: 167117 - DNA, 675 bp, Arabidopsis thaliana landsberg
atggaaaaaagagaagagaagaaaagagaaatacaaagaattacaaagtcttcatcaacttgtaatggagtatcttctgatgaatatattcccattgatctgacttgggagatactaatgagactgcctgcaaaatctatcgtaagatttcgttgtgtatcaaaactatggtggtctataaccacccaacaagatttcatcaattcatttgcccttcgacaatcatcaatcctatgtcagagtcttcttcttacttttatggccaaggatgaccagcataagcaggtcttatacatgttgtcatttcatgagaactttaaaagttattctgatgtgaacgattttcataacatgccccctacagaagattgtcattattacaactatagtgcttctgaaagaacatataaccttgcttcaacctaaaatctctaagcccctaaaaatctatttaagatatgatcctaaggagaatacatataaacttctatcggtggcaaatttaaatacgctatgggacgaatatcaaaagcctcatattcttacattaggatctcaagaatcatggagggtgataaaaaacagccctgatcataaacctacaagtaggtattattgcatcaacggagttgtgtactataatggatatatatcatctgaagaacatcgacgtgg

SEQ ID NO: 167118 - DNA, 432 bp, Arabidopsis thaliana landsberg
  unsure (1)..(432): unsure at all n locations
catgcttaacttcattgagccgagccacccgggttttatgacccanccgggtcgagttcggggttcggtttcaaaacgggcnnnnnnnnnnnnnnnnnnnnnnnnnnnnnnnnggggaaaatgggtcgcggagatccgtttacccaggaatcgaacccgactttggctcggaacattcgacacggctgaagaagccgcgttggcttatgatcgtgccgcgttcaagcttcgtggtgactcggctcggcttaacttccccgccctccggtaccaaaccggttcatctccgtctgataccggcgaatatggtcctattcaagctgccgtagacgccaaactagaagccatattagctgagccgaagaatcagccgggcaagacggagaggacgtcgaggaaacgagctaaagccgcggcttcttcccctgacca

SEQ ID NO: 167119 - DNA, 402 bp, Arabidopsis thaliana landsberg
catgtcttctcatcggcttctatccaacagacgagaacattcgagccgcagcgcgcatgatactcgatgagtatgcggcacggtgcggatcgcatgaaggatcttctacgcatacccggcgtcgcccgcaagaccgcgaatgtcgtgctttcgacggcgttcgatacgcactcagggatcgccgtcgatacccatgtgcgccgcttcgcgatacgattcgacctgtctgatttcaaggatcctatacggatcgagcgcgacctcatggagctcatgccgcctcgtgactggtgggggttcaatcatcgcctcgtactctacggacggcatatatgccctgcgcgaaagcatgattgtaccgctcatcccttgacccaagtctatcccgcggccaatgattcc

SEQ ID NO: 167120 - DNA, 1965 bp, Arabidopsis thaliana landsberg
agctctaagccaaaaccaagtccaaagctgacactgttgcctctggtatttctcatcttctatgaagtttctggtggaccttttggtgtggaggattctgtgaaatcaggtggtggtcctctcttagcccttttaggcttcttgattttccctctgatttggagtatacccgaagctctggtcacagcagaactcgctacaagcttccctgagaatggtggctacgtggtttggatctcttcagcttttggtccattttggggattccaagaagggttttggaaatggttcagtggtgttatggacaatgctttataccctgtattgtttcttgattacttgaaacattcgttccctgttttggatcatgtagcagctcgtgttcctgctctgttggtgattacattctcactgacgtatttgaactatagaggattgcatattgttggtttttcagctgttgtgcttgcggttttctcgctctgtcctttcgttgttatggctttgcttgcggttcctaatatcaggcataagcgttggttgtttgttgatactcagaagattaattggagaggctacttcaatactatgttttggaatctgaactattgggacaaagctagtactcttgcaggagaagttgatagacccgggaagacgtttccaaaggctttgtttggagcggttttgttggtcatggggtcatatttgattcccctcatggcagggactggagctttaagctcatccacttctggagaatggagtgatgggtattttgctgaggttggaatgcttattggaggtgtctggctcaagggatggatacaagctgctgctgcaatgtctaatcttggattgtttgaagctgacaatgagtagtgatgcttttcagcttctcggtatgagtgagattgggatgctccctgcattttttgctcagaggtcagttagttaatccccatgagtgtgtttttggttatgcccttgaaaaatactcggtcgaacgtcgtttgtgtttgcaggtcaaagtatgggacaccaacaatcagtattctgtgctcagctacaggagtcatattcttgtcatggatgagctttcaagagatcatagagtttctgaatttcttgtacgcattaggaatgcttcttgagttcgcagcttttgtcaaactaaggatcaagaaaccggatcttcaccgaccttatagagttcccttaaacacctttggagtttcaatgctgtgcatgcctccttctttgcttgtcattcttgtgatggttttggccgccccgaagacatttctgatcagcggtgtgatcatagttcttggattctgcttgtacccattcttaacactcggtaacgagaagcagtgggcgagatttatctccgaaggaagcaagcccagtttcaggagtttcatcagagtcacagcttggttgttatatcttggagatgagtctgctgctagccttctgccatgatccccaccaacaaaagtgtgtgattaatttattgcacaagtctttaaaagcgcatggtacgtcatgtacagctgtaattaagaatgaaatttatttatgtcttgttcagctttgaattatagcacagaaaacagaacaaaaagagtgtacaaacaggagggtttgtacctgagccaagtgtctaaacatgtattgcttatggttataatttgtaaaaacgtgagttaattcattcaattttttgttgatttctgcccaaattctaattccaattcttgagtttaaaacagttgcacagtcgctttaggtttcttgcttcgacatcttctctgcttctctttgcttattggaccttttggagtcatgtttttactctttaccatataatatgtttctgcagcttttggttacttacttaaggcaaagactcaattaaaaccacaaatggcgacatcactcattacttgctattttatg

SEQ ID NO: 167121 - DNA, 402 bp, Arabidopsis thaliana landsberg
aagaaaaagataaaaaacaaaaggaaaagagggggggagacaaatgaaggaaaaacgcggaaaaaaaaaccctaaaagaaaaaaaaaagccacggggtaaaaaaagaaagaagagaggagacacccaaagaaaaaaaagagggggacaagaggaggcaaaaaaaaaaggggcaaacaaaaaaaaaaccgagtccggagaaagacaaataaagcccaagaaaaagcaaggctagacaaagcaaaaaccacaaaaaatccgctcgaagcacagaccaatcagcataaaagaacggagggccgagaaaggagccaaacgaaaaggaaaatccgaagggagtaaacaaaccgaaacaatgaaaaaaaaaagaacgagaacgcaatagcaaaaaaaaccaaaaaata

SEQ ID NO: 167122 - DNA, 698 bp, Arabidopsis thaliana landsberg
gggaggctgacagatctcacaacattgacaatggccgcgccatcaagtactaccaggctggctcttcggagatgttcgggtcaactcctcctccgcagtcagagaccacgcccttccatccgagatctccctacgctgcgtccaaatgcgctgctcattggtacactgtcaattaccgagaggcctacggtctgtacgcctgcaacggaatcctcttcaaccacgagtcacctcgcagaggcgagaacttcgtgactcggaaaatcactcgggccttgggaaggatcaaggtcggattgcagaccaagctcttcctgggaaatatacaggcttcaagagactggggtttcgcaggagactacgtggaagcaatgtggctgatgctgcagcaggagaaaccagatgactatgtggttgcaactgaggaatcacacaccgtcaaggagtttctggacgtgtctttcgggtacgtggggctcaactggaaagaccatgtcgagatcgacaaaaggtacttccggcccacggaggtcgacaatctgaaaggagacgcaagcaaggcaaaggaaatgttggggtggaagccaaaagtagggttcgagaagctggtgaagatgatggtggacgaagaccttgagctggccaagagggagaaagtgctcgccgacgctggttacatggacgctcagcagcaacct

SEQ ID NO: 167123 - DNA, 1048 bp, Arabidopsis thaliana landsberg
aaagcccaaacttgtgcttagagcacaagctatctctgcggcccaagagatcgtacgttgtaaaacgccactgacagtattagacggcacaataaaggcccaatctcaaccggtgaaagtttctgtgaggatcaaaggaagtgggatgcttcctactgtagctcacccaattaaacgtccgggtcggatcaaagtctcgaaaacgtttgaaacgtgtgtttgcaccatgacgcgaaacgcagcaaacgttttacgagaatgggtgatgtatcacgccggaatcggcgttcaacggtggttcatctacgacaacaacagcgacgacgacgttgtttccgagatcaagaatctagaaaaacgcggttacaacatctcgagacatttttggccgtggatcaaaactcaggaagcaggattcgcaaattgcgcgattcgagcaaaaagcgattgcgattgggtcgcgtttattgacgtcgacgagttcttctacatcccctctggtcaaacactaaccaacgtaatcagaaatcacatgacaacactatcatcgtccggcgagatcggtgaaattcgaacgccgtgtcacagttttggaccgtcaggacttagagatccaccgcgcagcggagtcacaacggcgtacacatgtcgtatggcgttaccggagagacacaaaagcataattagaccggaatcgctaaacacgacgctgataaacgtcgtgcatcattttcacttaaaagaagaattcgcgtttggtgacgtggataagagtacgatggtaattaaccattataaatatcaggtttgggatatttttaaggagaagtttaaaaggagagtagcgacttatgtggcggattggcaaaacgaagagaatgtcgggtcgaaagatcgggcacctggtttagggacccgacccgttgaaccgtctgattgggctgagagattctgtgaggtgagcgatattgggcttagggattgggtgttggagaaattcagtgaccgtaaaacgcagcgtttagtatgggagagagaagcaaggaga

SEQ ID NO: 167124 - DNA, 756 bp, Arabidopsis thaliana landsberg
taggggggtgggggatgaagaaaaaaggttcaagtacctatttgttgctttgggggctgccattgaaggatttaaagtcatgagaaaagtgattattgtggatgcaacatttttgaagactgtatataaaggtgtgctcatttttgccacatctcaagacccgaatcatcaccattatcccttagcgtttgctgtagctgatggcgaaaaagatgttacttggaagtggtttttcaaaactctcaaaaccattataccagacagttcggaattggtctttatgtctgacagaaattctagcctcatcaaggcagtggctgaggtgtacccaagctctcaccatggaaactgtgtttatcatttgtcacagaatgtgagaacgaaagtttcatacaacaaagaagaggttgctaaaaagttcagacaaattgcatccatttgttcagtgtctgagtttgaacatgaatatgcagattttagaagaagacaccctaaggtagccacatatcttgatgaaaacactgatttggaaaaatgggcaagatgtctttttcctggagttaagtacaacgttgacactagtaatgcggttgaatctatgaatggtgtgtttagggatgtgagggggtatgcgctattatatatgatagatgcaattattggaaaatttgcagaatggagctgcaataataggaaggaagccttaagtggatcaaatgcacaaagacatgttccttttgtggagaacgagataca

SEQ ID NO: 167125 - DNA, 506 bp, Arabidopsis thaliana landsberg
aggccctgatcgagaccacgcgtgcggcgttgccgctgatgcggcgtacgcgcggcggccgcatcgtgaacctgtcgtcgggtgccggtctggttggccggggtggacgcggctactacaacgcgacgaagtttgcggtcgaaggcctgtccgaagcgctggcggaagaagtggcgcccatgggaatccgcgtacttatcgtcgaacccggcccgtttcgtacggaatttctggggcgctcaatcacgctcgccaagcaccagatcgacgcctacacctcgaccggaggcgcggcccgcagctatcgcgaaggcaacgacgggcgccagagcggtgatccacggaaggccgtcgccgtaatgctcgaggccatcgacgccaagaatccgccactgcacttgccgctcggtccacgtgcccatgcgttcgccgaaagcaagatggcatctttccgcaaagacattgatgcatggcgcacgttgtccatcgccaccgactttgattga

SEQ ID NO: 167126 - DNA, 648 bp, Arabidopsis thaliana landsberg
tgacaatccagcttgggcagccggatgagtgacggttaagctcgaggcagctggaagagtgacggttgagctggaagagtgttcgaccagctgggcggttatccggacggttacttgggcatttatggtcgaacggatacttgcccaaagggtggataagggcgagcagttacgggcgaagatatgcaactcttcggaaagatgcaaggaacggatgtgttgattcggaaagcatctattcgtctcctatataaggaagggcgcccatgaccatttcattgaccacaacacacagaaaaacaccggaaactcaccattaaactctcgcctctcggggaaataaataataggaggattctgtagaagaagggacggatcgaccgaacattgagaaggaaggtgaggaatcctagacttcgagtctaaggattctaggatgcgagttagtagttggatccttgaaaggatcgactagagggctgggtagtattcgggtcatgtgcatcctacacaagactcgactgaggcggggacgcggctcggtggaggaccggcgggtcttaattgacctactggaaatcggcttgactgatgcgcgatcttcccctctctgaatcctctctgcggatccgagtaatgtatggccta

SEQ ID NO: 167127 - DNA, 647 bp, Arabidopsis thaliana landsberg; identical to SEQ ID NO: 4347
  unsure (1)..(647): unsure at all n locations

SEQ ID NO: 167128 - DNA, 578 bp, Arabidopsis thaliana landsberg
  unsure (1)..(578): unsure at all n locations
atgaagcgctatgctcgtgttgccattcttatggtctcggtgtttgccttgattacctttgccttggttgcctgtagtggcagcgctgggtcatcagtaaaaggacctaaagcaacggatgttgtaagtatttgaagattgtacttctttttcacgggatttataggactcttgaaaccggagttctagttttatttaccgtgttttttctgtccgctaggtcactttctccatcagcattggtggcgagcccgccggcgacattgaaattggactcttcggtaagacggtgcccaagactgtggaaaactttaagcaactttgtgtgcgccacttgacggaggtaagagagattgggcagataaaatcaggcaaaaaattgcaactgtttgtattgttttcagaaatctgaagatggcaagctggtcggctacaagggctccatcttccaccgtgtcattcctgaattcatgctccagggtggtgatttcactcgcggcgatggcactggtggtcgcagcatctacggggaaaagtntgctgatgagaacttcaagctgagccactacngtgctgga

SEQ ID NO: 167129 - DNA, 194 bp, Arabidopsis thaliana landsberg
gttttgcaccttattaaatggggagtcaccaattatgggagctggtactttgcgtagaagtttatctccactttatatagaagtcgaaaattttttcagaggcgatgaagtgtatgattggtgtagacaaccaagaagtagtattttttacagattgtttagatttggtaaagatgatgtctttcccaactgaa

SEQ ID NO: 167130 - DNA, 396 bp, Arabidopsis thaliana landsberg
gtcgtttcattgcaatcgaaatatcaaaaatcccaaatcaaaagccaaatccctaattcctatttggccaaactacaggtccaaaattttgaagcagaaaatataagattcatagccagagaaatcatgattttaagaagattagatcatcccaacattctaaaactgaagggattatcgcatcagaaattcaaacagcatgtactttgtgtttgattacatggagcacgatctcgaaggcttatgtttatctcccgacatcacattcacggaggcacatgcaagaaagatacacacacacacaaaaccataacctctcctgcaagtgactacatttctttattctgacaaaccttaattttgttttcaagtcaaatgttataagcaacctgagag

SEQ ID NO: 167131 - DNA, 324 bp, Arabidopsis thaliana landsberg; identical to SEQ ID NO: 71424
  unsure (1)..(324): unsure at all n locations

SEQ ID NO: 167132 - DNA, 381 bp, Arabidopsis thaliana landsberg; identical to SEQ ID NO: 72516

SEQ ID NO: 167133 - DNA, 661 bp, Arabidopsis thaliana landsberg; identical to SEQ ID NO: 2

SEQ ID NO: 167134 - DNA, 1666 bp, Arabidopsis thaliana landsberg
tgccaagatcgataagttggtcattgctctaccaagaccaattgttgagagacctattcactacatcaccgacgaggagcaacagcagattcaagaagggcagtcctactcatatgaggaagtgagctacatacagaatcaaggtggctacaacaaaggatacaacaactacaagccacctccttccaacaacccctaccgcaacaacactgtggttcacccacaccctccggtttatcctccgtatcagcatcaacctccgccttacgttccattccccaatagtttcaaccccggttcacaccctatcccaactccaccaataccaaccccacctgatctagactttacaactctatttcagcagctcgtccaaagtcaaaaaggctaggattctccaagtacaaagcatgctacattcagctagttcttgctgataggtcagtgagaatacctcatggcatgttggaagatttgccggtgaggatcggatcaatagaaatcccaactgatttcgtggttctagaaatggatgaagaacctaaggatcctctcatattgggaagacccttcttagatgtcagaaaaggtaaaattgatctaaaccttggaggaaacctcaatatgacctttgatattaagaaaaccatgaggaagccaaccattccaggtcaagttttctatattgaagagatggatagattggcagatgagttgcttgaggaacttaatgagaaagatcatttacagagtgctcttaccaaggatggagaagagggatacctatacctagaaactcagggttacacagttttattagactcccatagaccggtagaagcatgggagacatttgaggagttgaatatctgttcagaggaggtcagttcagtcacagaaagtgaagaaagttctactcgacctgtgtactctagcagtcaatcgaacaagataacagaggaaccaaactcggttggaacaaccgaggacactcgatcgagcagcatctctgatgattggtcagaactcaaagctccaaaggttgaccttaagcctctcccaaaaggtctaaggtacgcatttcttggtcctaatgacacttatcctgttatcataaatgatgaattgagtgatgaacaagtgcatcaattattgaccaaacttaggaagtataggagagcaattggatattcattggcagacattaaaggaatttcacctagtttatgtactcatagaattcatcttgaaaatgaatcatattctagtgttgaaccacaaagaaggctgaatccaaatttaaaagatgtggtgaaaaaggaaatcctgaaattgcttgatgctgatattatctatcctatttctgatagcacttgggtctcgccagttcattgtgttcctaagaaaggggggatgactgtaattaaaaatgatcatgatgagctcattcctactaggacgataacaggacatagaatgtgcattgactataggaaattgaatgctgcaactagaaaagatcattttcctttgccattcattgatcaaatgttagagaggctagctaatcatgtttattactgttttcttgatggttatagtggtttctttcaaattgctattcaccctaatgatcaggaaaagactacttttacttgcccctatg

SEQ ID NO: 167135 - DNA, 2636 bp, Arabidopsis thaliana landsberg
cttgcgtgctcatatgctctatgattatcaagtaacagatttatatagttaacattttcattttgatttcatcttctttgaacaagatttatcatatgatattaatttgtttcttaatacttcttcttatggtagagaattcatttactttacattttacaaaaaagagagttgacaagggtcgagcaagttataccagtatcctggattcagtccaatcctcaacatggttataagcaattcctccagtactaaacaaaacaaaatcaaatcatcttcacgcccaagagattatgtctccaaaatcggctaaaattttgagattttttctattcaaaatagatgaaggagacaaagaaaagaacacataactaacgtttataaccgaaactgtatatggtggctatttatttctgatctaaaatggctcaatgaagacaattttgactggtttttcgggacgaggcaaacttgaggtttaatttggtgaatttagcaaactttagaatttcgtttatctccttttcctactagaattatctttttcttgtaaaatttctatttgaaattcaacagtctttcattatagttacaaattaactttatcaagtatttcttatattccaaatagcattcttaaattatatattttattcaactatacttacaaattaactttatcaagtattgaattttaattttaatttgtaactccatatatatcctaattaaatcagggtttatgtaactatctatctgtagcctctcaagaaggtttttgaaacttgacctaacttatcggtgcgatgttgtttcttctttgaaacttgaaacaacaatcatcatgatgatgatgtcaaatcttccaaatgatttggttgaggagattctctctagggttactgtgacgtctatgagaacagtgcgatctatttgcaaaaagtggaacgctttatccaaaaaatggtttttttttggtaaagcgaagcagtttcttggattcatgatgatggattctagggtttgttccttgagatttgatctccgcaaggacttggtggtcgagccaccatctataaagcaggtaagtatacttgatcaaatagaggtatctaaaatctttcacagcgacggtttattgttatgcataatcaaaaacgacacgacgaggctcttggtctggaatccgtatttggagcaaacgaggtggatccaacccagacacaatttccacatattagactgttatgctatcggacatgacaaaaaccgtaagcacaaaatcttgaggtttgtggatgatttcctccctgtagaaaacgtggttttcgggtacgaaatctacgactttagccttgattcatggagggttcttgatgtcactcccgactgggacatatagtgttttcaacgtggcgtgtctctcaggggaaacacttactttttcgctaaagagagatatatatttgaaggaaagggaccggaagaaatagatgtaacagagactgaagactttttactctgttttgattttacggctgagagatttggaccgcgtcttcctctgccttttcactcttattacgcagagactgtgactctctcttgtgttaaagaagaccagctctccgtcttgtgccagcgccagccctcggaaccatctgagatcttggagatttgggtttccactaatatccagcccaatgcagtgtcgtggagcatttttttgaaagtggatatgagaccactcactggttttcagtttaacgatatggctgggagtttcttcattgaccaggagaacaaagtcgccgtggtttttgatcttgacgaatataaagggagtgagacatgtcgcaaccaaacagcttacattatcggacaagatgaatacttcaaatctgtgaatattggggaggctccgaatctcggaagacctgagaaatatgctccacacatatattgtcgcccacttgtgtgctcttcttatgctccacacatacaattttcgttctaattcatgaaagagttttgatctcacttccgactggtatatagggtctaataaacgtggcgtgtctttcaagggaaatacatacatcttggctcaagggaaaataagagtggatagtagatggaagattgaggctattttactctcgtttgattttacaactgagagatttggaccgcggttgcagcttccgtttggcttttattatccacaagatttgttctctttatcttgtgtcagagaagagcagctcgtggtattacatcaaagctggatggtttctggcgaactggagatttggattacgaataagattgatcccggtgttgtctcgtggaccaagtttttgagatccatctcttgttgtcgaattagtatccaagctgggagtttcttcattaacgaggagaatcaagtggctgtggttttcgatcttgacgaatataaagggagtgagacatgtcgcaaccaaacagcttacattatcggacaagatgaatacttcaaatctgtgaatattggggaggctccgaatctcggaagacctgagaaatatgctccacacatatattgtcgcccacttgtgtgctcttcttatgttccaagcttagtgccgctccaa

SEQ ID NO: 167136 - DNA, 1366 bp, Arabidopsis thaliana landsberg
atggataatctagtgttatgtgaagcaaacaatgttcctctaacgcccataacgttcttgaagagagcttcggagtgttatcccaaccgaacttcgataatctacgggcaaactcgcttcacttggcctcagacttatgaccgttgctgtcgtctagctgcttctctcctctctcttaacatcacccgaaacgacgttgtaagaatttttattttgccttctgatacttatattggactttttattatatgcctttccgagttactcgtgctcacgtgtcataatcagcatatgaaccacatgacttctctttttctttcgttttagctttacatctactgatgactatcatattgcttgtatcatccttacttttctttaggatggtacttatatttaacgttaacgcgtatgatgaatctttgtttaggtctcgattttggccccaaacgtacctgccatgtacgagatgcactttagcgttcccatgaccggagccgtacttaatcctattaacacccgtcttgacgctaaaaccatagccatcattctccgccacgcccagccaaagatcttattcgtggactacacgtttgctcctttgatccaagaagtcctccgtctcttaccatttgacgcttcaaaacttcacccgctaatcatatccatcattgagattgattccactacgaagcgttcctccatggagttagactacgagggtctcatccgtaaaggagatcttacgctctcttcgtcagcaagtttgttccgtgtccacaatgagcatgacccgatctctttgaattacacttctggcaccacgtccgaaccaaaaggtgtggtgattagtcaccgaggagcctacttgaccgctttgagctcgattcttggctggtaaatgggcatgtgcccggtctacctctggacccttccaatgtttcatggaaatgggtgggcgcacacatggtccgtcgctgcacgtgggggcaccaatgtatgcatcagaaatgtgacggctgtagaaatatataagaacataggattgcatggcgtgacgcacatgtcttgtgttccaactgtatttagaattctcctcgaaggaagtcgaaccaaccagtcacacaagtccttgcctgttcgggtactaactggtggttcatccccgccggctgcacttcttgagaaggttgaacggttggggtttcaggtgatgcatgtatatggacttactgaggcttccggtgcagctctctattgtgagtggcaggacgagtggaacaggtactaaacacaattatgagtttacacaatttttactacaattctatttatacttaacgattaatataaaaatcctcaacag

SEQ ID NO: 167137 - DNA, 1328 bp, Arabidopsis thaliana landsberg
  unsure (1)..(1328): unsure at all n locations
accggaggaagtgaggaggatccattcacaaaacccattggaagatggtctgtcttcttctatggagtagggcatatgcttaatgacattactgcttcttgttggttcacttacctcctcctattcttgacccaaattggtctctcccctaggtgcaattttatctaaattttcatataattctgacccttgatatgtaataattcaaccataatcaagttttcttcttctgtagagatgcagccattgttatgctctctggccaagttgctgatgcatttgctactatcttcactggtgaattggtactctacttctctgtttctgatttagtctttagcttgttgtttcttactagtggtgctaattcagtttgaggtagatgaatatggtcttctgttatggcagattgataggtttggacatttcaagatttggcatgctgcaggatcattactggttgcaatctcgttttcctccgtttttggaggttgtctgccttgttcgatcctccataacgactctttaacacttgaaaccttctcctacagtatgtttgcagctatatttaacattggatgggctgctactcaagtttctcacatgtaaaacaatctttctttcttttttcatttgatcttccctttagattaatctcaaagtttaatcagtgagatgttcattttttgcataatctttgtgttctttagggctatggttaattgcattacattgaattcaacaagcagagtagcactaacaagctcccgtaacgcgtttagcatggttagctctttccctttagtcttatttaggctctttaaaatgcctctttaggtttatatgtaacatttccatcgaccgtttattcaggttgctaatttaggcttatacgctattgctttagttgtatttggtgttagcgaggccgtgacaaaagaaaataccgaatctcaggtttgtgcttctattgacttgattatggtaatgccttttgatatatgattctaagtctgcctaagtctacagtatcgttggattgcttattcatctatcaccgttggctgctgctttgtggtcatatttcttatggggacaaaggaaccaaggtaatgcgcacttttctttgaaattttaccgacgtttcatgcatgatagatgatatttttattgaatctgagttgctttaatttgtttacaaaggctgagggtaaatctaagagaaactacccgatcaagaataccatggtcttattggttccgtaacattctatactatcaagtngctatggcatatctcctgactcgactagtattgaatgtttcac

SEQ ID NO: 167138 - DNA, 353 bp, Arabidopsis thaliana landsberg
agatcgtttgcggattcgacggcgaggcaggcaaattgattgttgcggatgtgatcgtctgcgactccggcagacttcggttcggagccggcgacatgtgcaagcagtcctatcgggacggctcggccaccttgcccgaggtcaagaagaagttcgacgaggtcgcggatctcaccgatcgtttcgagtgaccggtcgtatgccacaacgcaagtagttcatcctcggaaagcccgaggccctcaagcacaatttcgcaagttactggtcgcggcgagtcacagatgagcatcgcctcgtgtacaagctggccgagaacgaggctgcgcatcgcagcctgtcgggatcattgc

SEQ ID NO: 167139 - DNA, 1324 bp, Arabidopsis thaliana landsberg
cgcaagatcgttggaaccatcatcaacgctgaaatggaagtgatggtgatggcgctgaaggaaccctttggtgtgaccaagaacaacactgtgttggtaggtgacaagtctaactcttatgctgttttcttcttgctgtgccacctctagagctacaaggcatgtgatatgtctattatttgcatattttcagtgttcattcatcatcgtttcgagtccagtttcgtattattcatcactattttatatctttctcatcattcttgcatactttgcatgattaggatagctttgcatacatattgcatttctgagttgttttcaggtgatttggagctgtttgcgagcaaattggaagaaacgagctagaaccagaagatatactcgaccaccaggtcgtgtgcatccatcgccatactcgaccccctggtcgagtgactttggagccattcttcacagctactcgacccccaggtcgagtatcctcagctcaggccactcgatgacgccactcgaccccctggtcgagtatcactttgctacaccacctgaccacactcggccgttcactctaccacgttactctaccccctggtcgagtatcatcactcaccaccaacaccatcactcgaccggacactcgatcacatcttcatggtctactcaaatccgcactcaacgagacaagctgagcacaaggaagagaagacgaagtgtttgggagcggcctggacctccatcggatcacgaagcccatctcggcccattatcactctatgggccgggcgattaggttattggcccatcactactatcattttatttcgttttgtataaatagatgtcttagggttctgtcttgagacatccagttgacattgagttattgcttcagttttattttctgttttacactgttgcgccgcttttgcttctgcaacctgtaattcgagatttttccaagttattcagattccgcatttgatttcatctttcatcttgtttctctactctttatctctttacttatacaatattatcatttatctgcgtttatgtctttgagcatgttgtctgagtagtgacttagaattcttaaggatgagatagagtagttgtggaatccgtagtctgtagaatgattaagttttataattgattgaatcccttcagtattagttgtgtttactgcttatttctttctgatcaactggaattcgatcccaagcattcccgcacccagaaggtgtttgatggaatgcttgatccactagttcctgagatatgcgtctctatcccaagggattggccgtttagagcgttt

SEQ ID NO: 167140 - DNA, 617 bp, Arabidopsis thaliana landsberg; identical to SEQ ID NO: 73863

SEQ ID NO: 167141 - DNA, 504 bp, Arabidopsis thaliana landsberg
tcgactatcgcatcttcaatgccgacggcagcaaggtcgggcagtgcggcaacggctcgcgggcgctggcccgcttcgtgcgcgagcacggcctgtccgacaaggcggcgatccgcgtgcgcacgcagaccagcgtgctcgagctgcgccatgtcgacggcaaccgctaccgcgtcgacatgggcgcgccgcgcttcgagccggccgacgtgccgttcgatgccgccgcgcgcgccgagcgctacacgctgacgctcgagcacggcgagccgctggaggtcggcgtcgtcagcatgggcaatccgcacgcggtgatcgtcgtcgacgacgtcgacaccgcgccggtcgcaacgctcggcgccgccgtgcagcgccatccggcgtttgccgagggcgtcaacgtcggcttcctgcagatcgtcgatcgcggccatgcacggctgcgcgtctacgaacgcggcgccggcgagacgctggcgtgcggcaccggcgcctgtgcagcgg

SEQ ID NO: 167142 - DNA, 478 bp, Arabidopsis thaliana landsberg
  unsure (1)..(478): unsure at all n locations
aaatctgcaggcaggattgttatcggactatatggcacnnnnnnnnnnnnnnnnnnnnnnatgtctttggcatcttgaatgcaaatctcgggatttggttaattgttttaaatagtttctaatgtaagatttctttactttttgcagaaaatttcagggctttatgcacaggggagaagggtaaaacctcaagcggaaagcctttacattataagggaacaccatttcatcgtataatatctggatttgtaatccaaggaggagacattatccatggtgatggaaaaagtagtgactcaatctatggtggaacctttcctgacgaaaatttcaagatacagcattcacacgcaggtgcgcatatacatactttaccaatttatgaatgttgaagaattgttccggaaaatggttttagagcattttgcgcaagcaatttacgtatacttgttgttcataggaaaatgaaattttgtat

SEQ ID NO: 167143 - DNA, 1287 bp, Arabidopsis thaliana landsberg; identical to SEQ ID NO: 29336
  unsure (1)..(1287): unsure at all n locations

SEQ ID NO: 167144 - DNA, 725 bp, Arabidopsis thaliana landsberg
caatgtttgtaggtatttgatatcatttaaggcgggagggccgtcattggacgtattgctaggaaggagagatggccggacagcgatccgtgcggacgcagtggctgcacttccactaggacctgattctctcgagattcttacttccaaattctccgtacataatcttgacactaccgatctcgtcgctttatctggtattgtacttacgcatcttaatatttgtttagtttaattttgtcataggtcatcttagaaatatcttaaggtactatgaatcataatacatataatgtacgtatttaggtgctcataccttcgggagggttcagtgtggagtgataaacaatcgtctacacaactttagtggtaacagcggacagtccgacccaagtatcgaaccggagttcttgcaaacgttacgacgacaatgcccgcaaggcggagatctcaccgcaagggcgaatcttgatcctacgagccccgactcatttgataacgactatttcaagaaccttcaaaacaaccgcggagtgattgaatcagatcaaatcttgttctcttcgacaggagcgcctactgtgtctttggtgaatcgttttgctgagaaccaaaatgagttctttacaaattttgcgagatcaatgatcaagatgggaaatgtgaggattctcacaggacgtgagggagagatacgtagagactgcagacgcgtcaattaataa

SEQ ID NO: 167145 - DNA, 608 bp, Arabidopsis thaliana landsberg
  unsure (1)..(608): unsure at all n locations
cagcatcgcagcaagctgcagcggcccgggctcctcgcggatgtgccctacaagatcgaatggtcggcctatccggcggccgttcatctccatgaggcgctgaaggccgaggcgatcgacatcggcgcggccaacgactcgccgaccgtcagcgccatcgccggcggctcgaagatcgcggtcgtggcggcctggagcaatggtggcaagggcacgcgcctcnnnnnnnnnnnnnnnnnnnccgcgcagtccgtcgcggagctgaagggcaagacgatctcaccgacgacgcgcggcagcgtcgcgcatttcctggtcgtcggcgaattgcgcaaggccgggctgagcgaaagcgacgtgaagctggccttcctcaatccggtcgatgcgggagccgccttcgccgcgggcgacctggatgcctgggcgacctggggcatctacggcgcgcgcatccgcagctcgctgggcgcgcgggtgctgtccaacggagaggacgtcaattcgggtctcttcgtcttcagcgcgacccgaacggcaatgcaggatccgggcaagatcgccgccatcgccgactatgccgaccgtatcgagcgcagctatcgctg

SEQ ID NO: 167146 - DNA, 937 bp, Arabidopsis thaliana landsberg
cgtgaacacactcttacacagaagaagcacaggataggtgtcggacctattccaaagctcgtctctctgactgtaatggtctcggtcctcacatccactactctgggccaaagtcttatcaagaaatccaagatgaattggtaagtgtttctgcaaaatctcatgtcttttagtgacattctcctcataagttagagttttactatgtgtgatgttcaattctatagtgtgttgacttgtgaggatattgatatgtgtttgcatgaagagaaattgggaagaccggtccctcttggtgaggtgttaatctagacacacactaagtcggatggaacatatgttaatcggaaggcggagaagattgctctaacttatgagcagtatgtgagagataggctgtctgaactagaggcggctgcttctactgtctctgatgactcttcacgacctcaggagctcacaatagatgagtatacaaccatctttcttcaggtaagatgttgtagtctaatttagagtcttagagtccagttactattcagtcactaattatcttcctctttatttcttgtagtccacacaaagggattcaaggggcaatcattatggacttagatgtcttaaagacgctctaggcagtgccaactgccaactccccggagactcaacctttaaagccttagaagaacggctgcaggaagctccgcggcaaattgaagaacaggctgcatataacgagaagcgagatgctgagattgctgcccaagaagccgagacagcccgagtcataactgagcaaaaggacaagctcgagcacttgtccttagtcgagaagtatcttcgccaaaccgatccgcagttcttggacttcattgccacacactcttccacatccacaaagcgtatcccaattactcccccatctaatgatccatag

SEQ ID NO: 167147 - DNA, 687 bp, Arabidopsis thaliana landsberg
atgactaaatctcatgtcattttctctgcctccatcgctctctttctcctactctccatctcgcatttcccgggagctctctctcaatccaacaaagattgccaatcaaaatccaacaactcatgtatagacaaaaacaaagcattagatctcaaactcttatcaatcttctcaattctcatcactagtctaatcggtgtttgcctcccgttctttgcccgatcaattcccgctttccaacccgagaaatctcacttcctcatcgtaaaatctttcgcctccggaatcatcctttccactggtttcatgcatgtcttgcctgattctttcgacatgctttcatctccttgtcttaacgataacccctggcacaagtttcctttcgccggctttgtagccatgatgtctgccgtgttcacgctcatggttgactctattaccaccagcgtcttcaccaagtcaggaaggaaagatctacgtgctgacgtagcatccgttgagactcctgaccaagagatagggcacgtacaggttcatggccatgttcatagccatactcttcctcacaatcttcatggagagaatgataaagagcttggttcttatttacagcttctgcggtatcgtgttcttgcaatcgttagtattccttcactcttgtttttttttttttttgtaaaaatagaa

SEQ ID NO: 167148 - DNA, 577 bp, Arabidopsis thaliana landsberg
tgcaggtcgactctagaggatcccctagagaataaagtcaaaacatgtttatacatataggagtggagtctgtggaaccagattttaaagcatcacaagtgagcgtgaaaggagtttttacgccggaaaagctagttgagttcatttacaagagaatcgggaagcatgccgcggttgtcaagcaagatccgccgccaaaacctccggagaaagaaaaagaaacgaaagacaaagacgagaagaaaaaggaagcgggacagcccaaagaaggaaaagaggccaaggaaaacggtggtggaggaggtgctaaaggcgatggtgctgccgcggaggaggggaacaaagtggtagacttgaagaagaacgaatatcagtaccagccaccgaggtaccccgtggagatgtttgcttatccaccgcagatattcagtgatgaaaacccaatgcttgtaccattatgtaataaaatcgtcggtttaaggggttgtaggatttgttatttttttactttatttctatgcagaattttaatttaaatgtatttttggtaatttttagtttcaaccgaattgaatga

SEQ ID NO: 167149 - DNA, 1092 bp, Arabidopsis thaliana landsberg
  unsure (1)..(1092): unsure at all n locations
atgaccaaaacaaggtgcatgcatgtgcattttcgtaaaattctacaacgagttaagaagactcttagactctcagcttccgaccaacaaagccaaggcgttactgagccgttgtctttgggtgatttaccggaagaatgtatctccctcataatctctttcacaagtcctcgagacgcatgtgttttcgctttggtttcaaaaacctttgaatctgctgtccaatccgatatagtgtgggagaagtttattccaccagagtatgaatctttgttatctcgatcgcaacatttttcatcgaagaaggagctctttttcgctctttgcgacgaatctgttttaatcaacgttagcaaaaaggtatatctatctaattataaaatgaaaattttgtattgaattatggcaacgagaatgagattcgagcttaactcanaaaatttatgctaatttggagcaatttgatgatggatttaagttccaattcgtgctgctatttgaattctagggagtgttattggtatcttatttacaaaaaattttaatgactttaatcaaatcattgaaataataaataaatgattattttggtttattccaaattaggacttgtggatagaaaaggcgactgggaagaggtgtatgatgttatcagcttcagctttgaaccttccgttcatcacacttggaaatgggatacaaaccctttatcaccttggcaccaatttttaatgatttttttttaagtcgggtggacaggccttgaaaaaaacacgccctttaaaaaaaatgtttcccgcgcgggggggaaaaaaaccccatttttttcacaaagttttggttttttttttttcaaaaaaaaactttttttttttaaaaaacccccccccggggttatttttgaaaaaaaaaaaaatttttttggggggggggggccccccccaccatttttttatgggggggggcccaaaaaaaaaatattttaaaaatatttccttccctcggggggggggggggtataaaaaaaaaccacccccccccgggagaaaaaaggggggggggaaaaattttcttctcccccccccctaaaaa

SEQ ID NO: 167150 - DNA, 3665 bp, Arabidopsis thaliana landsberg
cgaaagagcatcagctgagaacagcggccctaagaatatagcatctggacttatctgtatgactcgttaagcgtatcttacttaaggttcattgattgtatagaacctgcttttaaatcacaatgacatgtgcagccattactctcaaatgcgttggtccatcaatgggtgaaaaacctcacttgacaaagaagttaccgggcagtatcacggttgtcactacttttttcttttgtattgagaatccgaagtctaaaactcggaaaatatgtaccgttttattgaaagttttcgattggtgtttgtaacaggttggaaagctgaagatcttatctgagaactttttcaagctcaagtccatcaagccaagattatttctgcaggaagaggtatcttttcctaataatcattaacttgaaagaaaacgtttcgagtttcgactatatatgtatgttgtatcgcttatcttcatcatatcaacgaaacaatcttatatttccgtggcagggctcaccttttccgacagcactcgatgacgagactgcaacattacttgacgttggaatctgcgacggctccacacttcttgttgacgaagagagttaagttaaggtcatcacatactacacactcttcagaatttaaactcgatttattttatggattgtcactgtgaacattaatagtttatccatattttgcaagtaacttgaacccacgtaaaaacattaatagttccagaaccatcatcatcattgcaaaagtttcatacaaagttaaaaaaaaaattgaaattgagaagagacaacatgttttattttatgagagctcaatgatcttggatcgttttctgctacattctgcactcttactctcctctccttcactttcgctatcactctcatcatcgctgctcgaatctccactttcagcggccggaccaatgccggcaatagcagcttcagccgcactgactgcttcaggcgtgttgagatcagcgacaccgagcatcaagtccatctcgataagttcagattcgttacccgttagtgcttcgatattataagcttctgggtttgcctcagactttttgttagcctccgccataacccccaagaagcctttaagtttaccaagaagttggcttttaggaactggagcaatcgttggcttcgatggaggaggagcctccatcttcttcttcttcttattcttatccgtacacatcaaaagtgctgaatccatagcagaggaagaagatggattcttgagctccaatttcaggagatctttgcagttttctttcccttccatgatttttctttggtgaaatcagtgagaattatggagaagaagacgaactatgagcttgacctagaaaaagagtttgcgtcggtggagcttgaagtcgccgctatcgctttagggtttcggttctgacattcaatttataattcccaaattatgaatttataagtatcgaaaatattttacataacgtatatggaaattgtactaactacaaaatagtaacttccgctctttaaccgcttgttaaaccgacagctttgatttaccctacccggttggttcctcaaccgaatcgcagaagatctatcttgatcaagcagcaatacccggtttactttacctcttaacttttttatcttaccatctcttaaggaaaaacagaggatttagggacaataaagtagacacaattccgattagtttagttacaaaaggtgtttctgtcagacgaaacagttggttacttaatttgtcttcataaacaaggtaatgaatttcgagcgtcgatgattacaagcttatctcaaatctcttttgggacattgaggcgctttggctcttctgttttaccttctgcactgaaacgcgaatttgttgaaggattgcgtacgttagtaaggtctggtgatatccgtcgagctgtttccttattctattctgcgccggtcgagcttcagtctcaacaggcttacgcagctctgttccaagcatgtgcagagcaacgcaatctcctcgatggaatcaacttgcaccaccacatgctctcacatccctattgttattcacagaacgttatacttgctaatttcctcattaatatgtatgccaaatgtgggaatatcttatacgcacgacaggtgtttgatacaatgcctgagaggaatgttgtttcatggactgcattgatcacaggctatgtacaggctgggaatgagcaagagggattctgtcttttctcgtctatgttatcccattgtttccctaacgagtttacgctgtcaagcgtgttaacttcatgtcgatatgagcctggaaagcaggtacatggacttgctctgaaacttggtttacattgttcgatctatgtggcgaatgcagttatctctatgtacggtaggtgtcatgatggtgccgcagcatatgaagcttggactgtgtttgaagccataaagtttaagaatttggttacttggaactcaatgattgctgcttttcagtgctgcaatcttgggaaaaaggccattggcgtttttatgcggatgcatagtgatggagtgggatttgatcgtgccacgttgcttaatatatgttcttccttgtacaaaagctctgacttagttcctaatgaggtttcaaagtgttgtcttcaactgcattctctgactgtaaaatccgggttggtgactcagactgaagtggctactgcattgattaaagtttattcagaaatgttagaagactatactgactgctacaagctttttatggaaatgagtcactgcagggacattgttgcttggaatgggattataacagcgtttgcagtgtatgatccggagagagctattcatctctttggtcagttacgtcaggagaagctaagccctgactggtatactttctcaagtgtactaaaagcttgtgcaggacttgtcactgctcgccatgctttgtctatacacgctcaagtgatcaagggtggttttttggctgacacggtgctgaacaactcattaatccatgcgtatgccaagtgtggctctcttgacttgtgtatgcgtgtatttgacgatatggattcgcgggatgttgtttcctggaactcaatgctcaaggcttactcattacatggccaagtagactcaattctaccagtctttcagaaaatggacatcaaccccgattcagcgactttcatagcccttctctctgcttgcagtcacgcaggacgagtagaagaaggattgagaatattcagatccatgtttgagaaacctgaaactcttcctcagctaaatcactacgcttgtgtgatcgatatgctaagccgagctgagcgttttgctgaggcagaagaggttatcaagcagatgccaatggacccagatgcagtagtttggattgcattattgggatcatgtagaaagcacggtaacacccggttgggtaagttagcggtagataaactgaaagaggtagtagaacccacaaactcattgagttacatccagatgtcaaacatatacaacgcagaaggtagcttcaacgaagccaatcttagcataaaggagatggaaacatggagagtaaggaaagaaccaggcttaagctggacagagatagtcacgttccga

SEQ ID NO: 167151 - DNA, 1222 bp, Arabidopsis thaliana landsberg
atgttgccggacttgatcatggttggacaagtgttttacgtatatatttttttacattcaggctcttactttttacaactcgaaaagtctgatagtgaagaatctgaaggtgagaaatgcacagcagatccagatttcgattgaaaaatgctccaccgttcaggtctctaatgtcgtggtaactgcgcctgcggatagtcctaacaccgatggtattcatatcactaacacccaaaacattcgagtctccgaatccatcattggaacaggttactattttatacattaacatttgttttctttattttgtccgtgacttaaaaaagttgcttgcttaccaagagagatggattttaaggctatatataataatttacggagattgatctaaagggagttttaatagttgttttttcctaaatataggcgatgattgcatatctattgaaagtggatcacaaaatgttcaaatcaatgatataacttgcggtcccggtcacggtatcaggtatcaaatcattgttttgaataatatatcaaaagggttcgatcataatctaatactaagaaaatttgatatttatttttgaaaacatgagcagtattgggagccttggagatgacaattcaaaggcttttgtctcaggcgtgactgtggatggtgctaagctttccggtacagacaatggagtaagaatcaaaacttaccaggtgaaacttcacaaactagtccttcgattttaactaaactctcaaaaatttccccatctgttaattgttattccatttaatccaacccaatttatcagggagggtcaggaactgctagcaatattatatttcaaaacattcagatggataatgttaagaatccgatcataatcgaccaagactactgcgacaagagcaaatgcactacagaggttcactgcaatctgatcaaatctatccaatactcatcatcattggtaacacatattcttggatctaatcatttagtatatattttcagaaatccgcggtccaagtgaagaacgtggtgtaccgggacataagtggcactagcgcatcggaaaacgcaataacgtttaactgcagcaagaactatccatgccaaggaattgtgcttgacagagtgaacattaaaggaggaaaagcaacttgcaccaatgctaatgtggttgataaaggagctgttctgcctcaatgcaactccacttag

SEQ ID NO: 167152 - DNA, 1308 bp, Arabidopsis thaliana landsberg
atgaatgcgaatcacaagaacgggaatccaggttaccataatctctggaccaatggacttatctgtgctttcgagttttgtcaaggtcgtcgtaagaataacacaagtgtccatggagattcgtctctcagaatgtatgatgattgttactaacttgttgatacatattagtgcttagtctctttttttctttttcttgtagagtgtttttttaaacagtgttgttgttgttgtgatagaaagaaacaggaatgtgaaacagatcaatttggtactggtgaagacgaagaacattctaggagttattggcgaggaattggatgggataggatctctgagcttgttcagactgttcaagttgataataattgggatttgcgaaagattgacttagatgaggatgaagccactgttgctgagcttgctgctccttactgggaacgaccacttgctggtccaacttggtggtgtcatcttgatgctacccatcatggtattgcctcgtggttacgtaatgcgcattggttacatcccgcggtcagtcttgctctgcgggacgaaagcaaactgattagtgaacgaatgaaacatattttctatgaggtaacaaaaatctgagttatgttgcttctttgtaatgtgagctgtgctatgattctatagctgaaatttgttaatatgttggtggataggtgcctgtcagagttgctggtgggttgctgtttgagctgttgggacaatcagcgggtgatcctttcatccaagaagatgacatacctattgtcttaaggtcttggcaagcacagaattttctggtgactgcattgcacgttaaaggctttgccttgaacattagtgtcttaggtattactgaagtccaggtttgttcttcttatttgaatcattgttttcctttactcgttgatcaattagtcaaaactggttttcagtcttctggggttccttctgtcttaccaggaaatgcttattgctggtggagcctgcattccgagaaccgttcatgaactaatagcacatcttgcatgccgccttgcacgctgggatgataggtatttcccttcccttgaatctagattaagttgtgaaaaaagttgtatatattggggaagtttagtattcattatgaaagtctttagcagtggatacacatttacatggtctatacggtgtagccaatgaaattgttaaacctttgtcttgctttgatccaacctatttgtcttatcttaatcttagagttataaaagatgggagtcaaatgttgagagaaccttttgttctttttca

SEQ ID NO: 167153 - DNA, 906 bp, Arabidopsis thaliana landsberg
atgaataaagcttttgcatacatcattgctgtgagggacagatttcgtgatgaacctgcaaaatatcgacagtttctaagcctcttgcgtgatcgtcgagctcgtaggtatgtttaaaagtatatagagcacgcacatgtgactatgtgagaattgattctgatgttattattttctttgtagaatcgataaagctactttctttgtagggctggtggagctcattaaagatcacttggatctgcttcttggttttaatgccttacttccagctaggtttcagatacccatcacaccagctggatttcaaaacgtggttggaagaagcgtaccaccggagacaactatcgaggatgcgacttcttacctcaatgctgtgaaggaagcatttcatgatgaacctgcaaaatacatggaaattactaagctcttgactgatcttaaagctcgtaggtatgaattgttttctccatgttatgtttgattttctcaatttacacaacaaacacacatgtgaattgattctgatattactaagtctctttgtagaatcaatgccgctagtgtcattgcaaggatggaggaactcttgaaagatcacttgaatctgcttcttggtttctgtgtcttcctttcacctacaaggaggtttatcacgaagcttaaggtaatagagtgcttaaatgcttatagttactggatgtttcttatatgttaacttgtgatttaagtaacaaaattgtggatgtgcaggcaaggtttctgggcgatggtagtcaagtagttgactcagttctccagatattgagaatgcacagtgagggaaacaagtccaaagacgaggcgtctccggaggtatggttctttgtaaaacactttgtgttgtgtgttgcactttctagttct

SEQ ID NO: 167154 - DNA, 1441 bp, Arabidopsis thaliana landsberg
ttcccattcgtaaaaatccaaactttttgttcaaaatcaagccaaactctagtgttgttgtagcttagatagaccttaaggatgaggtatcaatggcgttcgcttcttttccggagctaccgttcgtctcctcgtccatttctttctcatcactcgcggttccaggtaatctccaattcgactcgatctttctcttctttcctccacgaacgttttggagtgcaacaaagacagtgtctttttgccttgcgatcgccattggcgagctctgttagccgacgcttttcatctgagtctgcgatagaagagaaacttcctgctgagactgttgtgattgatgtttttagcagattgaatggtaaggatgagattacgaaagagctggattcgaatgatgttgtgattagccatgaattagcattgagagttctgagggaacttgaatcaagccctgatgttgcgggaaggtttttcaaatggggtttggaggcttatcctcaaaaacattcttccgagagttataacacgatgctgcgtatttttggtgttaatggattagttgatgagttttggaggttggttgatgatatgaagaagaaagggcatggtgtttcagctaatgttagggacagagtcggtgacaagtttaagaaagatggactagaaaatgatttggagaggctgaaagagctatttgcttcaggttctatggataactctgttgacaaggtttgcaatagggtgtgtaagattgtgatgaaggaagtgtggggtgctgatgtagagaaacagctaagggatttgaagctcgagtttaaaagtgatgtggtaaagatggttttggaaaaacttgacgtggatccgaggaaagctttgttgttctttaggtggattgatgagtctggcagttttaaacatgatgagaagacgtataatgctatggccagggttttagggaaagagaagtttcttgataggtttcagcacatgatagaagaaattaggagtgctggttacgagatggaaatggagacttatgttagggtttcagcaaggttctgtcagactaaaatgattaaagaagctgttgagttgtttgagtttgcaatggcaggtagcattagcaacacacccaccccacactgctgcagtttactgctcaagaaaattgtcactgcaaagaaattggacatggacttatttacaagaactttgaaagcttatactgggaatggcaacgttgtgccggatgttatgctgcaacatgtcctcaagtctttgagaagcgttgataggtttggacagagcaacgaggtgttgaaagcgatgaacgaaggtggatatgttcctagcggtgatttgcagagtgtgattgcatcaggacttagtcgtaagggcaagaaagatgaagcaaacgaacttgtaactttatggaagcttc

SEQ ID NO: 167155 - DNA, 2809 bp, Arabidopsis thaliana landsberg
  unsure (1)..(2809): unsure at all n locations
gaagacaagcccgtggaggatatatacattcatgccgtgattctgacagcatttgcttccgcggcttattttgtgtttttcaacatgaaatacgtcttaggaccattaattatcggcatcatcataccagagggtccaccgttaggatccgctctggaggctaagtttgagaggctcacgatgaacgtgttcttaccaatttcaatcacattcagcgcgatgagatgtgatggactaaggatccttagccagttcactgacatctacttcaacatcttcctaacattgcttatacttgtcataaaactggttgcttgccttacactttgcttgtactacaagttacctcgcagtgaatccttggctgtttccctcatcttaagctacaaaagttttgttgaattcgttctctatgaagctgtattagaagaaaaggtaacctcctaacccacaaacgagtctattattgttattattgattttgccgtaaatctaaacatgtttttatggtttgattttgcagttcatatcacaggccacttacgcgttcttaatcctatattcgctactaagtgcagggattgtccctatggtcgtaaggagcatgtacgatccgaaacgaaagtacgttaattatcagaaaagggacatattgcatctagaaccaaactcaggtcttcgaattctaacttgtttgcacaaaccagaaaacgtctcggagaccatagcattcctccaattgttttcctcaccgatacatgacttccctatcgcggtcacagttctccaccttgtgaagctagttggtcagatcaaccctatcatagtgtcacacgacaagaagttgaagcggcttcacaaaaactcctacatccataccgcaaatcttgcctttagacagttcatgcaagaaagcttagagtctgtaaccgtgactacgttcaccgcgttctcgcatgaaaacttgatgcacgaagacatatgtacacttgcacttgatcgaacaacatcgatgattgtcgtcccatcggggaggaaatggaccgtagatgggatgttcgagtctgacgaccttgctgcaagacaactaaaccagtcattactcgatcgtgcgccttgttcgataggcatactagtagatcgtggacaattctcgcggaaaagctatgtaacgagcaagaataggtacaacattgatgttggtgtgctcttcattggaggcaaagacgatagggaggcactatcattggtgaagaggatgaaatataacccgcgggtccgtgtaaccgtgatccgactcatcttcgaccatgaaatagagtcagagtgggactatattcttgataacgagggcctgaaggatttaaagagtactgaatacaatgaagatattctttatacagagaggattgtgactagtgtcgttgaggtagtcaaagctgtccaattgcttgcagaagagtacgatctaatggtggtcgggagagatcatgatatgacatcacaagacttatcaggactaatggaatgggtcgaactaccagagttaggtgtcattggttatttgctggcggctagagatctaaggtctaaggtatcggttttagtagttcaacaacaacaacatcgaacgtgacatgttctgaccgcaagactgtgtgtattcatttagggcaaacttttagaaaattttaagatgtataaatagtcattcatttgtttaaatataatatgcgtatatattcatacaaaactttttacattatatacaaattaaacatacttagaatccataagaaggaataaccataaactttgattcagattgttatactttctacagctcaactgtgtgtttatcaatccgtcctttcactctttcactagcttctgggatttttagaacattaagttgcccaaagctgacactggtctgtaaagtcgaagcgactgcatgtctatcttcaagaaagaaacatgtgtcttcaactgcaagaaacattgtctaagaagaaacccttttgaaaatattaaaaacattaccagttctagttgggagaaagtttctgaatttggggttttatattatatcttttgttagtctttggaaatctatctgttcatttccaatttaatcttcggttgctttgtttcttccttactcttctcttttctccactcctctaatatcacagtggtcttgatatgatcaacaaaattaaattacaaccaaatgtagcttaatgtatatctgctttctctaagggttaataatatctcaaatcgagtttaaggaagaagtattaaagacattgagcctatcgatggagaaagcagggttcaagattcgataaagaaacctaacttgttctttggggccgacaagtttaacggcctcaagtcatgtcttagattttacaaagaaacctaacttgttcgacaagatatgtttttcaagttcaggatctgagatacatacccttggctctgttccgatccagtaaagaaattatgaagtctctcctaataatatacaacatagataacttatgtgttacactgttacgcattatcctcaaataaaatcatatagagacatcaattgttgataatgaggcanaatcagaaatatcataggagctgggatcaggagtcgaaagatgagattctctctccatcttctatatctcgctaaggtttctgttcaaagtttgatagtcatccctttaacccacttaataatctcttagaaaacaaaaagccctaacttgagccacaatacaacgtctagggttcatccgtcttcacg

SEQ ID NO: 167156 - DNA, 692 bp, Arabidopsis thaliana landsberg
actcttccgcacgtacaggtcgtccgcgcccgcgcctggcagtcctacctcgtggccctcgacccgggcgtggaccgggcgggcgtcgcagccgaactgcgcggccagggcatcggctgcgggcacggcacctgggccagccacacccagccggtctacgaggccaagcagacctgcccggtctccgccgacctcttcgcgcggcagctcgccatccccatgcacgcggagctgaccgtggaccaggccgagcgggtctcgcaggccctgcgcaccgccctgcgcatcaactcgggacggcggccgtccgccgtaccggcgacctccaccgacagcgcgaaccaggaaggtgcgtcatgaccagcagccagcagccgacctccgatcggatcatgcggctcatcaccggctactgggccaccggcatcgtcggtgccgcatccagccactccgtcttcacccacctcgaaggcggcgccaccaacgccgagcaggtcgcggagcgcgccgcgatctcgcagcgcggcgcgcaggcgctgctcgacggcctggtcagcctcggcctggtcgagcagcacggcggcggctaccgcaactccgccgaggcgtcggccttcctggtcgagggcagccccgactgcctgaccggcttcgccaagctcaaggccggccacatggcctcgctcaccaac

SEQ ID NO: 167157 - DNA, 939 bp, Arabidopsis thaliana landsberg
atggcgaggatcatcagaagaccgttaaatttgacggcggccgtccggttccgactttctccgttgtctccattctccggtaactctggttctattaactcggaaacgactagttggtctgagttaattcgagaaccgagtttagtcgagggatgcgattacaagcactggctggttctcatgaagcctcccaatggatacccaactcgaaatcacattgtccaaagctttgtcgaaaccctagccatggctctagggaggtaacactgatcacactcgaaaagtccagtttttaatttaaaaatcgaagctttttggtatatgattgaggttgctttgttgtttgcagcgaagaagaagctaagagatcgatatactctgtatctacaaagtactactatgcatttggctgcaggattcatgaacctttgacttacaagattagatgtaagaacattttgatctcgtcttctttctttggagttttggttcatttgttcatagtttcgtggcaaatgttgaaactttggcttgtattcgattgcagctctgcctgatgttaaatgggttttaccagattcgtttatagtggatggtgacaatagatatggaggtttgttttgctctttcttgtgaaaaactcgtatgttgcaaccattatatctcaaaattttaggattatgtgcttattctcattttgttgggtttctttggtggactagaggagttgtagctcttaaatttagtacctgtagatctttcttttttcttaaaacattcatagttttttttgcaggagagccgtttgtcgatggagaagttgttccgtatgatgagaagtatcatgcggactggctacgagatcaaactgatgaggatgctaaaagcggagtagtcaaaaagaagcataggaggaaaagaaagaagaagttgatttaa

SEQ ID NO: 167158 - DNA, 305 bp, Arabidopsis thaliana landsberg
atgtcgacggctgaagaagaagaaggtagacgtagaaagagttttgagttcgaaatttgggaggtttttttgattagggatctatttattacagaatgaaacgacgtctttaatattttgggccactaataaggcccattattgacgtagttcgtttgccgggaacaaataattgaaaaaaaatcttcattttccagcatcttatgaagaacaatattccctctcttcaaaattggaggaagagatgaagcgaatctcaaattcgaagatgaagaaagcgatggtggtggtgataggtagctgtc

SEQ ID NO: 167159 - DNA, 1710 bp, Arabidopsis thaliana landsberg
tcccagtatgctcttgcattggtgctgaaagaaagcttcaaactatactgtgccattaatgatggaatcattaatcttgtagacatggtttttataaaactctccttctcttgtttagtatcaatttgcttctattgagtgttgctaaagtatatatctatgctcttgattcagttctttgagatgtcaagacatgatgcagttaaagctctaaatatatataaacgagacggccaacaggtaaaagctctaaagctatagactaaatccccatcttcactaaacttgtttattgatgttcttccactgcacaggctgaaaatttggctgacttttatgaatactgcaaaggtctagagctagcgagaaactttcagttcccaaccttaagacaggttccttcttaacttgtgataaatgaatgtgagattgatcacctcaaaaggcctaattttaaaaacttgtttcagcctcctccttctttcctagcaacaatggaagactacattaaagaagcgcctcaaagtggttctgtacagaaaaagctggtacaaagttttactctcatcatatttggttgatgttgtcctgttcatcaatatcagtcttcttatgaattatgattgacattttgttgtgtttttcacaggagtatcaggaaaaagaggaagaagaacaagaacaagaagaagcagaacactctgtgcagcctgaagaacctgcagaagccgataatcaaaaggaaaacagcgaaggagaccagccgcttatcgaagaagaggaagaagagcctaaagaaaaaatagaagaggaagatgctaaaccttcaccactgatagacactgatgatctgctggtgagtcttcttcatctctatacattgcagtagataccaaacctcaatactcattgaccctttttcctgtgattggagcagggtctgcatgaaataaacccgaaagccgcagagatagagcaaaacaacgcattctctctcgcgatatatccaccaggtagagaagtaaaaaaaactaacccattaagtaaaatcttacatttccattatatcaacatttatgaacattttatctgcaggacatgaaacttcagccccatctaatagtctaagcttaatagaagcagggggaagtggttgggaacttgcactagtcacaccacagaacaacagcaacaataacaacaatcctcgtcccgttatagcaacaaaactcgtaagtctctcattcgaatataaactcgatttttctattcctactcatatgttgcctatgtttacagggcggaggattcgacaatcttctactagacagtctttacgaagacgatacagcaagaagacagattcagttaacaaacgccggttacggatttggagccacggctatacccggagcactagcttcatcgaacccaaacccgttcggggtgcaacaagatcctttcgcaatgtcaaacaacatggctccaccaaccaatgttcaaatggcaatgcaacaacaacaaatgatgatgatgaataaccaaagtccatataataacaactattcaccatatcatcatcatcaattctcaccaaatccttcaacttcttcatctcctaacccttttggtgaccctttccttgctctcccagctcctccttcatctactacacagcagcaatacagtcctaatcatatgcttctctag

SEQ ID NO: 167160 - DNA, 1341 bp, Arabidopsis thaliana landsberg
atggagctgaatcttgttgctgaagagtgggtgtgatagggtatgtggttgtccatgaagtgcggatctgtttgaagcagatacatggtataaaaagagattaggctagaagatcaactgcttataccatttatggtcatttacctatcttataaaggattattgttaaaatgggcactttttattcaagaaatttgaaattaggcactctgcttctgtccttcgaaaaagagtacttttggcgatggaaattgaccttcgtacccttctgttcgttacgcgggatctgggtaattcgaaattaggtctgacgtttgaagcgactgcttcgactgtagatgcgcaaatcggagaaataagggcaacgaaatatgtggatgaaaatgaaagtcgtcactgttgtgtggacatatttaggggtcttagtgcgtagtgtaccatttcacagaaggaaagaaccaaaattgattgtctctcagatccgaaaaatcttgaagtatcgttggtcaccgatcgaaacagatccgaagaattgatgaatcgaaaggtaatatgttgtcaaatagagattttcgaaatcgccgatgttgattgatttttggtagaatagttatgaatatttgctaatagcatccatacttgatttagtaggagatggtaagttgttaggaatattgatcaagtgaacttcaatttatatgtagattagtgatttgttaagtgtttgtgtttgtcatgtttgtcttgatttaaattaacgcaagtgccatttgtttttgtatggcttgttgcagggtgttgatgttccagtttttgtcatagctgggaagtgggaatgttcacaacaagggaagtgggaatttgtgatagaaaatgatcgcttcgccaggagcatatgtgttacttctgatatgacgtttagtgaggttgaagcggcagtagctcatgagtttgatgttgatgcaagtcaatggagtactaaattaagttactggcttccagagcaactgtccattttttcaacgtctaaaagacctcctgtcgctttaaatagcaatggtgcactgaaaagtttcttgcgcgtaaaggagacagaagctcatttaaatttttgcctctctattgagtcaagagttggtggggacatcctaaaaactgatgggcgtgcgcttggggaatgttctggaactgccaaatacattccaagggagcaggagagtgatcgagttgagtctcaagtagtcaagtttgtcactgctccaactacagagaccaacggtgatctagatgaagggacagggaaatacttgcaaaatgaggtggagggagttcatgttgagt

SEQ ID NO: 167161 - DNA, 403 bp, Arabidopsis thaliana landsberg; identical to SEQ ID NO: 54171

SEQ ID NO: 167162 - DNA, 588 bp, Arabidopsis thaliana landsberg
ttaactttcaacacttctcaatcatatggggagataatcctcagtattggcaatggattccaattcctgaatctaggtactctaattttcattatctttgcgttagtttggttgtaatgactcgttgggatgatgatggacaattgttgccctgtgttatgaaggtttggaaaagtagcgaaacttcgcgatgtatgttggttcgagattcgtggcagaacgaatactcgtgtattatctccaagaactcgtttctcggcttatattgtgttcaagggagtggataaatgttatggctttcagaatgtggccatagaagctgcagttggaatggtgggacaggagccttctagaagattcatatgctttagtgaagctataaggaggggaaggaggaacgttgtgaaacctaagcagagagaagatgggtggatggagatagagcttggggaattcttcaatgaaggaggattaatgagtagtgatgaaattgagatgagtgccttagagaataagcggctcaattggatgggtggcttgatcattcaaggaattgaaatccgacctgccaaaagtcccctgaagtaa

SEQ ID NO: 167163 - DNA, 1103 bp, Arabidopsis thaliana landsberg
  unsure (1)..(1103): unsure at all n locations
tctccaacaagtatggttcattttgattctaccaacctttcttcttctagtaaaagttcacaatctcaaaatttgaaaatccgcaaggttaggaatcacaggaattctggattcaagagtagggatcaaagtcctcagaggataaaggatcctccgcctttcgacatatgttcttcagtcctcgaaagaaatgatacaagtataaaagattggattttggcggatgaaacaaacagagaaactgttgaagttagtaataaacacaaagttataaggcctggaatggtgcttcttaaagacttccttacgcctgatatacaggtaaaaaactgtgaaaatgatcacataatccacatatttctctagtaaagtaaagagttgtacatgcttataggttgacattgtgaaaacatgccgagaacttggtgttaagcccacaggattttaccaaccggggtatagtgttggttcaaagcttcatctgcaaatgatgtgccttgggcgaaactgggatcctcagactaaatacaggaaaaacactgacattgatagtaaagcaccagagatccctgtcacatttaatgtcttggtagaaaaggcgatccgagaagcacatgctctcatagatagagaatcaggaacagaagatgcggagaggatacttccagtgatgtcaccagacatttgcatagtcaatttctactcagaaactggaagacttggtctccatcaggtgttgtgcagtttgactttaaacctctttgaagggttctcttgacactaataatgcgttgttttgtattggcgtataactatggcaggaccgtgacgaaagcgaagagagtatagcaagagggttgccgatagtgtccttctccataggtgattctgcagagttcttgtacggagagaagagatacgtagaagaagctcaaggagtgatattagaatcaggagatgtgttaatattcgggggagaatcgcgaatgnnnnnnnnnnnnnnnnnntcaatcataccaaactcagctcccatgtctctactcaacgagtccaagctccgaacaggacgtctcaatcttacttttaggcatttctaatcatct

SEQ ID NO: 167164 - DNA, 1362 bp, Arabidopsis thaliana landsberg
  unsure (1)..(1362): unsure at all n locations
gagctagaagtagcatgtgaagacttcagcaacatcattgattctagtgcagatagtcagatttacaaaggaacgatcnaaggcgggactgagatcgcggttatctctctctgcgttaaagaagaaaattggactggatatcttgagcttaatttccagagagaggttcttcttcttatggttgtttatcaccaagtcacttgcaagaaaacatcagtattaaacttgattttattaatattcattgtttcaggttgcggctttggctagattaaaccatgagaatgcggggaaattactgggatactgtaaagagagtacaccgttcacaagaatgcttgtgtttgagtatgcatcaaacgggacactatacgaccatctccactgtaatatataatcaaacttcttcagagctctttctttggtaggactgataatgataccaaatgatgataaaaatttgatgcagatgcggacgggagtttagtatcgtgggcaaaacgcatgaaaattgttataggcatcgcacgtggtctcaagtaccttcatactgaactccatcctccatttacagtctctgagttgagctcaactgcagtgtatctcactgaagattttactcccaaagtaaatttgatcctcttttttctatgcggttagctaagctttgctactatctctatactcttattttgatcctcttatttctatgcagctggttgatttcgaatgctggaagattattcaggtgagattagagaagaacctgaagaatatctgtaatgaaggagcaatatgtgtacttcccaatgcaatggaacaccgagatatggatttacaagggaatatctactcatttggcatacttttgctggaaattgtaagcggaagaccttcttattgccaagacagaggttgcttggttgaatgggtaagaatagcttttctctataagcttaaagctgagtacttataataagtctctctctctctctcttagcggtttacgtgttttcatgcgtttgatgctgaggatctgattcaaactcctaaatattgcaggtaagggagaaaaaccttggtgcaccagatgtgatggctagcttggtggatcctgagctcaagcatttcaagcaaaaagaacttgaggcagtatgtgaagtggcaagccaatgtctgaacttggaccagaatgaaaaagacaaggataagctttcttgttcgattcaagcgctttgtgagacactagagagtagaatcactgtgtccatttctgcagaattcaaatcgtcttctttggcgtgggccgagctagcgctggcctcgccttctaacgaagacgacgatgaaaggagtaaataa

SEQ ID NO: 167165 - DNA, 1441 bp, Arabidopsis thaliana landsberg
  unsure (1)..(1441): unsure at all n locations
atggcttgtcgtcaaattttggccatagttttgtttctttgtgtgtttcaattcttggactgcactgttagctccgccgtagaagagaatgggactgtgtttgtgtacggaagagccgccgttggaacaatagacgaagacttcatttgcgccaccttagactggtggccaccggagaaatgtgactacggcagttgtagttgggaccatgcttcaattctcaatctggtttgttttttctgtggttaatttgtggtatctttttaatcaaattttgtttcattttcatgtttttccgtcgaaaacaatgcaacttgcatttttgatagaaccaaaataaaaaaggttgtgtatttatttcgggttggttaggtagcaggaatccattgaaagatttcttagggactactactcttcattaagcaaaatagaatttactaattgttagaaaattgtagagattaaaaaaaattgaatcatttttaaccatttatgggaatgtgaaaagtcaaaaaatcaagattcggcaagtataaggtattcctttgtttttgtcatcatatgccattttaacaatagattacaaacaaaatttggtcatgttaatatgaagtaatttattcgaagagttgattagagaaatatgaaatctaatgaaaaatttggtcgatcatcttgcaggatttgaacaacgttattcttcaaaatgcaatcaaaggtaatcacatgattcttgatttatattggttaatgttaggatttgaccattgttgtcccaatttccaaaaacacagcatttgctccgttgaaaataagaataggaggaacattacaagacatagtgatatatgagacaccagattcgaagcaaccatgtcttccttttaccaaaaactcttcaattctttttggttacacacaaggatgtctacctatgcgtcgatgggacgagctcaatgccttctttcgcaaaaccgggtaccttcaaattctcttctatctgtctctttccttatctacttgtggtttgagtcggagctaaagtcatcttcaaattctcttcttacttttcttctctctgtctcttttcttacttacttgtggtttgaatcagagctaaagatatcttcaaattatcttctttcttttcttctctctgtctctgtccttacctacttgtcgtttgaatcagaactaaagtcatcttcgggctgaatgcactttctggacgttccataaaatctaacggggaagccataggagcctgggattacaccaatgctgaatcgttcatccggtttacagcagagaacaattacaccatcgacgggtgggagctcggtaagtcactttacaacataacaaagaatgcataagcctgattgaaatctctactcatctncaagctggttttgcttcttttctcaataggcaatgagct

SEQ ID NO: 167166 - DNA, 351 bp, Arabidopsis thaliana landsberg
atgaacttgaatatatgattgaaggtcaaacgtttacgctcggttagtattatctatatagaatgtgatgaatgcatttatactcttttatgaagtgtttggttccttttttatttcacagaaccaattctcaccattggaacaacagagtttgtaacatggcctgacaaatggacaattgtgaccgcagatggtggtccggccgcacagtttgagcatacaattcttattaccaccctggtgcagaaattctcaccatatcatcatgaattatatcacaaaatgttaaggaatttacattatgaaccatccatttctgttgtaaataagataaaaactgtttggttctga

SEQ ID NO: 167167 - DNA, 1078 bp, Arabidopsis thaliana landsberg
atgggactttataaaacgaagtccaaacgttcaattgctaactatcatcatatcataatcatcaatattttcatcctctcttcaatcacatcttcttccatggcttcttcttcttctccatcttccattgatttttcgactgcaattctaataagagttgatcaatcgggcaaaggagacttcagtaagattcaagaagcaattgaatctatccctcccaatctaaacaactctcaactctatttcatttgggttaagcctggaatttaccggtacatataaaatattttgttagattttctatatttaagtcgtcttaaggtttattaggtttttagaccttaatggtttagggtttagattttgttgatatttatcagctgggtattaggtactaggcttttttgacctactaatatatttatgattttttttcctaaatagtatatgttattgatgattagtttattctatgcttttaaagtatatagttttgagaattagcgatttcattgataacagagaaaaagtggtgatacctgcggagaaaccctacataacattgagtgggacacaagcttccaacacttttctcatatggagcgatggcgaagacattttggaatcacccactctcactatctttgcatccgattttgtatgccgatttctcactattcaggtcaatcttcatcatacatcgtatacattcattttataaaataccaattcaaagtagatcaccaaaatatcataagtaagtgaatcattattaattaacaaaaaaagaaagttactaatattgatgtgtttcgttttattgtaagtagaataagtttggaacggcgggacgtgcggttgcactgagggtggcggcggataaggcagcgttctacggatgcgtgataacgtcgtaccaagacactctccttgacgacaatggaaaccattacttcaagaactgctatattgaaggagccaccgatttcatttgtggaagcgcttcttctctatatgaagtaagtactaataactcattttacataatttgtaccaattaaaaatacacttcacataa

SEQ ID NO: 167168 - DNA, 1621 bp, Arabidopsis thaliana landsberg
  unsure (1)..(1621): unsure at all n locations
tctcaagctagactgatcttatggcatttttgtgaacttttaagtacttttattactacaannnnnnnnnnnnnnnnnntgctgctgctcaaattggtcaagccgttaggaatgaggtgattgtcctttaattttccgttgctttgtttatcttagtcttctttaagggacttttttcatattatgtctggggtttaataagtagcatattacttgcagatatctcctcgtcaagggcttcttatagttcgtgaattcacacgctagcaaaattggaattcctgatgtttccaaggtcagtatatgtaattaacttcacctacttaattctattatgcactcccacagacannnnnnnnnnnnnnnnnnnnnnctgtattcgaatagggaactgtgaacaaagaaactctaggctacttcattgggagagtgtatctattccttgtccgtcttggcacagacaaggaatgggtgcgtttccgccagcatttcgcaaatgaaatggcccactatgctgcagattgtttggatgctgaatttgatagttcatatgggtggattgaatgtgttggtttagcagataggtctgcattcgacttacatggccactcagtaagcaacttaccttgtacgtctattttcatcatttcgtttgctagagatttgatgatcaaaacccatagatattcctattttaatatacttaagtagattgtggatccattgttgtatggcaggaaaaagtggcgttgcgcttgttgctgaagagaaatttgcagaacctaaagaagtagaggtattcttgtcaacattttcatctctgtctctataacttgtccttgatatcggttctctgttatttcataaacttgtgattactcctgtgaagaaagaactttgtcttgcattcaagggaaatcaatataatgtagatgaatctttagaggtagagtgactttaagtctattgttttactgacatatttctttgtctcatgtgatggtttacaataaactacatgctttgtgtaatatcttgttaggcgatgaatgagcaagaagcaactctggaatccaacgggcagcgggttttcactctctgtcagtgattgaaccatcatttgggattggtcggatcatatatttgtttgtacgagcattgtttcagcacaaggccaagcaaagcaggggatgaatagttgaacgtgttccgcttccctcctcttgtagcaccaatcaagtgcacggttttcacacttgttcagaaccaacaatttgaggaagcagccaaagttatttccaaggaactcgcttctgttggcatctcacataagattgacatcactggtacgtaaacaacttggaaattacaagttttaaattttttgaaatggggcagcagactaagtgatgatttgtgtgtgaacaaatacatctataggggaagatgtaatagtggacttggatacatcagtgacaatcagagaaagagatagcaaagaccaaggttcgagtcagccaaaggaggcagcttccgtggttagctcagtctcagagggaagatgacgtggcaagacgtctgggctagtttccctcaccagtcttctgctgctgcagatgag

SEQ ID NO: 167169 - DNA, 1977 bp, Arabidopsis thaliana landsberg
atggatcaacagagatacatgagtttcaatcaacaatctacacatcaaaaaccggctcaggaaactacaagcttcattcagaatcatgcttcttctacccaagcccaccctccacccgacaccactaggacgattcaatctatgctcgaacagattctcaaaggtcaagagaagcaaacaacagattttgatcacaaactggttgcattatccgacgatatgaatgggaagattcaaatattgaacaatatgatcgagcaattgactacaaacaaagaagatgttcgtgctattgagttaaggagtggaaaacagccaaatccagtgcttcaacgagagcttcctgcagccaaaatcgtgaatttggaagaaaatgatgttgcagtttttacagaccagacaccagtgtcgaccgacactactgggtgtcgatcgacaccagccacggtagacactacagaacgcgacagtgtcgaccgacaccaacagggtgtcgatcgacaccaacccagtccaaacctgcgaattctccaaaacctgatttcagctgcagcaaaggtaacaaaacccaaggttccttttcccaagagtcctaagaagtccaaataggagcttgatgatgatgctagatgcaaagctatgatggataagttgattgtagagatgccacttatagatgatgtgaagtcttctcctatgatcagacagtttgtgaagaggatggttactaaggatatgcttactgagaaagctgtgatgacgatgtctacacaggttaacgacattattcagaacaagattctaccacagaaacttccagatccaggtagctttgttctcaattgtggtatctttacgagagttttgattaatgcttgtgcgatcttggttctagtgtcaacttgatgccacgttcagttgcgcttaggcttggtttgacaaatttagaacctacgcaaatcactcttgttcttgtcgatcgatctgtccgtagacccgatggtatcctatgcgatgtccctgtataagtcggtaccagctacattcctacagattttgtggttttatcttatgagaaagaacctaaagatcctctaatcttaggaagacctttcttagccacaactggtgccattattgatgtaaggaagggcaacataggattgaatgtaagtgatcttagaatgcagtttgacatgaataaggtggttaagaagcctaccattgatgggcagactttctatgtggatactatctcttctctggctgacgaatttctcatgaagatgacacctgctgatccgttgaagcatgctctaattccctcaattgacaaacttcccaacaggtatagtaagctgctggataggactgagcatgtgatgcaaatggttgctcaagaggagttaattggcacatcttcccaagcagcaacaattagcgattggagcccagaaaaaactcctaaaattgatctaaaaccgcttccagcagggctaaggtacgcatttcttgttgaaaactctacttaccctgtcattgttaatgcttctttaaacaaggcagagctcactttattgctaagtaagctgcgcaagtatcgcaaagctcttggctattctcttgatgatattacaggtatctctctagacttgtgtatgcataggattcacctcaaggatgagtctaagcccttagttgagcatcagaggagactaaacccgaatctcaatgatgctgttaagaaggagatcatgaaattgttggaagctggtatcatctatcctatttcagatagtgattgggttagtccagtgcatatggttcctaagaaaggaggtgttacagtggttaagaatgacaagaatgagctgattcctacacgaactgttaccgcccacatgatgtgtattgactacaggaagctgaacgctgcaacaaggaaggatcattttcctctaccattcattgatgcac

SEQ ID NO: 167170 - DNA, 3865 bp, Arabidopsis thaliana landsberg
gagcgattcatgcactttggttatgtttagtattttagttttgaattgctatgttggaatgggtaaggttggtctatgcttttagatttcagcatatgacagatgatgctgataggattgattctgttcaattcgttgatgtatttaactgttcaattttggtgacttattgcagctgaagcgtaagaagatttggtaaccaaatagttgaggtcaatgaattgaataccggtgttcttcaaacacctgtatcaggaaaaggggggaaagccaagaaaacttctaggtctgcgaagtctaataagtctggaacgctagcttctggctctaatgcaggtgagtttggttctaaatgctctgtgttagtatgccaatgagaaatatttcttatgtgctcatctgagctaaatcttctttaaagagtggagatattgcaatgtagtgagaaggatcttttgtgttggcaggttctcctggaaataactttgcacaggccggtacttgtcgatatgatagttcgttaggtaataacttatttcattaactaatgtttaaaaaatgtacttttggataataagtttttttaatgatttaatctacttcaggtcttttgacaaagaaatttatcaatttgataaaacaagcagaggatggtattcttgatctaaacaaagcagctgatactttagaggtgacatatttgaactctagactcccatattgatgtattactttctgtcaaacttagctgtatgttcctgttgatgcaggtacaaaagagaaggatatatgatataaccaatgtgttagaaggaataggtttgatagagaagacgcttaagaacaggattcagtggaagtaagcatgtcttagaactgtcaaatcttggattccttccatttgatgactcatgtgtgagcgacagtactctgaattttcttgtctgtcttaggggtctcgatgtctcaaaaccaggagaaacaatcgaaagcatagctaacctacaggtacagaacatgcctatatattctttaccttttcattgcacatttcactgcgaactctgttatgcaatgctcagtattatcaccagttttattattgttttcacgttaagggtatatcttagcttgcattgtcttcttgaacatcgtatgaatctgcattagtatgattcttgttatgcctgttttctgagagctaaatgtgttaggaggtaactaggatactagtaaatctaccatacacacaaacatcgatgacatgtaaccacaagctctgttttgtatacccgtactggcacctttgaatgatgagtttctgttttatgtttgaacctgttgaataagtggaaattggtactgcagtttttcttcgatctcagtcacttgcattgatttcttgttttgggtttttggttcgaaaaactattcatgttttataattcctgttaccaatcttacaggatgaagtacaaaacctcgcagctgaggaggcaagattagatgaccaaatcaggtattttcgcagataattttccttcccttttctgctgttttgtatcatctttttgagagtcgacctggttgcagagaatcacaagaaagattaacaagcttgagtgaggatgaaaacaacaaaaggtaagcgtcccctgctatttcttctgccgaaaggtacaataaaacatatctgtttgttctgacgctccactttttaggttactgttcgtcactgaaaacgacattaagaacctaccatgcttccaggtctggtctccttctagtaattacgtgtttctctttgccttgcattcttctcactggggaaacatgtttttgtggtgcctattttagaataagacgctgatagctgtaaaggcaccgcatggaacaactcttgaggttccagatcctgatgaggtaagcttaagagcgcacaaaaccaaatgagcgatgcactgtctgtaacgattctcacctcttatcctgccattaatcaggctggtggttatcagaggaggtacagaatcattctgagaagcacaatgggaccaatagacgtgtacctagtcaggtaacactgtcctcaaacgttatgcttgccctggataaatctgtaacatggaagtgagactgacatttatattgtgcttttttagtcaattcgaagagagctttgaggacattcctcgaggctgatgaaccttcaaatgttcctgatgaaccctctaatgtccctgatgtgccttcaaatcttccatcgacatctggtctccctgagacccatgatgtatctatgccgatgaaagaggaaagcaccgaaagaaacatggaaacacaggaagttgatgatacgcaaagagtttactctgacatcgaatctcatgactttgtcgatggtatcatgaagattgttcctccagatttggatgtaagtcccaactgcttcctcagcttaaaattttcaccaatgtacataatcacagtctggaaaagtaaccatatctaaaaaatcatgcttgacttaattcatatttacctgtatgttacattatatacagatgggtgtagattactggtttcgatcagaggtaggcgaagtcagcatcacagacatgtggccagatgaatgtatccttgatttctatcactttctgtgatttaatctaatctctctttgagcttttgagttttttcctccccaaatatgatatctgtttagagctccttgactctttcatcattagctggaccagactggaaccagatgattacatttgatcaagaccacgctggaccgagcgacaacaaaatcttggagcagccacaaactccatcgagcccaacaccagaagaatccactgctacgagatcacctacaggtagctgaagttaccataccacattacaagcaccaccatatatctgtacatagaatctgatttcggtgaaaccagagttaatgttgtacttgtacagtagctgcattgcattatcatagaatagagattgcaaaataaaagtagagaaaccaaccccttcgttgtattcttcaatttttttctttgttagcttctcaggcttaatatagaattagccttagcccattgatttcttaatattggtcttgttcatgtgaaactgcaaaaccttttagagttgtagacgggtgcttagtagttttacatgctccatttccggtttaccaaaaaggtaaccagatcgaaactaaaacatatttccgttcatcaaaaatcttgacgaaaacatattggttcggttgtggtttgagagatttctttttggttcaaatcggtttctatgtccaatcctttgatatcactcgaggtagtttcttacaaatgatattatatataactttgaattcacctcaagatggaattattttccttcaaaaagaaatctatcaaaattgtgcatctccaaagcaatgagcaatgctgaatctccaagctaagttaaatgaaaaaaaggttcctcttttaacaaactttcccacaccaacatcctcactcaataatctcaacttgttttctcttcctctagtaaaaaaaaaaatgtctttcaagaagatgatgaagtatatactcaaaaccatattcaaacccatttttatggcatgcggttgcggctctaccgttccaccttcctctcacagccactacaccccgggaccaccggtttctcccacggttttacgcagcccatgtcctaagatcgatgagagcgtcgcgatggctaaagaatcaatcaatccgttcgaagattacaagaagtcgatgaatcagatgatcgaagagagatatatcgagacggaaagtgatcttaaggagcttctaag

SEQ ID NO: 167171 - DNA, 312 bp, Arabidopsis thaliana landsberg
attgtagatacttggtcccacgagacatgactgttggacatttcatccatatgctaagcaaaaggatgcagttagatccatccaaagctctctttgttttcgtacacaacactcttcctcaaaccggtaagataagaagtatcatcatccatgtagagtgagactttacctgcagttttccaaagctttccattaacacttgtcttgaattatgcagctagtcgcatggactctctctacaatactttcaaggaagaagacgggttcttgtacatgtgctacagcaccgagaaaactttcggctaacaaaag

SEQ ID NO: 167172 - DNA, 2304 bp, Arabidopsis thaliana landsberg
aatggatccatttcatgcgcattgctgtaagaactctagttaaggatggaaataactttaacatgttttgttcacttttaactcaagatattttgttcaacaggttaaattactctttgctggagaaagacaagtatgtgaccagatattccgaggcttcgattctctaagtgatcagtgttttgcagaagttacagtgagcagtgtctcaatgctacttagctttggggatgctatagccaggagcaagagatctccagaaaagttgtttgtactcttagacatgtatgagataatgcgggagcttcatacagaggtaataatcttctcattaatatcattaagtcgccatacatttactgaagagtcttctgttaaatggaaaaattattctttagtttcagcttttggtggattttttctgatctttaagactgtcagttttcagtatcatgaactttggtacatacttgattcaccttcaaacctgtattcatttgtataagctagtgaggtgaaatgttatagaatataggatgctgcaaacgtctagttttattgacactgacacacataacgatttaccatattaagacgtaaaacttcagtttgcatacgcatagagttcaccacttacttcttagagatgtcaaacctagctgctttgtttacttgaggagtaatatatggaaagtgattgtctttaatgtttttcttcccatgtggagtttctatcaatcagatatgtttttgaccaactgaaatccccaccataataaacagcatggcacacacagaaaaaactttgtgatacatatgtagtggaagtttgctatctaggacgacataaagtgtgaattttcttatgaccagtttatggtataagattagatggtacaatctcatgaaatttgtgtccatggacagattgagacaattttcaaagggaaagcatgcctcgaaattagagattctgcgacgggcttgacaaagcggttggcgcaaactgctcaggaaacatttggtgattttgaagaagctgttgagaaagatgctacaaagactgctgttctagatggaactgtccacccactaacaagctatgtcatcaattatgtcaagtttttattcgagtaagtacatcatatatactcaacttatttcctcgaactatttgcgtattgttcttctccatactgctatttgcgtattgtccctttccacgctttaattgatgatcattggtgtcagctaccaaacaacattgaagcaacttttcttggaatttggaaatggagatgactcaaattcgcagctagcatccgtaacgatgcggataatgcaggcgcttcaaaacaacttggacggaaaatcgaaacagtacaaagatcctgcattgacacacttgttcctgatgaacaacattcattacatggtcagatctgtgcgcaggtatattatttttctcgtttaaactttaaaggctgatctggttttattaaaaaaataaaagaacgcactcatttagctttattcatatgataatttttcaggtcagaagccaaggatttgttaggcgatgattgggttcaaagacataggcgtatcgtgcagcaacatgcaaaccaatacaaaagagttgcctggacaaaggttctgtctatttgtctaactctgtaaagaaacactattatataaaatttcattaaattgttactaagaaactgttacatattttgtagatactacaaagctcatcggcgcaaggtttgacctcatctgggggaggaagtttagagggaggaaacagcagtggagtttcaagaggattattaaaagagaggtaagtcctaaacatgtaaaataaacacagtaattggcaaatgtttatatatttggtaatgatgataaatctgtaaaaaaaaaatggaacaggttcaagatgttcaatatgcagtttgatgagttgcatcagagacaatcgcaatggacagttccagacacagagttaagagagtcactaagacttgctgcagctgaacgatcattgcctgcttatagatcattcctcaaacgctttgggtaaaactctcctatctctctttactgcgaaggctattctaatatttgattgaaatgtaaaaaaacctaactgagattgtaacctatgatcgacgcaggcctttggttgagagtggcaagaatcctcagaaatacataaagtatacagctgaagatcttgaaagattgttgggtgagttgtctgaaggaaagtctatgaatgaaccacgccggtaaaaaaac

SEQ ID NO: 167173 - DNA, 2119 bp, Arabidopsis thaliana landsberg
tgaaaggcacgaaggcagagcacgccctcgccagagaagaagcttcgagcagccgtccaattagacattgagttccttccattgttgaagaagaaggctaaaatggtggaggagatgtggtagtacgatctgggacgttgttcgagctagatcttctcgattgttctatttgttgtaacgcactcaccattcctatctttcaggtcttctcttcttacttgacaactcagagttttgaatatttgttgtggtctatgattttggggaaaatgttgtttgcttttggtgattacagtgacttaactaaaaattcatgctttacaaatttcaatttcattacagtagttggatgattttggggaaaatgttgtttgtatctgaataactaagtattgtgagttttttgtgtctcagtgtgacaaaggacatatagcttgttcttcttgctgtactaatgtaagtaacaaatgcccttactgctctttggcaattggtaactatcggtctagaataatggagagagttgttgaagcattcattgtccgatgtcccattgttgctggagaagcgtcgagtaggaggctacgagttccctccattgatgaagaaaacggcgagaatggtggaagagatgtggttgtgccatctgggacgttgtcccagctagatcttctcgattgttctgtttgcagtaaagcactcaagattagtatctttcaggtcttgttactacttctcttcttcctggttgatttggagttttgaaaactgttatgatcttaggatcacgctgattagctagaaactcatgccttacaaatgtaaattgccttagagtaattagatgattcagaattctaaaactttgtggttgcattaggaagatgataattgaaggaaatgaagaatgtagtcatgtggttatgtgtgagcgttaccagtttagatttgtgtaagcttgtatttggttctagtttcatatgcctgtagtccgagttactaactctgtgtgacttgcttttcagtgtgacaatggacatgtagcttgctcttcttgctgtattgaactgaggtacaaatgcccatcctgctctctgcctattggtaactaccgatgcataataatggagaaagttgtcaaagcaatcattgttccttgccaaaacgccaaacatggctgcaccgagacattctcctatggcaacgagttagtccatgagaagaaatgcagcttcgctctgtgctattgtcctgcagataactgcaactacgcgggtgtgttcaaggatctctacagtcaatacgctgctaaccacggatccttatcgacaagtttcaggtggggccattccattcatgcatgcatgatcttcgagtcgaagagttatgtacttcagaaacatacagatggtccattggttgtgcttcagtgtttcaaggaaccacaaggattgtttttgactgtgaactgtatagcaccttctgctccagtagttggaaagttctcctatgagttatcctactcgacggcaggtaacactttgacgtttagatcgtcggagatgaatcggattcagaaagtgagcttccaaactccggagaaggacttcatgtttattcctgaatatatctttaatccgacgggtttgtttaagggtacttgtatttgtatccgcagcctagaagaagaagaagaagaagaagaagaagaagaagacaatgaagactaagaggaggaatgatcatatccttctaatgtatttcatatcactcacctgccgaagttctcagtctctcttttgttgtccttttgcttagttttgttccatgttgtgaggttgttctgtaatgaaggttatagtccttctgaaggactaggtttgattcttctaactttctctgatgatattcacatttggtgagaacgtttttgctagtctaaggaaaactcgttgatgtcgaaaatgattcaagaagtttatactatgttgttgtctttcccatctctgaatgtttcaggtaatcaatctccaccatgataacataaaaagcttaatagctttattgtttaaaacctggaaaggtttctaatcaaaagcatcaacgttttcaaaacaac

SEQ ID NO: 167174 - DNA, 1438 bp, Arabidopsis thaliana landsberg; identical to SEQ ID NO: 34778

SEQ ID NO: 167175 - DNA, 3169 bp, Arabidopsis thaliana landsberg
atgagtaggaacgacggtcagagttctggcgaccaagcctccatcctcgacgacatcaagcagctgcttcaaaagttgtccaagaagactgaccgacaacagcttgctgtgacgtctctctccaacaagttcgtgaccttccaagagcaatgcaacgaccaactcgcagcattggcggctaatcattctgaaatcagatcggctcacaacgcgtacgcagagcgagtcgattcactttctgcaggaactacgcggactaccgaagctcgaacgcgactcaatttttagggcaccgtcagcccgagtgtccaaaattcccaggaagcatctggccaatagactccgccgacaccggttgaagtcggagcgacatcgactcagaatcctgtcacctcgtcttcaccagcacgacttgccgcagtttcagatagggcgatagctcggacgccagttcaacttgatcctgccatcagactcccaacctccgatcctcgacaagagtcaaacgcaatcaattcggaacttcaaaaccttcaagatcaaatctgggccatgaacgcaaaagtccatcaggccactacttcggctcccgaagtggagaaggttattgaggcaacgaggagaacacctttcaccccaaggatctctaagttgcgtatccgtgaattctgagacttcaagcttcccgtttacaatggaaaaggagatctgaaagagcatttgacttccttccaagtcatcgccggacgggtccccctagagccgcacgaagaggatcccgggctttgcaaattgttctcggaaaatttgttcgggcctgctctcacctggtttacccaactggaagagggctcaatcgataattttaagcaactctctactgcgttcatcaagcagtacggatacttcatcgatagtgacatcactgaaggccatctttggaatctttctcaatccgctgacgaaccacttcggacgtatattaccgcgttcaaggaaatcatggttcaaatacccagcttatctgacttagcagctcagtccgcactcaaaaatggtctttggcatgagtcacgattccgcgaatctttaacagtaaaccgtcctgagacgattcaagatgctcttcatcgagcaacgaattggataaatgcagaagaagaacgggcttttctagccaaaaagttcagtgcttcaaatgctgtaccaaaggcgcctcagcccgcaaccaccaaaaaacctaccaaactccgaaaacccgcagcaggaaccttttccgttgaaaaagaatcaccgaagtcctctcctaaagcttcaccatccaaaccacctttctctcctaagggcaaaaacggcgctcttccgagtaataaatgggtccgagatccaaatgcgtattgcgatattcataaaatgaacggtcatgcaaccaaggattgcaaagctttgggaaggttgttggcggcgaagtatgcttcaggagaaatttccgaagtcgacatcacagcgatcgaattggctcagaccgcgaatgaaacattagagtcagaggaagcttcacctccgaacaagaaacagaaaagtgaaccagcccccgtaattcctaaaggtccgaagaaaatggtcaaagtgattatgggaggttcaaaactttttcgtgattctattagcgcgataaagcagcatgagagaagaactgtcactccgatcgcaaagaaaacaaaagcaagccgagctgactggcccgaaatatcctttactgaggaggaaaccagctacttggacaaacctcacaatgatgcccttgtaattacgttggatatagcgaactgtgaagtgcaaagagtactcatcgataccagaagctctgtggacctgatttttctcgataccctcgtgcgaatggggatctcaaaaaatgatataagagttgtcccaagcccactcgtctccttcacaggcgagacttcaatgtcacttggcacagtaacactccccggcactgcacaaggagttgttaagatgatcgaattcacagtattcgaccgactagccgcatacaacgtcattctcggaactccgtggcattacgagatgaaggccgtcccatcaacttatcatcagtgtgtcaaattcccaactccgatcggagtcaagcaaattcttgggagtcagcgcacttcgaggatgtgctacatgaccgggcataagctcaaaatcaaatagcaaccacagcttgaggcagctctgaacccgatcaaaaaagtcggagatgacctcgtggagaaagtggttatcaacgcagagcatccaaatcaacctgttaacattgggccaacctaggccaaatcaactccgatctgattcaatttctcgagaagaataaaagtacttttgcctggactatcagagaaatgaccggaatcagtacagaggtaatctcacacgagctgaacgtagatccaacctttaaaccggtcaaacagaaacgtcggaagcatgggccagatcgtgcataagctgtaaacgtcaaagttgttagacttctcaaagcaggtttaattcgagaagttaagtatcccgactggctcgcaaatccgtagtagtcaagaaaaagaatggcaagtggcgcgtttgtgtggactttactgacctcaataaagcttgcccaaaagattgctttccgctccctcacatcgatcgacctgtagagtcaactacagggcaagagatgctctcttttatggatgcattttctgggtacaatcaaatcatgatgaatccagatgaccaggaataaacatctttcatcaccgagcgcgagacgtattactacaaagtgatgcccttcggactaaaaaacgcgggtgcaacataccagcttttagtgaacataatgttcaaagatctcctcgggaaaaccatggaagtttatatcgacgatatgttggttaagacagccttttccgcttcgcacctcgatcattttcaacagtgtttcgatattctcaacgagttcggaatgaagctgaatccttcgaagtgcactttcgctgtcccttcgcgggagttcctcgggtatattgtcactgcgcggggaatcgaagcaaatccgaggcaaataaatgcgttcttatcatgtcttcacttcgcacgataagagaagttc

SEQ ID NO: 167176 - DNA, 715 bp, Arabidopsis thaliana landsberg
gagatgactgtggtctttcactgattggatgttgcttgttcaaagatggactccaaatatgtcaacaaagcgctgaagataattgctttttggattcaaattcgaggaattcccattcaatatctaacacgcccaatgatcaagtacattggagataaacattgggatgtggcagctgttgattttgatgaagcagcaaaccgtgtggattttgtcagggtgaaagtaaattggaatgttgataatcctttacgttttcagcacagattccacttcggtaatgatgaacagttagtgctgagtttacgctataaaagattaaaataattctgtgttaattatggtatgctgactcataaagaaaaaagattgccctttgggttatgatgatgggaatgataaagcttctcctcaagtgaacgatagtgataatgacccacaatacatgtttggttttagagaaaataatgagcacaatgcaaacaattttacgtttgctgcagggccatcaaacaatcccgttgttgtgggtgaagtgagtcctttgttgtttgaagatagagatatgaatgctgaaacatggcgatatttgcaggcaaaattagcgaaaggaaaatttaaggacggggatttttttaacttgatcgttaattatatgaaacaagaaaaggattttgtttctactaatgttagaagatgaatcctaacaaggaca

SEQ ID NO: 167177 - DNA, 1347 bp, Arabidopsis thaliana landsberg
gatgttttggctatcaaaacttttgaagacatgttcggattccctagagggactgatgttaaacccaagttcaagaaagaggagctttccggtctttgggtaacaataggtgatgacgcccaattctcgtcctcaagtgccaagagcaacgcaatccgaaacccctgcattcggtacttccagaaagcaatggctaacgtcctctacgcaagggagaagaccggaccaattaacaatggcgagatagagctgctggatattgccctaaaagatatcatagtctacaccaaaaacaaagtgcctatgaagggtgacaccaacgatgcttcaccatcaatgcgtttattgaatcatctttgtggtttcaggaaatgggcagtagcaaataagctgaagggaacaatttctataggaggagtgataacacctatactaatggcttgtggagtgccacttcagtcgactccctttgcccctagatggatcgacattgctcacctgagatgggctttgtttattgatcatcagagtcatgaggggatgcatattctcaagtttcagcatagagcggaaatggatgggaggtttctcctacccaaccaagagctcacaaccatcacaatgaggggtaacatcgatttcaacccgcctaatgaagaactcttcttcatggaacgagcacccccgacgagagaagctccagacattgaagaaagggttgagagtgaaggagaagctgagaatgaagaagcagaggagatggattgggagaactacaatgcaagtatgttccattttgaggaacacaaaccaccaccaagagtgagtaagagtctgactgttgcacataagaatattggtttgatgagtacttgaaataagtttcaagacaggatgttggaaaaatgtggcaaggccatagccgccattcaggctgtactaagcttttcatcttcaggcgccaccatggtgagagaaaaccgccctggagaagtggtttcaagaaggcatagagtttcaccttcaagacaatctgcctatgagaaacgagaggtaagtcgccctcaagctcctgcacgacattcgtctcatgaacaccgcgagcagaaaagaaggagaaaaacaagaattgttcggccaaggagcaaggaccttcttatgtccggcagaagatcactcgaccaagatactcgacgcgatatcgagcagagtgtcgagcaggatccgtgggttcagaacgagcagaacgtcgagcaaaatcagtgggatcaagatgggcagtactcaggaatgaattgggatgcttactatggcatcaacgagcatgaaccttcacctgaaaactga

SEQ ID NO: 167178 - DNA, 1462 bp, Arabidopsis thaliana landsberg
atgacgaccatactgtcggtgctcttactgttttttatctttgcttcaagcttcactcttgttgttggacttgttggttgtcgtcccgatcagattcaagcactgacacagttcaaaaacgagtttgattccagcgattgcaaccaaactgactacttcaatggagtccagtgcgataacaagaccggtttggtcacaaagctacaactcccaagtggctgccttcatggatctctgaagcctaatagtagcctcttcggcttgcagcatcttgtttaccttaatctctcaaataacaacttcacctctgcttcgctcccttctggatttggaaatctcaacaaattagaggtcttgtatctttcctctaatggctttctaggtcaagttccttcctcctttagtaaccttagccagcttgacattttagacctttcccataatgagctcacgggtagtttcccatttgtacaaaatctaaccaaactctcgattttagtgctttcctataatcacttctctggagccatcccttcttctctcctcactttgtctttcctatcatctcttgatctgcgtgaaaactatctcactggttctattgaagttcctaactcctctacgtcatctaggcttgagttcatgtaccttgggaataaccattttgaaggacaaatcctagagcctatctcaaagttcatcaacctcaagcatctcgacctttctttcctaaacacaagctacccaattgacttaagtctcttctcctctctcaaatctttgttgctcctcgatttttccggtgattggatatctcaggctagtttaagttcggattcatacatctcatcgaccttggaagcattgtatatgaagcagtgcaacatcagtgatttcccaaacatcttaaagacccttcagaatttggagtctattgacgtatccaacaatagagtcagtgggaaaatcccagagtggttatggagccttcctcgcctgagctcagtgttcattggagataatttgttaactggcttcgaaggttcatcagaaattttagtaaattcatcggtgcagatcttaaatttggattcaaatagtttagaaggagcactaccacatctaccactgtctatcaactacttctccgcaaaaaacaatagattcagaggcgacatacctctttcaatttgcagtagaacgttgcttgatgtccttgatctaagctacaacaactttaccgggccaattcctccatgtccaagtaacttcttgattttgaatctccggaagaacaacttggaaggaagtattccagacaagtattatgccgatgcacctctacggtcactcgacgttggctacaatcaattaacgggaaagcttccaaggtctcttctaaattgctcagctctacagactataagggtggaccacaacggagtcgaagatacatttatct

SEQ ID NO: 167179 - DNA, 2272 bp, Arabidopsis thaliana landsberg
tgaactaaaccacaacaggaagtagggtggaggttgtgtcatacttctaaagatgttatctacaaaggataaatagcatatgcaaacaacgcttgccatttatgcaattcgtaggctgttccattttacaaaaacaaggtctgacaagtagcactaaaatatgtgtgtgtgttgacaaggcgtgtgtatggccatattgttgccaacggatcaaagaattttgaagttcaaactacaactttaactcataaatgctctgtgacatcaagggcacaatatgggaagcaagctacagctaaggtgattgttcaagtcttaaggggcaaatactctaatggagcggcaggcccacatgccatggacgtcccagacattgtactgtgttagctgaaagggtctgtgacgtacatgaaggcgtggtatgcgcgagaggctgctatgataaagagcagaggcagtgaagagaacaagtacaaacatgttggctgtctacatgcatttgcttgagcaaggcaatcgtggaactgtgtataagcttcaccatactcagaagtcatctggtgtgcaacagttcaagtacctattctttgcacttggtgcttccattgttgttataaagcacatgcggaaagtaattcttgttgatggaactgctatcaaggcaagatttaaaggtgtccatttggctgcaagtatgcaagatgcaaatttccaggtctatcctattgcatttggaattgtatatgctgagaacgagctggcttggacttggttcttccaacaacttagtcaaattgtgccagttgcagaggatttggttcttgttactaacagacataggtctatttacgcagttgttggtcagttttatccgaaagcgttccatggtgcttgtgctgttcatctggaaagaaatgtaaaggtaaggtgggctagacatggtatccctgcctagttcgcaaagcggcacaggctttcaatgttggtcagtttaaagaacattataatgatattagggctcgcagcgagaagtgctttcagtaattggaagccattccaaaagaacattggacgcaagcatactgtctggccaaaaggaataacttgatgagctgcagtatttgctgagactttgaatgatgcgcttgctaaaatttttgaacttccacttgtgacaatggttgacggaataagaggcaaggtgatgaggtggttttgtttacgtcgtgtcaaagcagcaaagatgacagatccaataactccaaatgccaacaagatgatattggagcacaatgttgactcagttggcttggttgtgattcaagtctcacagtggtcctaccaagttgttgtgtcggatgagttgtcctactatgttgatctagagaaaaaaacttgcacatgtttgcagtttcagaagctactaatttcttgctgccatgcacttgttgctgcaagaatcaataatgttcatatcccaactcttgttggtaatgagtatagttcagaaccctttgcgaaacattatgaagcatcgatctacccggtcccaaatcatgctgatgaagaagttcctgccgctgtagaagagactcagttagtaccgccggatgtgaaacgtgcaccaggacgccgccggacaagaagaaatccgtctgctggagaaaacgttgtggtaagcattggttggacctttgagcttgtttggtaatggtagcgcccatgtgtaactaaaatttgtgatgcagggtgcgaagcgacagaaaacaggccgcaagattgtgctcaattcttgtaagcaagttgggcataacagagccacttgtgattctgtcacaggataaggtaagcattggttggacctgattaatggagtatgttctgaatgcaaatacataagggacaatcattcttttttatttacactgtctctgtatataggcgtcgtgagagggtgaaggttttttgggatggaaagcaagctcgggtattgggtgcataagttttttgtggtatgatgcaccagttgaatatagcagccgatccttttttcataagaatggccgcataagtgaagcatagggactacgagagtcaacatagttgatgttgggctctcgacgctgcagcgtctgacccttggcataaggcattttttggtacttctgatcaacccattatgaagttgatttttctctttcggcaacagctctttagcgaagtaatgacgacacgtttgtgaatgtgtaagagctgtttttttgtgggattc

SEQ ID NO: 167180 - DNA, 605 bp, Arabidopsis thaliana landsberg
agaaaatttcagacatgatcatcaatcaatccccttgtttcatgaaagctccgttttttttttatgtttggtctgaatctcgtaagaaagtaaattttttcatttaatttttaaaagttttgatctttctaagccatagattgaatcttagctgttaaaatttaagaatatgtgtttggcacagaaatcataatgatatcaatcaatcaatcaatcattcccctgttttacggctgctctgtttcttcctttgaaataaagattcaatttttatgaagttaatcatatgacactgattcactaaaccttataaatttggtaattattattaacacaggtactacaacaatgcgtattacgcgaaagtgggaggaataagcacgaaggagatgaattttctagagctggatttcttattcgggttaggatttgaattaaacgtgacgccaaacacattcaacgcctacttctcttatcttcaaaaggaaatgactcttcttcaacctctctctctcgttgttgtcccatcatcaagatctctcattaccttcaacgacgatgaagcttctcatcagaaacaacaacaacaacaactcgctgtttga

SEQ ID NO: 167181 - DNA, 3216 bp, Arabidopsis thaliana landsberg
ataaaacaggtgtcagaaagacagcaaagtctcttgctttactcaagaacttaaccaaaaaaacaatcaaaacactaattgcgtcaaaacactctgcaactaatgaacgataacgtgaaagaactgagaaacgagttgatgaagattgaagaggaaggtgagtaaaagctgcctcaagaagggtatattcttatacacaaaaacagagtattgaaagagaatcagtcattctgggtggttggtgttgatcacaacgatacaattacgatcattcctacacatcttactcgtggctcttaagtcacagttctttgagtagcataaaacttgcatatttccatacatagaacaaaagctataaataaaactcttcagtctcttgctttgttcaaagtttgcttttgttccctcttaaagtataaacaaaaagcgtagaaagttttggaaaacaaaatcaaaagaaggaaaaaaatggtggttcatatgagatcggaccatcacgccatagtggatttgtgtggcgtcgaaccgttgtccgtccactgctgagagcgggaggtagtcgctgctctgtgaagccagcctaacgcaataccctcaacctttagcaaccgtacggaccaaaccttcgcttggttcatacggttcactcacagcttggattgggcagtccagacctatgccaacaacaaatccgacccgtgggccgatccagtgttccaccatcttatagtccccacttgggttacaagctctcgttacatagctcgacgttaagaagttgatttaatgagatatataaacaagacaaattatgagtagagaaaccgatgtgggatattggagaagtttcattgtcccacgattacaaattatcgaccaaacttatatgaagataatagcatataatagcatatatatgtttttttaaaaaatgttttaaaggatgcttaatatcagttgttagtaattgtgaaggatgcttcgactccatcaaacctcagtacaaaaatctttgtaagtcaaagatagttaaggatgaaaattaacaaaaagcaaagcattcaaatgtattgattaaaaaacgaacatatactatagtgtgaacctcgaaatcctaatatgaaaatggttcttgtctccctcgtcagattttgaataacccattaaaataagaccgacgactttagaggagttatatgaagaacaaaaggagcagataacggaaattccgcttttcttaattcaactgggacaaaaggtgcttttagatatcgggtttaagcagtgaagagtcgaagatgttgcctaacgaagaacttgttccggtgaagaggattacaccccagtcatcgtggagttggatttccatagacgcgacgggaaaaaaaacggtgcttgacgttgacaaatatgtgattatgcaccgtgttcagatccacgctcgcgatctccggatacttgacccaaatctcttttacccttctgctattctgggtcgagaaagagccattgttcttaacttagaggttgggacttgagacttttgtgtttctcctctgtttttcatagttttcacagctttgttggttaatcatgtttgattagttcctgtgtgtttcggtcctttgtagcatatcaaggcgatcatcactgccaaagaggtcagtctcagtgtactttgattgacttgggcaaacattaaacttgttagatttggctcatagctactgtgttaaattggtcataatctcggtggggttttgatcttgtttgcattatagactgcttagagcattaggtgtcagtgtgcttaactttaaacaggtttcatcatgctagctgatcttatgtaatagttgaagctttttctctccttcagaagtgatgatggattgggttagttatttcaaatgtttacaggttttaattcaggattcgtcagatgaaaatcttattccaaccctggaggagtttcagacacgcttatctgttggaaacaaggcacacggtggtcaattacatggtgatgtggttgaagaagatggtagcccttgcccttagtcatttttagaactcaattcttgaataattcttgatctttttgatacctatgttctataaatatcgtaagaaaaacttgtcactctttttacttttggtattaatatgattgcttgatactatatagaatctccgtttgaatttcgggcactagaagtggctttggaagccatatgtagtttcttagctgcaagaacaacagaactagagaagtctggttatcctgctttgaatgaacttgcttccaaggtagctatctcagcccgtcactcatacatttccaattgcgtttcaattttcatatgatgatgagaacaatatcatttttgtagataagtaaccgtaacttcggcaaggtgcataaatggaagatttccatgaccaagttgacagttcgggtccaaaaagtaagcatgtgatattcgttttctaatttcgatagcatggtagacactcaagatatttgccttgagaggatatttatctatgaaataagcaaaagcctcgtgacaattaattatcgctcaaagtgagtagcttcatttggtttcccgctatcatccgtagaagctatgtttccgggtggtcgcggttgctagcgtttaaaatccatcatagaattcgcttgtaaaatcctcacataaacaacaacaacaaaaaagtgttatcaaaccctatatgtgttaaagttaattctcaaaacaaatatctcttatcttcatcaaaattatagcgtcaatccaaactgaaaaatgcaagatttaagtcttgtaagaatattgtcaattcggaagatctacgaattcaaacacgtattgtttagtttctcacattacttgatgcactttttttggtgataaaccaaatgcatgaaaataataagcatttcaggtaaaggatgagcttcaactgtggttagaggatgacgatgatctgggtgatctctgcctttcaaggaagattgcgactacatcttcaccagttagcgattctgatgaacaaattaattcgtatcctacgtccccaacaataggtgctaagatttccagagcaaagagtcatttggtagccacgattagtgggaacgaccaaaatgatgttgaagaagttgaaatgttgctcgaggttgtttattgcatgagtggtgcatat

SEQ ID NO: 167182 - DNA, 2291 bp, Arabidopsis thaliana landsberg
tgtaatgcgaatgcagaaaattgacggtgacaactatcctgaggtgggtgtatgaaagttatttgaatggcaacctatacacttttcaccgttgaagaacactaacattggttttggttcactgaagacagacattgaatcagatgtacattattaatgctggaaacggattcaagcttgtttggaacaccgtgaaaggctttctcgacccgaaaactacttctaagatacatgtattacatcttccacatagataagacttatacaggacatttgagatgcttcaacttgaccaacaatttacattggttattgcacaggttttgggaaacaaatatcgcagtcaccttcttgaaattatagatccaaggtcagaatttatactgtattggtggcggcccaatacaatccacttttgcttagttgtttggaggctgagacaaaaacctctgttattttctttacacagtgagcttcctgagtttctgggtggaaattgcaagtgtgcacatgaaggtgggtgtatgcgattcaacaaggggccttggaacgacccggagataatgaaagtatgattcttttctgctcaaatttttgtgtagacactggtatctcttgaaaagcattatatgataaagtctctgttttgcatcatacttgtagctagtgcgctcgagagatgcaatgtacaaaccaaaagaaatggggcttctggagaatggggaagtagctaaattattttccttacgggttagtattaattctagtcaacttgtaacagctactggcttctgttactttctgtattaatatcaccttcccatttcttttagcagcatgtgaacacagatatgtcatcacctgatggaggccatgttagggagagagaatcgcatcctgaacatgttagtttacgtatataaatagtctgtttatgtttgttcatgttctaatattgtcagtgaatgattatcgcacattcttatgtatgcaggacaaacgtgctcagctgagcaatcaagctgaagcagttggtgttgggagaatggaacagtctgattcaacaagtaggttaaacccactctgtgtgctcatgtcatgatccattttagacaagattttaataatctctaaacacttttctgcaggtccattaccgaataatctggcagtagaaaggagtttaacgacctctcttcagaaagttgcaagttttttggcccgttttatcctccaacttcttggcagtctatgtctcatgttccggatcttgggaagacttgtaaataagcaaccagagaaccaattgagaccggagttaagtgtttcagtctcccagcaacaagttcctcctcctcaggtccatccatgttggctgaggttgcaaaatctggagaccatggtcacagttttgtgtgataaaccctcaagtattcctcaggaaaaagaagatatacttcgtgattcattagaccgtatcaaatccattgagcaagatttgcagaagacaaagaaggtaaactatagacattcactgatttgtttcaatatctatatatctctccaggtattcgacttaagttaggatttaatggtgacaggcgctctttttgaccgcgtcaaaacaaatagaactcgctgagtgtttcgaaaacttgaaggagagcagttcaacggtaagggattagccttcttaaatgtgaaactcttgagattgatctctgagtgcaccaatatgaaacagtcttcttctttgcttaacacagggaatgcgatcatgctggccaagacactgcagaaactttcaagctgaaacctgatttgcagaataaatttatcttcggatctcatatccgaagtctgcatagctactacttcacccacttaaccatattacaggtgagagacttcacacttatctcttggcatatcccaactaaaatctgtgttcgttatgctcacttagactacttatccttcaatggtttttggtttttcaaatggtatatatatataaaggcaaaatggtaacaggaagtgaaattgaagaggaaaaagcttacaaattgtttagtagcaagcaagcagtgtttatgtaccagtttctttaggtttgaaaacagaggaattagtgaactatttcggaatatacttttttttttccataacgattctattgcaaatcattgttgtatactatataatccaatagtggtgattgtcaaaaaaaaaaaaaaaaacagatgagttttacaatttacagtgttgtgtattagtttatacttacaatc

SEQ ID NO: 167183 - DNA, 622 bp, Arabidopsis thaliana landsberg
atgtggacaaaaactggaagaaactggtgtttcatttagatacatacacaaggtatcgatttcagaatagcttctcttaaatcaaatcttagtttttatttaatgagctttgggaaatctgttttcttaggaaatgaggctcaatgaagatgaaatctcccggttgcgtgattcagattcgagattcttgcaacgccagcggaagttgtatttagttctcgatctagaccacacactgctaaatacaaccatactgagggacctaaaaccagaggaggaatacttgaaaagtcatactcattctcttcaaggtgatacattcagctacattgttttgcttctttttcaaatgtgatctttgtgcatggaacttcagtctagtatttgtctttttttttgttccatctagatggttgcaatgtttccggaggcagtcttttcctactggaatttatgcaaatgatgaccaaactgaggccgtttgttcactcatttctaaaagaagctagtgagatgtttgtgatgtacatatacacaatgggagataggaattatgcacgacagatggccaagctgctggaccccaaaggagagtactttggtgatcgggtcatttctcggg

SEQ ID NO: 167184 - DNA, 2564 bp, Arabidopsis thaliana landsberg; identical to SEQ ID NO: 29591

SEQ ID NO: 167185 - DNA, 1843 bp, Arabidopsis thaliana landsberg
gtgcataatatggaatccaacaccttcatgatccttcagcccttccggaataagatatcaagaatatgctccagcacatcatgcaaggccaagcctggggggtaatggaacccgctaaaaagatggctgacttaaacagcaaaattgacaaaacgttcgttgaaatgggtagagggatggaatcattgaacaaaagggttcaatatatagaaggcacaaccgcttctacatcaaccacaccaggatacatcccagggaaaccaatacataattcaaaggagtatgcccacgcaatcactctaagaagcggacgagagttaccaccaagaggagagccaaaccccaacactgaggacagtgtggttccagagggggaggatttttatcaagatgatgttttggctgacaaaacaatcgaaaagcccatccttgacagtcaacgcactcgaccacaagctccgccagctactaccttcgttgcaaaaccaacagctgcaaagaccaaagatacagtcttcgtgccaccccttacaaacctccacttacattccctcgtcgatttaaaaaagttttggttgcaaaatatgaagccctcctgaaaaaacagataaaggatatgcctttagtggactgtctcgcgctaatacctgacaagcacaagtacgtgaaaaaactgattatagaaaggatcaaagaagtccaaggaatggtggtattaagtcatgagtacaatgcaatcattcaacagaagattgttcaagaaaagttggaagatccaggattttttactctaccatgcaccattaggcaattgacttttagcaattgtctatgtgatctaggagcctcggtcagcataatgccactctctgtggcaaggaaactaggattcgttcagtacaagccttgtgacctaaccttgattcttgctgataggacttcaaggagaccttttggcctgttagaggatgtgcaagtaatgattaatggagtagaggtccctactgattttgttgtgcttgagatggatgaagaatctaaggatcctctaatcttaggaagacctttcttggcttcagctggagcagtcatagatgttaagcaaggaaacattaatcttaatcttggggaggatttcaaaatgaagtttgaaatcagggacactatgaagaagccaacaatagaaggacaaagcttcttagttgaagaaatgggtcagctagctaatgaactgctagaggagcttactgacaaagataaccttgaaactgctttgaccaaaagtaatgaagctggatttctctcttgtgagaccttgagctatgagatgtcaatagactcacacaacgaagtaccaggatcaaagatctttaaaggtgtcattgcgtcagaaacagaggatgttacattgaacgaggaaggctcaactgatactcgactagaatgctcaaccaaacagctaaagtcaagcatgagggcatcaaatgattggttagaattcaaggagaggtctaaatggcacgacagagctataagagagctaacacacactatgaaagagctgaaggatcaagtcaaagagctccatgggaaagccaaccaagcaccactcgacatcaaggacgtcccaaatgatgaagttattcctatggttagaaaagaaggatgtgaattcacattagaatagtatagaaaagatgattatccagatgatgaataaggagcttaccaagaaagggccattgagtactcaattacatacttgtcacgagagcatgctgaatttaatgttgtatctactaaggaaggagaggagacgtcaattctactctatcaccctcct

SEQ ID NO: 167186 - DNA, 427 bp, Arabidopsis thaliana landsberg
atgcctcagcaaacaagtataataattgccgatacatcctttattgtaaggaagggattacgcacacttatacaggaaacccccggtttcaggtacattacagaagtatcggatgcccttggtttgcgcaaagcgatgaagcagcaccatcctgatgttttaattgttgatcattgctgtgacgactgtttttcattgactgaaatccacagaattaaaaaagaatatccggaaacgaatatcctggtgatctctcatgaaaaatctgtagaagaaataagaaaaattatcaatatcgggataaagaattatttgttgaaagattgtgatgagcatgacataattgacgctatcaactattgtacaaaaaaacgtgaaggtatttttgccggcagataattgatatattgcttaagaagtaaatttc

SEQ ID NO: 167187 - DNA, 462 bp, Arabidopsis thaliana landsberg
acaatgtcttcacgacaatcggtgaggcacccgagtcacaaccatccattgcgcggtcacaaatgcgaagccaaagacgaaatcatctgctccggttgtgatctcgatctggttggtgcagctttcaaatgcacaaagtcatcagattgtgattacttcttgcacaagtcatgttttgaacttccacgtgaaaccaaccacaaatctcaccaaacccacactttgactttaatctattccccaaagtcaacgtacacgtgtaatgcttgcggcgaatacggatcaagtttcacgtacaactgttcgatctgtcagtacgatgtacatgtcggatgtgtttcaatgcttgaaacagtgaagcgtgaagatcacccacatccacttactcttttttacggttctccttataaccatcccgttttagtttccaaatgcgatgtttgtgaagacattgtaccggat

SEQ ID NO: 167188 - DNA, 862 bp, Arabidopsis thaliana landsberg
atggtagtaaaactaaaaacggagttgtctttcaacttctcgatcagaagagttccgaacatagatggtttagtgaaaggtaatgtaagatgcttagactttgttttcttgagcggattcagtgttatgagctctaaagatttgttgtggttatagagggaataatgcatttgaatttcttgattcttcctcaaggtttcttagatggagacggagatatcttccggttgatggagataacaggcgtgaccacgggtctgtgaaacagtcaggacctcttgtgtctggtgcagcttactgtatctcttcctgcagcatgattatattgaacaaaattgttctctccagctacaatttcaacgcaggggtctctttgatgctttatcaagtaagacattttaaccccattagctggtttccttgatttgacaaagtatatagtttggtgatttccttatacgtttatttcagaacttaatcagctgtttggtggtagctgtactagatatctctggagtggtttcagtggaaaaatttaactggaagttgattagagtatggatgcctgtcaatgttatctttgtgggcatgctggtctcgggaatgtacaggtaaggtttcgaacatcaggcgagagagtaattggttaaatttcatttaagactaatgcaacattacatttctattccagtttgaaatacataaacgtcgctatggtaactattctgaagaatgcgacgaatattctcacaggaataggggaggtatacatgttccgcaaaaggcagaacaacaaggtttgggctgcaatgttcatgatggtaagttaaattgcacatcttgcctccagttaggttttgca

SEQ ID NO: 167189 - DNA, 2223 bp, Arabidopsis thaliana landsberg; identical to SEQ ID NO: 8132

SEQ ID NO: 167190 - DNA, 2800 bp, Arabidopsis thaliana landsberg
atgggcagctacgaccttatcaaaaaggctgaccccatagtacttatgatagaagacaaactcgcggaaatgaagagaggcagatcctttgatccttctcaacgcggacctcaaaagtcattgataacacaggtctgcatagacgaatcagatcccaaacgatgcgttgggataggtcaagacctcgacccagcgatacgagaggatgtcataacctttctcaaagaaaacaaagacagttttgcctggtcaagtgcgaacctccgaggaataagcctcgaggtaacctcacacaaactcaacgtcgatccgacctactgacctataaagcagaaacgtcgcaagctaggtccccagattgatcgattgctcaagattggatcgataagagaagtaaaataccctgacagctcgccaacccggtcgtcgttaaaaagaaaaacgggaagtggagagtatgcattgactttacggacctgaataaggcatgtcctaaagacagtttcccactcccacatatcgaccgactaattgaggccactacgggacacgaactattgtccttcatggatgcattcttcgggtacaaccaaatacttatgcgcccagatgaccaagaaaaaacagcttttataactgaccgaggcacctactgttataaagtaataccctttggtttaaaaaacgctggagctacttaccaaagattggtgaacagaatgttcgccgaccagctaggtaaaacgatggaggtctatatcgacaacattctggtcaaatcagctcgcaaaaaagaccacgtcccgcaattaagaaaatgcttcaaaatcctaaacaaattcgaaatgaaactaaaccccgagaaatgctctttcggagttccctcaagagaattcctcggatacctagtaaccgaaagaggcatcgaggccaatcctaagcagattgcagccttcaacgacatgccgtcgccaaaaacagcacgggaggtccaacgactaaccggccgtatcgccgccctcaacaggttcatatccaggtccaccgataaatgcgtccctttctatcaactcctccgagaggataaaaagttcgattggaacgaggactgcgagcaagccttcaaacaattgaaagcgtacctgtccgaaccacccatactcgcaaaacccgaagaaggagactcgttgtacctgtacacggccaaacacgctgggacggaaacctcggcaacttgcaactttacgcgagtaacccgaacaacctgcctcgtacgaacctgaaccgtacaacgactggagaatcccaatcatcgattacatcgaacgagggatcacacctcccgacaagtgggagaccagaaaactcaaagcccagagcgcaaggtactgcatcatggaagggagactgatgaaccgcagcgtcgcaggtccctacatggtgtgtacctatgggcaacaaacgaaagatctcatgaaaagcatgcacgaggggcaatgaggtagccactgtagtggacgtaccctcgcccttaaaattaaaatgcaaggttacttctggccaacaatgctagccgattgcgtagctcattcactcaggtgcgataagtgccaacgacacgcacctactctgcaccaacctcccgaggaaatgtcctcaatatcttctccttacccgttcatgaagtggtccatggacgtcgtaggtcccatggaagcctccagtgggaagaagagactaaaaaacctgctggtcctcaccgactactctaacaaatggattgaggctaaagccttccaacaggtaaccgagaaacaagttgaggccttcctgtggcaaaatattgtatgccgacatggcataccatatgagatcgtcaccgataacgggactaacttcacctcgggaaaaatcatagcattctgcgacaagtggaagatccgtcttaccacgtccaccccccagttacccacaaggtaacagacaggtagaagcccccaacaaagctatacttagcaacatcaagaaaagacatgattctaaaaaatcaatgtagtccgacgtactccacggagttctctgggcctaccgaactacacctcgcaaatcaacgcaagaaacatcgttctctctcgcctatggtttagaagcagtaatccgtgtcgaaaccatagtaccaagcgtaagaagaaccgccagtcctgctaacttggacctaaacacgcaaatgctacaggacaacatggacttcatcgatgaacgcagagatcaggcaatgatcagagttcaaaactatcaacaagctgccgcccgctactataactccaatatcaaaatttggagattttaagtgggagagctcgttctacgaaaagtgttcagcaacacgagagagctaaacgccgataaactgggaactaactgggaaggtccctatcgaatcaccgaggtggtacgtgacggagtctataagctcgtaaaagttatcaacggagtacgtgagttacggccttggaatgccatgcatctcaagaaataccacgaataggtactcaaaaacaatcaaactacgataaggcttgatcccttggcaggatacgtaggcagctcccccaagagcagaaccaccaattcaatcaaatcacaaaagggcttaatcccttaaccaggtatgcaggcagtcacctccgcaaacgcaattaccacctcaacccttccatctgaaaggcgaaacttcaataagggaaatagatatcgcatcccccatcaacgaagatcagctgctcacctgacagtttaa

SEQ ID NO: 167191 - DNA, 566 bp, Arabidopsis thaliana landsberg
  unsure (1)..(566): unsure at all n locations
gcgaaaacccttactaagaaatacggcgaccataccgcgctcaccagtctgaacctgaacatcggcgagggagaaatttttgcattgctgggtcagaacggcgcgggcanaaccacgactatcaatctcttcctgggctttatcgagcctactgccggcgaggcccggatcaacggcgtttcggtagccgatcacccgcaggaaatcaaggagtacctggcctacattccggaaacggtcatgctgtacccgaacctgaccggcatcgaaaacctggaatatttttcggcccttgccggttttgattatcccacaactgaactgcgtaacctgctgtcgactgccggattgcagtcgcaggcttttgatcagcgactggccggctactcgaagggaatgcggcaaaaggtaggcatcgccatagccgttgccaaaaaagccaaagtactgctgctcgacgagcccaccagcggcctggacccgacagcttccaatgaattctccggcatcattaaaacgctcgcctcgcagggcaccgcgattctgatggcgacgcacgagttttc

SEQ ID NO: 167192 - DNA, 878 bp, Arabidopsis thaliana landsberg
atgctccatttcttttttattattattttaaattaaaacactctaatttaatttgtagataaatccaaaattatttggtgatggacgcacatggagttatgggttctggaaggtaaatctatatgtttttaaaaacatgatcatatgtttatatgtgtttaaaatataagtaatatagtcttaattagttatcttaaagtatgttgtttgtcttttatgcatcttcaatttaacaatttttgatgatcatatggagtagggtgcaaatggagcaggttgttataatacaagatgtcctgaatttttgttcaagtgtcaaaaactaaattctttgggccacaacctactgaccctaaaggagaaaagggtatatatcttagtattgaacaggtaacatatacacttgtcttagcattaaatattgttttgtattttatcaaattaatctaacatagtgtattgctgtgtctcttttaccattttttaattatccattgaaggataaaaattcaggaaattggtggctatcagatgtgaacttaacaacagaagatgatcaaattggttattggccaaaagaattgtttgatcttataaggaatagcgtggacctgattggagttggcgggatagttcaagcttctccttctggtgtaagccctccaatgggtaacggtcataaaccaactgaagatgtcaatgcggcagcacgcgtcatgaaacttgaaattgtagattctaattataagatccaggaaagtgacaaatacaagttagaaaaactattagacagtgctaaatgttatggcttaaaagatggaaagggcattgtattgatctcatatggtggacctggaggacattcttgtgggatctaa

SEQ ID NO: 167193 - DNA, 2416 bp, Arabidopsis thaliana landsberg
ccacttgcagtttttggttgagagtactaccattcctccacatctctcctcacatattcgtgacgccttgtacatagatcgatatcataacatggaaatactagtcccaagggaatacatctctttctacgaacaagaagaaggtcatgatctgacgcttctcaagtttgcaaagctaagcttcaattattgtcgtttacattacatccaagagctcaaaactctcaccaaatatgctaatcaccatattatactactcttttctttacttttattaattgtataaggatgatcgggaagatcttctaaggaatatattgatctttccaccaccaaatacctagtaatatttgaagcttttttttttcttctttctagatggtggaaagatcaagatattccctctaagcttccttacgtgagggatagaattgtggagacctatttccctacattgggactatattttgagccacgattttcacttgagagaattataatagctaaaatgatcatcatcgtggtttctttgaatgacgtgtgtgattcatatgcaacttaccccgaagctaaaagtctcatagactctttgcaaatgtactactatatgcatccagttatcgttcgtttatgccttgtggatttatttattaattattttattacttttcttaaaacacttattttgtcttgaactaaaaacaatatttttatacgaaatggcaatattggacaggtgggatattgaagcgattgacgaattaccaaactattcgagaatagtcctctgattaatattagaaattataggagagattgaaagagaaatgaagcctcgaggaagatctgctagtgtacaacacacgatagatgaggtgattaatagaccaaaaaatatacataagtgctgtgaaaagagtaattatttttaattaagtttttttttttcttttcaaatgaaatccttagactaagagcttagggagagcgtacctagcattatcaaaatgggcaagtgaaggctatatgccaacctttgatgagtacatggaggttggggaggtcactggggggatggatggttttgctttgtacaactttatcgcgatggaagattgcgacgagaaaccattgtactaatggttcgacttcaagccaaaagtattacaagctttgagtgttctatatcgtataaacaacgacatagtcacctacgaggtattaaaccaaatgaaatattaagaggaataattaagactaggtcaatttgtacattctttttcgttgccatgtgacgtttgtcatgcatacttagaaattatatgggtatatatatacaatgtgcagagagagatgagaaaaggagaggtggtgaatggggtcaactcttacatgaatcaacacggtgttactaaagaagaagcggttgaagaattgagaaagatggctagagataactataagatagtcatggaggagttgttgacgataactgatgtgccacgaccagttttggtgcgatgcctcaatcttgcacgcttgttcgatgtgttttgcaagaatagtaatgatgaattcacctatccgcatggaaatctcaaagatctcatcacctctatattcatccatcctattcctgtttgatcatatcaccattttttggttatgctacttaaactcatctttttaaacctggtttttgttttttctttttccaaaataaacgatgaaatttgccaatacatttaattattttcatcaataattctccaaaaatttaaatttgacttcatttattaacaaattatgatgtatccaactaccaacaactctagtgagaaaatgtatgggaagtccctttttgccaaacactaaccccatatatcctctaaaagaacaaaagggaattttgatttaattttaattcgaacagtgtggattttacttgtatacccaaccaaaatccaatattacagtcaaaacctggatctcttcgacccacacccgacccatctctcccaaacgaatatttctctggatctattcggtttctctttcaaaacttcaagtttcgaaaacttttcgatttctcttccacccgttctcttccaaacgcctctcaatcgagactctcaatcctcttcgttctcttctcaacattctcaacattctcaacaagaaccctaatctctcttctcggaatcttattcttctccttcttctaaccctaattacaaccgtaaccctaactgcaaccctagagaatcctaatgccgcctctaaggaaaaaaactgggttaaagaggaggagaggaacgacggaggagccgacaacgaagccaatagatgggggaacgacggaggagccgagaacgacggaggagccatcatcgacggagaaaaatttgggaattga

SEQ ID NO: 167194 - DNA, 585 bp, Arabidopsis thaliana landsberg
  unsure (1)..(585): unsure at all n locations
atggaggccaacggccctgcttcggcctgcggcacaatctccgaaccgctcgggaaaaccggcattgcgctcgcccttgncggcggctgcgcgcgtggctggtcgcatatcggcgtcctgcgcgccctggacgaagccggcatcgagatttccatgatcgccggcacctcgatcggggcgctggtcggcggctgctatctggccgacaaattagacgaactggaagaattcgcccgcagcctgacccggcggcgcctgttcggcctgctcgacttccggctcggcggcagcggcctgctcggcggcatgaagctcgatgcacggctacgccaggatctggaaggcgtccgcttcgaggatctgcccaagccgttcgtcgccgtcgccgccgaaatccgcaccggccatgagatttggctgtcgagcggctcgctcatcaccgccatgcgcgcttcctatgcgctgcccggcgttttcgagcctgtcgattgccacggccgcctgctggtggatggggctttggtcaatccggttccggtctcggtctgccgcgcctacgaacagccgctggtggtcgcggtcaac

SEQ ID NO: 167195 - DNA, 406 bp, Arabidopsis thaliana landsberg
atggttcagttctactacgatcaggtaattaccaatccgaaaatcgcaacatcatacccgacaggtaatatgagtacgggaattcgattccggtttaacttaggaggattgtaaaatgaatatccgtgctgccagattaggcgatgaaaccgccattcacggactaatttccgaattggcattgtatgaaaaagcaccgggcgaggtcacgaatactgtggaaaaactgaaagtcgatctctttgttgatgcagtctgcgaagcactggttgttgagaacaaccggcaggaagttgtaggctttgcattgtattaccaatcgtattctacgtggaaaggaagatgcctgtatttggaagaactttacattcaccccgcattccggagaagagggatcgggtcgcgg

SEQ ID NO: 167196 - DNA, 3182 bp, Arabidopsis thaliana landsberg; identical to SEQ ID NO: 20393

SEQ ID NO: 167197 - DNA, 846 bp, Arabidopsis thaliana landsberg
  unsure (1)..(846): unsure at all n locations
gtggttcattccacctttgagaagctcagttggtgtgatgcccactgacgaatacacatccattgagctcgctgaaactgacagacccggtctcttgtctgaagtatctgctgttctcacagaccttcactgcaacgttgtgaacgctgagatatggactcacaacaccagagctgnnnnnnnnnnnnnnnnnnnnnacaattcaactcattctgccattactgaccctattcgcctttccaccatcaaggagctgctgtgcaatgtagtgaggacaaacagcggctcaagagctgcgaaaacagtcttctcttgttctgatacacacagggagagacggttgcatcagatcatgtttgatgatagggactacgagggagtcaaaagagcaaggacatcggcgtcaaggcccagtgtcacactaatgaacattgagaaggattataccgttgttaccatgaggtccaaagatagaccaaagcttgtgtttgacgtagtctgtactttgactgatatgcagtatgtggtgttccatggcatggtcagcacagaaccagtggaggcttatcaggtaactactcaacggccgtctgttgggatctctcttctaacaataatatgagtgttttgctgcaggaattttacatccgtcatgtggatggacttcccataaactcagaagcagagcaagaacgtgtcatacaatgtctggaagcagccattgagaggagagcatcggaggtaaccaattaggaatgtgaaaattctctgtcttggctcaaattacattctgttctgcatcgatttctgatatactcaagacagattgtgcatatgaaacatact

SEQ ID NO: 167198 - DNA, 521 bp, Arabidopsis thaliana landsberg
aaggttgacgtgatgatgcagttacagccaccatagactgtcaaggacatcaggggttttcttggacatgcaggattttacagaagattcatcaaggatttctccaagttggcaagaccgctcaccagactgctgtgcaaggaaaccgagtttgcatttgatgaagaatctttgacaccctttaagttaatcaaggaagctttggtcactgccccaatagtccaagctccaaactaggacttcccatccgagatcatttgtgatgcttcagattatgcaataggagcagttttgggccagcgagcagaacgatggatgatacacaagtaaggtatgccactacagagaaggaactactagctgtggtatttgcattcgagaaatttagaagctacctagcgggttctaaggtgacagtctacactgaccatgctgctctgaggcatatatatgcgaagaaggataccaaacctaggctgttaagatggatcttattgcgccaagagtttgacatgagatag

SEQ ID NO: 167199 - DNA, 2251 bp, Arabidopsis thaliana landsberg
cgaagccgtcacagcatccacatacaaaatcaacccaaacacagagctcgttctgggtattgctgagaaatggtgtcctgacaccaaaacctttgttttcccttggggtgaaacaaccataacacttgaagatgttatgttgcttttagggttctctgttttaggttcaccggtttttgtaactctggatagctcaggagagattattagggagaagctggagaaagaatggaagaaggttaagaaagataaaggcaatgcaacccaaagaacatggaaggagagattcatggacagtggtgatgagcttgagcatttagctttccttgtcttgtggcttagctacttcgtgtttccaacacgctattatcatatctatgaagctatttggccaattgctattcatctttcaaacggtaccaagatggctcttgctcctgctgttcttgcacacttgtatgcagacctaagtctcttgaaaaatcacattacagctttaagcgaatcgcctattaaggtcgaaattgatctgagttctttgtgtaagctggtcaatgtttggatttgggagagattcagggcactacaatcaaaacccaatctgttgttaaaaggtgagccaagattggctctttggaatgacctgaaacagagaaccagcaatgcaaagcggattctgaacaactcgaaaatcgatggttttgagtggtgtccatacacaaaaactgtgaaaaactgggactttcttcagttttatcctgagaaagcgacgtgggtgactcttgttcccaaccgtgatgatgaatttatctcctttgctcgatgcattatggtgtctcagcttgttggcattgacagtttggagcattactatcccaatcgggtggcttcacagtttgggaggcttcaggatgtgcattgtcctgttaaccggaacaacctctcacgtgaggcagcttggaatgattactacaagcctcttgatgatttggaattatacattccttcccgttctgcaatatcttgtgatacgccaatgttctgcgacagttggagaaagagggttgttgggtcagctaaaacattgagaaccagcataggtgatgacactagttttgttccatcaggctctaagatgaatagaagaagcgaggatggaaggaagatagctgaggattcaacaaaaaagagacttaagttcatgaagagtgctcgtaagaacgatgggagtacaatgggtcagaaacaggttatatcagacgatgctgatgacgatgatagcctcaccgttgctcaaataacgacactttataagaagaagtatagtgagaacagtggaggaaatgcttctgagccgcttggtaagaaaataagacttgaggcagataacaatggtttagagccttgccaaaagctttcttcgataagatatgatggggatgaaactgtaccaccaccagaaataaagaaaaggaatgaagaaacaggaagtaaatcagggatgcgtgtggttctgagcccatttgatgaaagcaactcttcaaaacctcctgttgattttggtcgagcaattgacattgttgtatcagcaccagagacaatgacattctgtgatgatgtatatggaaacaatgcagagaagaagactatgatcgatgatgacagcgaggaattaaagtgtttgctccatgaagatggtaccataactagagaaatggcgagatcagataaaaagtgttgcagtgaagctgagaaggaagatgctgatggaaggatcaatgagaaggtgctagcatcaaaggcatacagaaaaataccaagccctcatcaaaagtttgcttctggaatctggatgcactaatggagatgaaacaagaaaatcatataagcataaggttttgaagccatctgatgagtcaaacattcacatcgctgtaggggatcgaaatgaggtacaggattgtttgcttcatgatgaacagagatagccttgattccatcatataatataaatcatatttaaaccaagaaatttagatttctactcaaaacagataatattgacaaattcagatgtcaacattcagtagtggaggagatcatatgctccattttgtacacgtagagacaggtcatgagagcactgcaatgcacacagagaaatgtgttaaagagattaatggtaacattgggaactaaaatcgttgagaagaagaccaaaaagggaatttctgcttagctagttgtctca

SEQ ID NO: 167200 - DNA, 1943 bp, Arabidopsis thaliana landsberg
atacccaaaggaaaagagtatcctcttctatgtagaagattggagaagggtaaaacaaattggctctctggtctttttcgtggagaagaagaagaagttgtgcttgactggaatcaaattgcagagcagtttggtaaaagttcattcctttagtataatgtttcattgttagttttagagtcatcgtcagtctctaagcaagtgttatgtgtactacttcaggttatgttcatgttggagtttgtcgggtttcacctgatcataactatctggcgtacacggttgatcccgaaggaggtgagcgtttcattctccagattaaggatttgagaactggtcagttagttccgaggttggaagttgatggagttgttagcttggcatgggctttagatggaatcaccttgttttacactgttacagatgaaaaccaaagacctcacaggcaaatacagtgactcatactagtagatagatagctttttaattttattaaacttggagagtgtttgttcaactgcgactagtttttgcagggttgttgtcacaaatgttgaatcagatgggagagatgatgccgtagtgtttaccgaaagagattccagtttctgtgtagacataacgtccacaaaagatggcaagtttgttactatcaattcaaactcaaggacttcatccgaggaatttacctctttcaactgcatttttgtttttgttttcttagtgtctatcatcgatatactttaggctcaagctgagttatcttgttttcaggtttatattgtaaatgctgataagccaatggctggtttgcaaagaactcgcgaacgagttcctggcgtgcagtgttttcttgaacatcacaatgggttcttttacattcttacaaattctccctcaaatgcaattagtgagtggtctggtgaaggctactatttgactagatgcttagtagaggaaattgaagcatctgactggcagactgttttccgtccagatgatgatgtggttatacaagatatggacatgttcaatgactacttagtgctttatcttaataagaaaggcttacctatgctctgttccattgatatgcccataaaagcaaatacgaaggtatttctgattagtattgcagttgtatgttttttctctgtcgctttgcgttcatacattttcactaaagtatgtttcatttgtgcagcatatggatgatcttgttccctggtattttccacttccagttgattcatgcagtgttgcccctggttcaaaccacgacttccagagctctatataccgagtggtgctttcgtctcctgtggtaaataaagaaacgggtttctctatttgttttagctttgaaccataacatagtttatttgcatttgaatttttctttctactctgatactttctctgaatatcttactgttattgttggaattgcagattcctgacactatcgttgactatgacgtgtcaagaagattgttctcaattgttcagcaggagggaggggttgtagataattctgatagtagtaagccatggtacactgcagatcgctctacagagaataacggtcaacttaatgatagaaccagcgagggagaagatggtcagttagattctcgaatgcctaaatgggaggacttatctgatacatatgtttgtgaaagacaagaagtttcttcacatgacggagttgaagtccctcttacaattctgtattcacgagaagcatggaagaagagtgagtcaccgggaatgttgataggttatggcgcttatggagaagttttggacaaaagctggtgcacaaatcgattgagtatgcttgatcgtggttgggtgattgcttttgctgatgtgaggtcagtcactaaacataaccaaagcattcaattatcatttgcttcaagttgacatcacttggtata

SEQ ID NO: 167201 - DNA, 501 bp, Arabidopsis thaliana landsberg
cgtgctaacgctggcgcgcgactgactgcgtcgcaaccgttccaatgatctggtgcagccgtcgctcgtccgcatcagccagcagttcgagcggaccatgctcggcgtgcagatcgtcggcctcgatcacatcgtggtcgtcgccacctcgcaggccggcccgcacttccagctcagcgcacaaatcggcagccgctttcccgcgctgatcagcgccaccggtcgctgcatcgccgcgttcggcgaacatgcggacgcggaaatcgaatcacgtttccgcacgctgcgctgggatgcgccgccgagctttgcgcagtggcaggcgcaggtcgcacagacccgcaagcagggctatgcgatcgacgacggcaattacattgccggcgtcagcgtgctggcggcgccggtctggcgcacgcacggcaaactcagtcatgcgctggtggcgatcggcatccgcagcacgctcaaacggcccgcgctcaaggcgctgccgggcgc

SEQ ID NO: 167202 - DNA, 517 bp, Arabidopsis thaliana landsberg
ccgcgctgagcgcgaatcagcttatgagataaccgatgacctggacgaactggagatcgcccgccgcgtgtggatcgcactcacccaagggcgcacgggatcaatcacccgcacgggttggcggcaccacgcggctcccaccagtacgccgatgcctgttgttttgcagaggtatgcgcgacggctggcacccgcagcacggcggattgcgtcggtgagtttggagtgccgtcctgccgtggagatggtccaggcatacgggcgggatcgacagaacctcttgtacgtggacccgccatacatcaccgatccgggcacgcggcggggtggtgagtacagggtggaaatgacacgtcccgccgaccaccaggagctgttggacgcctgtatagccgccgacgcggcggtgatcatcagcgcgtacgggaccaaggtctacaactcgatgctggctgggtggtaacggtactcaatcccgacgagcacacagcagggttcggggcacgggcggcgagtc

SEQ ID NO: 167203 - DNA, 6885 bp, Arabidopsis thaliana landsberg
cctgaggccaagtcgatttttgaaaaccactgtgcacctccaagttgatccatcaactcatctatccggggtaaaggatatttgtttttcaccgtaactttattcaatccccgatagtcgatgcatagcctaaagctaccatctttctttttcacaaacagaaccggcgcaccccatggtgagctactcggcctgatgaatcctttatccaacaactcctccaattgtttctttagcttcgccatttccgccggtgccatccggtacggagctttagatatgggggttgtcccgggctcgagttctatcgtgaacgggtctgaccggtccggtggtacaccactaacggccgcaaacacgtcagagaattcgttgacgatcagaatgtctttcaactctgcactcgcccccacttccttggttgtgatcgtggctaaatatgcctcacaacctttcccgagcatcctttcagcctggattgccgagattaccaagcttcccgaggttgttcttattccttggaattttaacataccctcgtccctctcgaattgtacccgtcctcggtgacaatctatgtgagccttgtactttcccaaccagtccatccctaagataacatcatgtttctttagtggaacaatgattaggtccgcgggcatattgacaccgttcactacaaccgagatgccccgaacaagtcaaaatggatacatggcccgtccgctggctgctctaaccattcaatatttggtgtttggttcttttccgaactcacctgtttcaaccatttccggactcacaaaacaatgtgtagccccataatcaaatagagtgtgcgtttctacgtcacctactctcaaggtccctacacattcccttagaatgctgagtacccatccccattatgcatgatgcaatgcaatgcacgaaagaagtaacatgtttacaaggcttaccaatgatcgccctgaagttcccagcgttgctagcttcttccgacagttcatacacacgcggtgctagggcctgcctttttggagggggcgcgagtccattacctctcgcgattcccaccttgcctagattgcactcggtgtccaactttggacagtctctcttaaagtagcctacgtgcccacaatgattacaagtccttggtacattgctaggagcctttgattgcccgtgatccattctcgggcaactttgaatcgcatggtccttgcttccacaccggccacatacacctttggccttccagcaagttccgctgtggctcttaccacatgtcacacattcgctggtcttagcatcaaacttgctgttatccaccttgtcaaatttccttttcttatccacgggtttggtgtgctgattgttccggatcagagctttcttccgattcaagtacctttcttcctcgatcccttcctcaatcattgctgccctttcaaccgattcggaaaccgagttgaatgtccggaccaaacaatggttgcagatctctatccttagtccgcggataaatcggcgcaccaaggcttgttcctcctcaagtttgcgtcccacataacgctaaggcggttaaactcctcgatcatattcacgcaccgtgcggttcccttgaactaggtcgaggtacgcacattcaagcctatcccaagcctccggtggaaagtacttcttgttaaactcgtcttcgaaatccgcaaaggaccggacctcgtcccctctacgtttctcgacggttaaccaccagttatgggcgtctccttcaaggaagtggaccgcaatgtccctttggtaatcctcaaggcagcgggtagacttgaagttcctcttgagtctactcctccactcatcggccacaatcgggtccgtactgcccatgaagtgtctcgtgcccagccttgagacatgttcgagaagactcagatagtctccccttttccgtccatgattcaattgtggattcacttccacaacttccgagtcatcgtccttttggttatccacttttaggaccaccgaatccgctacaacggccttggtcaatgtggctagttgcgccatcattcccttcatcaaatcccactgttcttgggtcgttggagtattgttccggttatccgtgctgtcccttgcaccactactctccggtgcttcctcatttatggacttcttcccggcctcaggtccggccgagtctgtcccatcgagcatcgtcccgactctggttttctcgttgatcatcgtttcctcctcaaccaaagtctcctcgacaatgcccttgttcttcttactctttcccgttttgctgctcttacccatctgcgaaacctccaaagttaatccacataacttctagtaaaatcgcaaaagagtaaagagtaactaccgcgagattctcaagccgacgagtggtgataccccttaacccaacacctagtcctagaaccaagcatgctccgataccaacttgaaaggccccgatccggactgcctaaagtccggacgagttctctcgacccaagccagtaagtgactcggccctaacggtttatgaggttctttcctagtctaatccgttccatatgattccgtgattcaatatatgagacgaatagagtaaacaaacaatcggatactttattgattaagcaaaggattcgatacaacctatgagtttgcatataagctattacaagtcatataatcgatccctagactatccgaactatcaccacccatcatcccggccttgagtctctcgcgcctaagccaagtccttcccacgatcaccattcgtttctgaaagtcatagagccataagtaatctcatttacttaatcatatgcaagtccatgcaatgctctatatgccatacactactcggatccgtggagagaattcagagaggggaagatcgcgcatcagtcaggccgattctcggtaggtcagttaacgcaatactgggaataccatgctacacgccatgaaagccgtcccatcaacctaccaccaatgcattaaattccctttggacaagggaatagcagtcgtgtacggcagccaacgcagcttccaaaaatgctatatgggcagctacgaccttatcaaaaaggctgaccccgtagtactaatgatagaagacaaactcgcggaaatgaaaacagtcagatcctctgatccttctcaacgcggacctcgaatgtcattgataacacagatctacataaacgagtcagatcccaaacgatgcgttggggtaggtcaagaccttgacccagcgatacgtgaggatctcataacctttctcaaagaaaataaatacagctttgcctggtcaagtgcgaacctccgaggaataagcctcgaggtaacctcacacgaactcaacgtcgatccgacctaccgacctataaagcagaaacgtcgcaagctaggtcccgagaggcctaaagctgtgcacgatgaggtcgatctattactcaagatcggatcgataagagaagtaaaataccctaattagctcgccaacccggtcgtcgttaaaaagaaaaccgggaagtagagagtatgcatcgactttacggacctgaataaggcatgtcctaaagacagtttcgtctcccacatatcgagcgactggttgaggtcactgcgggacacgaactattgtccttcatggatgctttctccgggtacaaccaaatacttatgcgctcagatgaccaagaaaaaacagcttttataactgaccgaggcacctactgttataaagtaatgccctttcgtttaaaaaatgctagagctacttaccaaagataggtgaacagagtgttcgccgaccagctaggtaaaacgatggaggtctatatcgacgacatgctggtcaagtcagcttgcgaaaaagaccacgtcctgcaattaagagaatgcttccaaatcctaaacaaatttgaaatgaagctaaaccccgagaaatgctctttcgaagttccctcaggagaattcctcggatacctagtaaccgaaagaggcatcgaggccaatcctaagcagattgcagccttcatcgacatgccatcgccaaaaatggcacgggaggtccaacgactaatcggccgtatcgccgccctcaaaaggttcatatccaggtccaccgatgaatgcatccctttctatcagctcatccgaaaggataaaaagttcgattagaacgaggactgcgagcaagccttcaaacaattgaaagcatacatgtccgaaccacccatactcgcaaaacccaaagaaggagaaccgttgtacctgtacacggcagtctcccgaaccgcgataagcggcgtcctggtgagagaagatcacgaaggacagaaaccgatctattacgttagtaaaacgttgatagacgctgaaactcgttatccagcaatggaaaaactagcactggccgtagccatgtcagctcgaaaactgagaccatattttcaatcacatcccatcgtagtgatgacgtctcaaccaatcagaaccattctgcacagtccaactcaatcaggttgacttgcaaaattggctatataactaagtgagtacgatatagaatatcgcaccagaaccagcctgaaagcacaggtcctagccgactttgtaatcgagctcccgttagcggacctggatggaaccaactccaataagaaatggctcctccacgtcgatggctcctccaaccgacagggatccggagtaggaatacaactcacctcccctaccggggaagtcatccaataatcgttccgactcggattcggcgcatcaaacaacgagtctgagtatgaagccctcattgctggcattaagctagctcaaagaatggggatccgcgatatacacgcccatagcgacttccaacttgtcaccatccaattccatggggaatatgaagctaaagacgagcgcatggaagcgtacctcgaactagtcaaaaacttgacccaacagttcgaatcgtcgaactgatcaggatccctagaggagaaaacacctctgcggacgccttggcagctctcgcctccacgtcaaatcctttcgtcaaaagaattatcccggtcgaaggaatagaacacccaagcatcgactaacggtcaaacacgctgggacggaaacctcggcaacttgcaactttacgcgagtaacccgaagcaccaccgccgcggctagagcccttgcagcggccgcggaggcagttgcaatggaggaagagccgaagctcggaacccccgaacaacctgcctcgcacgaaactgaaccgtacaatgactggagaatcccaatcatcgattacatcgaacgagggatcacacctcccgacaagtgggagaccagaaaactcaaagcctagagcgcaaggtactgcatcatggaagggagactgatgaaacgcagcgtcgcaggtccctatatgatgtgtacctacgggcaacaaacgaaagatctcatgaaaagcatgcacgaggggcaatgtggtagccactgtagtggacgtaccctcgccctcagaattaaaaagcaaggttacttctggccaacaatgctagtcgattgcgtagctcattcactcaggtgcgataaatgccaacgacacgcacctactcttcatcaacctcccgaggaaatgtcctcgatatcttccccttacccatttacgaagtgctccatggacgtcgtacgtcctatggaagcctccggtgggaagaagagactaaaaaacctgctggtcctcaccgactgttctaccaaatggattgaggctaaagccttccaacaggtaatcgagaaacaagtcgaggacttcctatgggaaaacatcgtatgccgacacggcataccttatgagatcgtcaccgataacgggactaaccttacctcgggaaaaatcaaagcattttaccacatccaccccccgttacccacaaggtaacggacaggcagaagccgccaacaaagctatacttagcaacatcaagaaaagacttgattcaaaaaaatcaatgtggtccgacgtgctccacggagttctctgagcctaccgaactacacctcgcaaatcaacgcaagaaacaccgttctccctcgcttatggtttagaagcagtaatccctgtcgaaaacatagtaccgagcgtgagaaggaccgccagtcctgctaacccggacctgaacacgcaaatgttacaggacaacatggacttcatcgatgaacgcagagatcagggaaagatctgagttcaaaactatcaacaaactgccgcccgctactataactctaatatcaaaattcggagattcaaagtgggagagctcgttttacgaaaagtgttcagcaacacgagagagctaaacgctggaaaactgggaactaattgggaaggtctctatcgaatcacagaggtggtacgtgacggcgtctataagctcgtaaaagttattaacggagtacctgagttacggtcttgaaatgccatgcatctcaagaaataccacgaataggtactcaaatacaatcgaactacgataaggcttgatcccttggcagggtacataggcagctcctcccaagagcgcagccaccaattcaaccaaatcaaaagggcttaatcccctaaccaggtattcaggcagtcacctccgcaaacgcaattaccatctcaacccttctatttgtaagacgaaacttcaacaagggaaacagacatcgcatctcccatcaacgaagatcagctgctcacctgatagttcaatctcccttcggtatcgagcaggtccctgctcgatgaccaaacgaaaaggaggtaaagcaagcgacgatctggcgtaa

SEQ ID NO: 167204 - DNA, 1249 bp, Arabidopsis thaliana landsberg
atgagaacctcgttgctgatgatgaaagaaaacgaagagcgaagaaacaagaaaatggcaacctccactacgttgcagtcgttgctgatgaaagaagatgaagagcaaagaaacaagagaaggacaacctccactatgtttctgaagaaagacgatgaagagcgaatcaactgggtggatcttccgccggagttgacgacttcgatcctgctccgacttagcgtgactgatatactggataacgctcggaaactgtgcagagcgtggcgacgtatctgtaaagacccttccatgtggcggaaaatcaacttgcgagactgcctcatgtacgagttcgatttcgagagcatgtgccgtcacattgttgatctcagccaaggtggcttgctagagattaacattgaacacttcgtgagcgattctctcctcagttacattgctgataggttctctctctacccctatcccacatgcacacaaatatttatcgttctaacgaagtttataaagttgtacgtctacataagtgggattgattttatatctaaaacggttatgctaatttctaggtctaattctagtcaggattgaagaacaaaatatctcagttggtttagtggtaaaggatatgtttgttccttagtgccttttccttatgaggattaggagaattattttggttaattcgtatttgacatcaacgtatattgagtatggacgtactgtatataggttccacccgtctctcttcttatactcgcaagcattagcacacaggttttgagttcatcgctactagtacagtttcataatgatattatatatgtatcttgaattgttcttctatctcttgatttttgtttgttaactatacttgcagatcaagtaatttgagacgccttggacttgctaagtgcgatcaaataacgggcatgggactgttcacagaagccatgaaacttccattgcttgaagacctcgagctttcatactgcttaatcaaaggaaagaatttggaagctataggcttcgcttgcctgcatttgaagacattgaagctaaactgtcaaggtttcaagttccccggctttacgtatgatcattgttgggatcggatttcacccaggatagcgagccgaccacacctccgcctcgggaaccatcgatgaattatcccgaacggaccacaaaacacctcggaggtctcgtcaagaatccataccgaggcgatgtcgagaacacgagatga

SEQ ID NO: 167205 - DNA, 3923 bp, Arabidopsis thaliana landsberg
cgacctattttaccaggagattacaggtttttttgcttctttgtatgattttttttttggtaaagaccattttatgaagatctgaaaatgtgttttgacagtgatctggagttgaaacctgttggaaaattggatgtgaagcttgtgcaagcaaaggacttagctaacaaagacatgattggaaaatctgatccttacgctgttgtattcattcgccctttgcctgacagaaccaaaaagaccaaaactattgtaagattttccctctaaacagattccactatctttctcttactgatttggattgtgcatacctctcttggtaattctttttaatgtcatttagagtaactcgttgaatccgatttggaatgaacattttgagttcattgtggaagatgtctcaactcaacatttgacagtaagagtctttgacgacgaaggagttggatcttctcagcttattggggctgctcaagtaccgttaaatgaactcgtacccgggaaagttaaagatatttggttgaagttagtcaaggatttagagatccaaagggatacaaaaaataggggtcaggttagtatttcctcctatcataactattgtttccatattcataacacaatgtagaaaaatataacatatccattttagttaggactataaaagatatatttgtggtgatataggtgcagttggagctcttatattgtcccttaggcaaagaaggcggattgaagaacccgtttaacccggactactcattgaccattttagagaaggtactgaagccggaaagcgaggattcggatgccacggatatgaaaaaactggtgacctcgaagaaaaaagatgtgatagtgagaggagtgttgtctgtgacagtggtggcagctgaagacttaccagctgtagattttatgggaaaagcagatgcatttgtggtaatcacattgaagaaatcagaaacgaaatccaagacaagggtagtaccggatagcttgaatccggtttggaaccagacgtttgattttgtagtggaagatgctttgcatgatctattgacgcttgaagtatgggaccatgacaaatttggcaaggacaagatagggagagtgataatgacattgacgcgagtgatgttagaaggagagtttcaagagtggtttgagttagatggagctaaatcagggaagctttgtgtccatcttaaatggactcctaggcttaagctcagagacgcctcttgatcattctatcttctactctcaacacattactttgcttattttttgttttttgttgtatagtgtgctaatgtttgttacttcctgtcaactgttatcctttggtccttgccttagaagcgggcaatataagttttgagtacacgctttttctgtttacattcatttagctctctttaccttcatttgattcgtaattgtgaatggatttgtaatgaactgatattggttttggccttcaggagtgacgttcttttccttttacactctcgtactatagatgatcataattagcagcagcatgaaccaatactgtcaaataaagtaaaagtaattggtttgtgaccgacatatttagggattttttgaattaatataatttaaacagtaatgctggcgaatggcgtcaacatattgatgataacctatgaatgatagatactttaaaatgataatcaataatttaccgagtagttttctaccgacattcatattaaaagcttgtaagttgataatatctgattttgagggggttacgtgggttcgtggtcgtgaagattataataaaattgtagacagctgctcactgtattattattattttttgttaaagaacagaaaatttggtcagtgtgttataatattcgttcgtataaataacttctttatgctcttttgattattctatatgctaattatggtctagagtttgccaaatgtcaatcactcactgcgcagctgcgcttgttatagtatcaattagtcgtttgagaagactcataccgaaaaattcataaacaaatcgttacgaatcttccagtgttacgtgactcgtcgtaattttgacacctcacgcttttttaatactaaacaattatgtttctaataataaagatatgacaaaatcggatattccctcagtaattaattcagatagtcaaatatctaattaagggtcatttaattgggttataaaaaagtaagaaaaggaagagacactttttcacaaatcgccaaatcacctctttccctctccttcttcttcgtctctctcgttcgttttctagaaacctgtcatcctcttccatctccagatcacaacactaactatcatcacttttgtatatccgattcctgattcaccagtttttgtagagagattggtttctgctttctccagatcgttgagttcgggagagcgaacaccaatggtgggaaacgactgggtgaatagttacctggaggcgattctcgcagccgaacctggaatcgccaattccaaaccgcctggaaccggcgattccaaatcgtctcttctgctgagagagcgtggccatttcagtcccactcgttatttcgttgaagaggttatcacaggctttgatgagactgatcttcaccgttcctgggttcaggtatacctcttcgctttggatttattccttttcgtttccgtttttgatgtttcctgacaactttccgattgatttgttattgatccaaaggctgctgcaaccaggagtccgcaagagcgtaacacaaggttggagaatttgtgctggaggatctggaatttggctcgccagaagaagcaggtttgtgatttcgttttaggatcgtttgcttctagcttgatcgttatctttctggatcttgtgctatgaagattactggatttggaatctgttttgagttaatgattgtgtaatgtttacttaggttgaagggaagaatgctaagcgtgaagctaaaagggagcgtgagcgtgagaaagcaaggagggaagtaactgctgaaatgtctgaagatttctctgaaggagagaaggcagatttgcctggtgaaatcccaactcctagtgataacaacaccaaaggaagaatgtctcggattagttctgttgatgtctttgagaattggtttgctcaacacaaagagaaaaagctttacatcgtgttaataaggtacaggccattacttgagaatttgtgtgtttgtagttggtataagtttgtttcacatggtggtgaataatggtagaaattgtcttgcagtcttcatggtttgatacgtggtgaaaacatggagcttggtcgcgattctgatactggtggccaggtatacttctacctacaagcgttttttttgtttttgagttttaaaatttctcaattcacacatgtatgaaacgacttatgtactcaggtgaagtatgttgtggaacttgcaagggcattaggctcaatgccaggagtctatcgtgttgatttgttgaccagacaggtcaccgcgccagatgtggattccagctactctgaaccgtctgagatgttaaatcctatagacacagatatagagcaggagaatggagagagtagtggcgcttatataatccgtattccttttggcccgaaagataaatatgtaccaaaagagctcctctggcctcatatccctgaatttgttgatagggcacttagccatattatgcagatttcaaaggttcttggtgagcaaattggtggtggacaacaagtatggccagtttctattcacgggcattatgcagatgctggtgattccactgctcttttatctggggctctgaatgtacccatggtttttactgggcattctcttggtcgtgataagcttgagcaactcctgaaacaagg

SEQ ID NO: 167206 - DNA, 2898 bp, Arabidopsis thaliana landsberg
taaagtctttacataatgacgtcttgatttggttttcaggttgctaatcttggcttatatgcgattgctttagtagtattcggtgttattaaggctggttcaaaagaagataccgaaactcaggtttcatattttgtgtgtgttcttctccagtatgtttatattgaagtaagtgtgtttcaatattgattgcatgctttctcgtgaaattctgcagtatcgctggattgcatattcatctatcacaattggatgctgctttgtggtcatatttcttatggggacaaaagagccaaggtatgttgtatatgctcaattctctgcattcttgattttaacactagagttgtatagttatatggattttgatgtttaaaggctgaggatagatttgaaagaaactagccgagcgagaataccgtgggtctattggttccggaaaattctgtactatcaagttgctatggtttacctcctcactcgattagtattgaatgtttcacaggttagttagtttctgctttctttgttgcttctgtctatgttcatattcgatctttacttacgtttcaggatgactttaatatttgcaggcatatcttgcattctttgttattgatgatttgcaaatggctcaatctgctaaagctttggtgaaagaaagagaaccactgcacttagctttcatctctatgaacatcaaactttttctgatcaatgtttcattttcagattcctgcaataatctacgtatgcagcttcgttgtatcagttatgcttcaggttgcaacaagtttaaacacatttatcttcttagcctctaaaccttttccctctttttttgtctgttatgtaacgactatattccctataatgtaggagattccttggaatggaaaacgcctcaaggcatattattgtgctggtggtattatttggatattctgcggtatatcaatactcttattgcccagaagcattaactcttacatgtatgcgatctctgtctttatcggcatcgcaaatgcagtaatgttggtaagacactcctttgttatatctgatgtcttcatgtgtttacatataactagaagatctgtcttttgataatcacaatttgtacaggtgacatcaattagtatgcagagtgtcttgattggttcgaaactcgggggatgtgctttcgtttgtgggtcattaagcttcttagacaaaatgtcatgtgggcttgctttatatgttcttcagtcacatcaaggtaagtttttgtctttctttctaatattatcttaaaattgatggaagtctaatttggaaaatggtgcaggcacttcaccaaaggttgacgtgaacatcaaacgatattttttacttcttggtgacagggtatgtgttaggacttgttccagctcagaccagctctaagctcgcttgttggagttgttgtaacatattttatggatctccatagcacaattctatagcctctgtgtcaaccgctattactagaatgaacagaaggaagatacgcaacgcttctggtctggtaaacacatatagttctaaacttggttactgtttattagtaatatgtttcagtctactaatttttgttcataaggataggttatatcacactgcgacatgcaatacatttttacaagaattacgttgtcagtaaagattaatgcaagttgattttcttttcatgttgtctactcatcttcactgaatcttccttgtctgagaccctgaagatgaataaagaatgagtctttgtgatatccttgcagacagaatcatgaatatttctgattcttaccctttgtttttgttttcattagaaatttagaacatagatgatcgatgaacacatccaggtgagaatcaaaccttaatccattacatagtttctctattctacggagtctgagataggaatttttttgattcacaaagcaattgatcaatgtttatcttttatttcttttggtgtggtgtaatgttaagttctttcattggttattcacataaatataggaaaatacaatggagaacaatcaaaattatgtctttttaagcagttactcatgcaaacctgttttgtgatcttccagcttatactggttgataaatggaggaaaggtttcagttttttttcgccgactagatctagcaatgatgatgctctcagggtcagaaagaaacatctgatccatttttaagggtcaagcagagtagcacaaaacaagtagagaaacagagcctgtgaaaaacggagcacctagagaaacagagcacagaaaacagaacactcgaacagagcaatcagataaacagagcaagtaaagacacaggacacaaaaaaacagaggacaaggaagaaagtgagccaggaattggatcaccaagaagtttttgtctcggctgattctttcatccttgcaaataaaacacagctgagtaaacatcaaaacatctatctaaagatctcaagtccaaacattttgttcagattcttgttggaataactaccaccgctgaaacttttgcgatggacatggaactatggaaggcaagtttttggcagtaaatttacaaagtagagagtttaatacaaaataactgcgtcactgtctttactctttagcttaatcgatgggacaaagtcaaactctgcaacactgagtcactctgaatatacctccgcttaaacgatgccgtttaaatctaaagtgcgagttccgtcaaagcccatttatggcccacatacaagacgatgccgtttcactccgacacttaggtttaggtcgttttccacctccgactagtaatcccggaaatcttctccgcatgagctccggtgaaaaatggaggccaagaacaagaaagcagtag

SEQ ID NO: 167207 - DNA, 388 bp, Arabidopsis thaliana landsberg
atggatcctaaggggaagggaatcatgatcaatgataaggaaaaggagtccttcgtcaacgagcccaaggatgacaagcctactgactcaggctcgggccacaaacgcaaagatgggaagaagaagaagacaaggcgcatcaaggagatcgtctactacgacgacagcgatgaatccacttcttcccaaaaggacaacgacgacaacgactacgacaaaagaaagacggttaattcgaacttttcttttgactactctcgtattccgcaaagtacaaatgctcatttgctctccattccacttggcaaacctcctcactttgatggagaggactacggattttggagccacaaaatgcgtagtcacctgttctctctccatccgagca

SEQ ID NO: 167208 - DNA, 440 bp, Arabidopsis thaliana landsberg
  unsure (1)..(440): unsure at all n locations
ttccatcgcgtcaacgccaacgacgcacgggctttccaacacgaggtatttgccatgagtctgcaattgggccaagcggctcccgatttcacgctggattccaccaagggttcgctgcacttcggcgcctacgcgcgcgacaactgggtggtgttcttttcgcatcccannnnnnnnnnnnnnnnntgcaccaccgagctgggggcgtttgcgcatcgcaagggtgaattcgaccagcgcggtgtgaagctgctgggcctgtcggtcgatccggttgaaagccacaagcgctgggcgcaggacattgccgatgttggcggaaccgagctgaactatccgatcctggccgaccccgacctccccgtggccaaggtgtacggcatgttccacccggaaaaagacgccacggtacaggtgcgctggatgttcatcatcgatcc

SEQ ID NO: 167209 - DNA, 674 bp, Arabidopsis thaliana landsberg
atgcacaggcaacacgacggctgccgatggatcggcggccaagtgagccctgacatggtccacgacaaagaagcgatgtgctcagatgagctccgaacccgctgaaaccggcgccgcgcaagcgcccaacagcctgtttgtgcccgtgccccagcagcaggaaatgccgttggcgatcgtgcacggccagcctgtgctgcaaatgccgcaggacttgtacatcccgccggacgcgctggaagtgtttctggaggcgttcgaaggcccgctggacctgctgctgtacctgatccgcaagcagaacttcaacattctcgacattcccatggcaggcctgacgcgccagtacctgacctatgtggacgagatccgcggccgcaacctggagctggcggccgagtacctgctgatggcggcgatgctgatcgagatcaagtcgcgcatgctgctgcccccaaaaaaggtggcggagggccaggagcccgaagacccgcgcgccgagctggtgcgccgcctgctcgagtacgagcagatgaaactggcggcggccgcgctcaacgcgatgccgcagttcggccgcgacttcctcaaggccgaggtctacatcgagcagtcgctgcagccgcgttttccggacgtcaacgtggtggatttgcaggacgcctggcgcgaca

SEQ ID NO: 167210 - DNA, 587 bp, Arabidopsis thaliana landsberg
ccgaacccgtgtcagactattacgtggcagtagtttctgatgaagaggttgttttattgttgggagatttaaagcaaaaggcttataagcggaccaagtcaagaccggcattggtggaagggttcatatactttaaaaaagaaagcatatttgggaagaaaacgttttcgactcgggcaaggtttgacgaacaaagaaaggaacatgaagtggtggtggagagctctaatggagcagcggagccagagatgtggataagcgttgatgggatcgtggttgtgaacgtgaagaatctacaatggaaatttaggggaaaccaaatggtgatggtggatagaacaccggtaatggtctactatgatgttcatgattggttgtttgcaagttcggagactgcagcgagttcagggttgtttttgtttaagcctgttccggttggagcgatggtagatgagagctttagcgatgcggaggaaggagatagcggaggagggagtagtcctttgagtcgttataattcagcatcaagtggttttggaccattgcatgacttttgtttgtttctttatgcttggaaacttgaatga

SEQ ID NO: 167211 - DNA, 1106 bp, Arabidopsis thaliana landsberg; identical to SEQ ID NO: 9080

SEQ ID NO: 167212 - DNA, 770 bp, Arabidopsis thaliana landsberg
aaagcttagtatactttcttttcaccagaagactatgttgaagtccataagcagcagcagcggcgacgatcatcttctttctctgatcgtatcttccaccggaaaactccatctccggcagattcacgccctcttactccgcacttccttaatcagaaactctgacgttttccaccatttcctctctcgtctcgctctctctctgattcctcgagacatcaattactcatgccgagttttctcccagagattgaacccaactctctctcactgcaacaccatgatcagagctttctctctcagccaaactccatgcgaagggtttcgcttgtttcgatctcttcgacgaaacagctctcttcctgctaatccgctctcgtcttcttttgctctcaagtgttgtatcaaatcaggtgacttactcggtggtttgcagattcacggcaagattttcagtgatgggtttctctcggatagtcttcttatgacgactctgatggatctttactccacttgcgaaaacagtactgatgcatgtaaagtgttcgacgaaattcccatgagagatactgtttcttggaatgtgcctgtttcgtgttatctgcggaataaacgtacgagagatgttttagttttgtttgataagatgaagaacgatgtcgatggttgtgtaaaaccagatggtgtaacatgtttgttagctctacaagcttggtgctaacttggggcgttggattttggtaaacaagttcatgactttatcgatgaaa

SEQ ID NO: 167213 - DNA, 2261 bp, Arabidopsis thaliana landsberg
tctttacactaatgaaatctaataatttttttgaaagggcaaaggagtatgtttatcaaattgaatgataaaagatcattttttttctctgttggaggcatagacacacatatattatcttgattagaagatttagggtttttatagaaacttgatcggccaattctccatctctaaatctttttctctctttagtctctctgcttctttctcatgttgcacggatactcaaaaagacaatgatctttctagttttgaatcttaatttaaagtcaatttgctgaagaataaataaagaaatgtctcaacaacacatcatcttgtcttgaattgtgacattatgcgttgtttgttttgtatacatcatcttgtcaaaacaagcatggcgttttgaatatatcccatttattaaagactcaataatttttagaatatattttgggtataaacatgtaaccgtacgtgttgctaaacttgctattgtccatctataatgtgaaaagtatcaattttaacattactgtttttatatagtccttagttcatatagtatttgattaggtagagaagaaaaaaaaacagatggataaataaaaaaattgtcgacaatagaaagatgtttagtactagtagcttgataactttgtttatcttatgctgatgggtgaatttattatcatggttaacttgtttccattgtatgtgttattctttttattgctaatgcgtttgtttgttgtcatgtctttaattgcagatggattctctatcatatgaaaacaacaatgaagacattcttggtgaagagattgatggagacaaagatggtccacctccctcttcagttagaggtaaaagaacaaaatctcagagatcaagctctagtattccagtcaaacagaggaaaaggccagctcatagagctgttgtgtggaagcattttgatcaaaagccaaacaatctagcgttaagcaactgtcgctattgtaaaacagagattggatgcgactcggttaaaagtggaacaagtgaaatgaccaatcacatcaaaaggtgcaagttattcaagatgtatgaagagagtgataaacagaaaatcatagctggtgatagcagtggtgtaatgacagcaatcaagtataataaatggttgtttagaagatctgttaatgagatgttagtgctttgtgagctgccttttgcattcgtggagtcattggggtttaggagattctgtgctaacaatctcccaatgtatcagcttcattgtaggacgacagctactaaagattgttatggattgtatttgcaagagaaagctgctttgaaagagttgtttggtaagcaaaaacagagagtctcattgacaacagatatatgggtagctaggacaactgcgtgtagttacatggtggtgacagctcactaggttgataatgattggaagttgcagaaacaaattatcagcttcaaacccgtccttcatcacaagggagatacaatagctacacatttgatcggctgtttagatgaatgggatatcaagaaggtcttcacagtcacagtagataatgcaaaaggtaatgacaaagctttgcggttgttcatagataatttgatattgcgagatcctgatgcactagtcaaatatggtgactatcttcacatgcgttgttgtgctcacatcttgaatttgatagtcaaaaatgggctagctaaggctaagcatagtataatggctattcggaatgcaatcaagtacgtgaggtcatcgggtgatagactcaagtcttttaaatcgagggtggagtcaggaaatgcaactagaggaagcttatgtcttgatgttgtcactagatggaattccacctatcttatgctcacagctgcgatcaagtgtaggggtgcatttgaaaaaatgttggctgaagataagttgtacaatgagtacttcatggagaaagatgaggataatgaggatgaggatgatgagagtgacgaaatagatgagaatgcaagaaaacgtgttggtcctccaacatttgttagttgggaagaagtgcaaaggttatgtaagtttctgaaaatctttttcaattgcactctttctttttcggcatctaaatcagtgacatcaactatttgctacaatgagattgtgaacattgagagaatctgattaggctgcaatacgcggtacactattacgacaaagctatggcgatgcagctaatttagaaatctggagcttaggaacgggc

SEQ ID NO: 167214 - DNA, 457 bp, Arabidopsis thaliana landsberg
gcgggtgatcgacctgaacgtcacaacgccgctcgcgctgatccatcacttcgccgcacccatgcgcgatcgccggcacggtggggtgctgctggtcggatcgctcaccggatatctgggctcggcgcggcagaccgtctacgggggcgtgaaggcattcagccggatctacgccgaaggcctctggctggagctgcgcgagaacaacgtgcacgtgctcgaactggtgctcggtgtcacccggacaccggccatggcgcgggtcgggctgaatttcgacgtacccggaatgcgggtgtccgatccggccgatgtcgcccgcgagggcctggcccggctcccccacggaccggtgcacgtcgtctcgactcacgcggccagccccgcgctgcacaccaccgcggaccgggccgacgccgtgctcagtgcgcaccggatgatgcagaaacagatgcgg

SEQ ID NO: 167215 - DNA, 454 bp, Arabidopsis thaliana landsberg
accgcgtccaccctctcgtcttaaatgtgcgcgaccacggcgctgtggcgcaggcgatagagggcctgccggcggacctgtcggcaatcgatgttctcgtcaacaatgccgggctcgcagtcgggctcgaaccggcccagtccgccgatctggacgcctgggacaccatggtcgacaccaatatcaagggcttgatgtacgtcacccgcgccgtgctgcccggcatggtggcgcgcgaccgcgggcatgtcgtcaatctcggctcgacggcggccagctacccctatcccggcggcaatgcatacggcgccagcaaagccttcgtccgccagttttcgctgaacctgcgcgcccacctgctcggcacccgggttcgcgtcacggacgtcgaacacggcctatgccgcggcacggagttctcgaacgtgcgctttcgcggcgacgaggagcgcgc

SEQ ID NO: 167216 - DNA, 1878 bp, Arabidopsis thaliana landsberg
  unsure (1)..(1878): unsure at all n locations
tgaatgctaagctggattcggttcataacttgctcacagggaagaagcatgtccactttgcagctgaggaagagactattgagcctgagcctgagtcagaggaaggagtcttctacatagatggtcagggatacaggaagttttgggcagccacatggcaacttcagtggcaacaggtttacatggaaccagggttcctccaactacactccaaagcctgctttccagaagacctttcctcaaagcagctttcagaggacctatggtaattcaacttaccaagcccccctccaccctcagcagagacaagaatggaatcgatgcttgagcagattctggagagccaatcaaagcttgttgtggagtttaatggcaagtttgatgttgtccacacagatattaatgggaagatcgacaatctgagctctcacttgaagaaactagatgtacaggtagctcaaactgctcaatctatcaagagaaaagaggtttttcttcctggtaatcctgatgctaacccaaggaagagctgcaatgtaatcttgatcagagaaggagatgatgtgtggaaagaattggacactgaaaacgagttggagctcccagttgcagagatggtgtcgaccgacaacctcctgtgtcgatcgacaccatatggaatgctcttctcagagatgactcaatacgatggtgtcgatcgatacccctctagtgtcgatcgacactggatccggactgcaccatgtgaggtgcaaatacctatgcagcccgagtctgtctacactcctcatgtcccgtatccgaggaggcgtcgttctaagcaggagatgcatgctgctaagtgcacagccataatggagaagatcctcgatactcttcctaaggatgcttctaggacatcttctgcttcactcaacaggtatgtcaagcgacttgttgacaatggaattagctcagatgaagctaagctgcttaccagagacatcagtgcaatcatgctgcctaaggccaagaaggagaaggcacatagagtagacatagctgagtacatccgcaccattactcctggtcaaaccactaagaannnnnnnnnnnnnnnnnnnnnnnttcttgattgctttatctccacaagcagattcagccgctctttatgtgatctgggatcaagcatcaacctcatgcccaattctgttgctgagagactcggcatgactcactacagacctactcgcatcactcttctcttcgcggatcgttccaagcgaatccctgaaggaatccttgaagatgttcctgttaaggttggtaatactgttatccctgctgattttgtagtcctggactatgagaaggaacccaaagatcctcttatgcttggaagagcattcctagctacagctggtgctaggtttgatgtgaagagagggagaatctctctcaaggtgtgtgatttggatatggagtttggcatggatggttcagagcttactaagtctatcagtagcattgcttccagcacagacacacctcctcagaatccaacaacagagccacacacagcgctcccatccgctcagctcgccaatgagagctgtagagcaacggtgtcgatcgacacaactacccctgtggatggacaccctcgagtttcacaaacagagcattccgcacattctcttcagcccacaccacttgaagacctatgtgataagttctcttctctcttctcctactttaccttcgattaactcattagattctttgaagtttgcttcacaagataaaaagcctagagttcctcgaaagcttgtttctcctgttgttcttgcacgtgacgagatgagtgtcgatcgacacaccactgagtgttgatcgaca

SEQ ID NO: 167217 - DNA, 407 bp, Arabidopsis thaliana landsberg
tctatagtgtgtcaccgaattaaatttgcaagtacataattatataatacatgaatttattgcagggttaattttgccgttgcggttacgttgataagcgttggtgcaagcatgaatagagagcagatatacggcgaagggtggctaaaccgtgagtgttaccttgtgaaagatggtgtgttcgctgcgtctggctttctctccgttacgacgatggccgctattctcggagcgtttgcgtttaaagtcaaaccatcattacaggtcgagaatcatgacaaacgtcacactcaaaatgtgtagtagtttgaaaattaagtagaaattttatcaaatggaaatgcatgcaaaatagcaaaatctttacaatcatatggatatattcaagtcaaagaatcatataatta

SEQ ID NO: 167218 - DNA, 388 bp, Arabidopsis thaliana landsberg; identical to SEQ ID NO: 76201
  unsure (1)..(388): unsure at all n locations

SEQ ID NO: 167219 - DNA, 588 bp, Arabidopsis thaliana landsberg
gatatttgtaagctaagaaagcagtgtttttggagtctagcatctaggctcctccatgtggaagcagcttttaaagctaagacccttggccaaaacctttctctcttccaaagtgggtgacggtaaatcatgctccttttggtatgatgataggactcattttggtatgataattggacttcttttaggcagttgcacacgttcttaggagcagaagctcataggctactaggtcgtcctttgaaatcgaaagtagctcaagaaagatcaggggatggttggatatttggaggtgcttgaagccaaaacattgagctcctcttatgtcacctaccatcagttcaaatctcagaaaccaacaaagatatatttctgtgggtcatgaattcaaggccaccatcaagaccggtttaccttctctgatacttggaataagatcaggactacaaaaccagatgtctcttggcacaagcaagtcagtctggttttcaggggcagtccctaaacactcttttatcatgtggcttggttgcttgaataagttccttagatatttttgttgggagatatcaattgattcactgttgg

SEQ ID NO: 167220 - DNA, 409 bp, Arabidopsis thaliana landsberg
gatcatccagatggtcaagccgccgccgatgccgccgccgcgggctccgccgccgccggtacaggagcagtcgagcaatgctgttgccgcaccaccgccggcaccgcattcaccgccgccgccgccgacgatcacgcaggcgagcagcaacatgtcgtaccgcatgcggcatccgccccgctatccgccacaggcacggcgcatgcgccaccagggtgtggtcgtgttgctggtcgaagtgggtacggatggtcacgccatcgaggtcaaggtggacaaatccagtggctatcgcgagctggatcgtgccgcggtgcgtgccgcgaagggctggttgttcaacccttcgaccaaggacggcaaacccatcgtgggctgggcacgcatctccgtgaatttcactctccaa

SEQ ID NO: 167221 - DNA, 1504 bp, Arabidopsis thaliana landsberg
taacaaagtatatcaccaaccatacatgtctcagtagaatcattggtccaccaaaagcttcttccaaagtaccgagtaagcttattttggataattttagaaatatcggtcttagtatgaaaccaaatttgatcttgacaattttgaagaaacgatatggtattgattcaaaatactggaagacatggaaatatagagaagatgctcgtgatgaggtattgggttctccaaaaagaaactatgctcaaatgcaagtattcattgccaagattaaacaggctaatccgggtaccataacatattttgagattgataatcactagaggtttaggtactttatcttatcatttgctacttatgccaaagggtatgaattcatgaggaaagttgtagtagttgatggaccttcttgaaaggaaaatatggtggcgttttgctgattgcaacggctcagcatggcgactctcatagttatcctcttgcatttggaatagtagattcggagaatgatgcatcatgggatcagtttttcatcaagttgaaatttgttgtatcaaataatcctagattagtaatgatatcagacaaacaatcatcaattcaaaaagccatttcaaacgtgtatccaatggctcatcgaggaatatgcacttatcatctcaaaaagaatgtcatcactaagtcgggaggaagtaagattgctaaactcgtacagacagcatcaaaagcatacacttcaaatgaatttgatgggatttttggtgagatacggcgtgaaaattacaagttgggcgtatatttggtagaagcaaatgttcgactgtggtcacgtgcttatttttccggagacaaatatgacactactaaaagtaattcagcagaatcactaaataatgtgttaaaaaaacctcgtgagctacccattctatcattgcttgaggtaataaggaatacacatacacaatagtttttttatcgtcgagaaagcgttgcaaaattttgtacatctctcacccctagagttgaaaaagagctctataaaagatgtgatgtgtcatataattttgaggtgcagcctataaatctgcatgagttccaagtaactgatgggtcacaaaattttgtggttgatttacaacggatgacttgtacgtgtcatgtgtttgatattgagaagatccctcgcaagcatgttgctaaggctgtaatgagtcaagacatagatgatgggttattagtgcatcattactatacaaagtctcacatgtatgttgcatatcctgagagtataaagcgtatagatgaactttcagatttgagcaagataccttctgatgttattggtcagacttgtcttcatctagaggtccaacaaaagactaggaagacctaaaaaagaagatatcaaggttttggagaacgcatgacgaagaaaaaggcacgaaaacaacaagcttgctcacaatgtcatcatttgggacataatcgtgcaacatgtgacttt

SEQ ID NO: 167222 - DNA, 1182 bp, Arabidopsis thaliana landsberg
aagaggaaaatggagcgatgatgaagacattcaaagatgctgtgactggttttgcaactggaaagacgtccctcgtattgaaagaaacgttgctcttccaggactcatcagaacgttgaagatgatgggaagccacgggctgacttttgctgccattggaggtgttcattggtgttgaacagttggtgcagaactttagagctaagagagatttcttcaatggagcacacattacaatgactaaagtagcaagaactcattattagctggatcctgcgctcatggatatctctgttccatcccatgtccttctgtttttgtatcttgagatgttcatgttatgttgcattgtttggatgtttctacgaatatgagattctgcaaatatgagaaattttggagctctaaaacttcttcagaaatttgcacctaccatggtagtagcctaactcttgcgtccacttaaatctatttgaccaagacaagactatctatcaaaacagttttgcttacaagttataacttataacaattcaagtcatcatgctctatttgaagatgagattttcaatagagaagggaacaaaaacgatggattgaaatgtcaaggaaagaaaagcagaaatcaagaaaacaataatctaaacgaaagctttaagagagtatttctgtgcagataagttacgttgtgaagtattggttccaaactacaaatcactgaatcaggctgatttctcttttttcttttttcttttggtcttggggtggggtttcttcactagcaatatgccaaatatgatcgaaggagctctacatgaacaagacactttccgcttggtctattattcttattagtcaccttgtaggcagtagagttgccttatatttccagatgctgtcgcaacaaaaacatagactaagtcaaaacctaatgaatgatgcatatcaataaagtaaagtagggatcgattcagagaaagttttcttaccgtaaagccagtctttgaaataaacatggagtgcacttgatagctctcgtttccggttttcttctagaggcgcctcttttaacgatcgtcttgtttcttcaaagttcttaagctgatgacaaaaaaaattgcagatacaagatcagatatggacaaaaataacaaatgcatttgtttatctggttaagatata

SEQ ID NO: 167223 - DNA, 430 bp, Arabidopsis thaliana landsberg; identical to SEQ ID NO: 68020
  unsure (1)..(430): unsure at all n locations

SEQ ID NO: 167224 - DNA, 1167 bp, Arabidopsis thaliana landsberg; identical to SEQ ID NO: 49074

SEQ ID NO: 167225 - DNA, 676 bp, Arabidopsis thaliana landsberg
  unsure (1)..(676): unsure at all n locations
aggatattgcggtttcatcgatgatgagcagccataagaatgttctcaagctcttgggtttttgtttagagtttcctcgttcggatctcgtgtgtgaatacccagaaaagggagctcttgcctatataggaggtgcgggggaggnnnnnnnnnnnnnnnnnnnnnnnnnnnnnnnnnnnnnnnnnnnnnnnattgccgatgctgtaacgtatctgcatactgaattccctaggactataatccatagggatttaaagcttacaaatattttcttggacgagaattggaccgctaagctctcttctttcagcctcagcataccaattccagagggagagttgggggtagaagatatcgtttgcgggacacaaggctttggagagccccactatatggtaacaggttttgtcactgagaatgttgacatctatagctttggattcatcatgctaagtcttttgacaggaaaacatggattctatcaagaaccggctaatggtgacagttataacatgattctgttgcctgattatgttgagaagtgtttggggcgaggaccgttagctaaagtgatagacccatcgatgttaaacagtcccgaccacgacattcctgatcattcaaaacagaaaatggaagcatttgttaatcttgcattgagatgtgttggattcag

SEQ ID NO: 167226 - DNA, 302 bp, Arabidopsis thaliana landsberg
cgaccaccgcaacgaccagtgggtgcgccgcaagagcaatgtggtccttcgcttttcaccagtcgtcgctgctctatggccagacgctggccgagaaggggcgcataatcggcccggaatggggccttgacccgctcgactacgccggccatggcggcagttttccggtccgtgtcaagaaggcgggcgtgatcggagcgatcaccgtatccggcctgccgcaactcgacgaccatcgcatgatcatcgaggcgctcgaacaattcctcaagctcgaattgccgaaattctgaaccgccacc

SEQ ID NO: 167227 - DNA, 3283 bp, Arabidopsis thaliana landsberg
atttcagtatcatctctcgattcttgatttgtttcaatgacgacatcatccaatacaaatgtggatagctcgcgacagtctattgatcagtatgagaatccattctttcttcacagctccgatcatgccggattggttctagtttccgatcgtctcactactggagcagattttcattcttggagaagatccgttcgtatggcactcaatgtacgtaacaagcttggttttattgatggtaatatcactaaaccttcacctgatcatcatgattttggatcttggtctcgttgcaatgatatggtagcaacatggttaatgaattctgtatgcaagaagattggtcaaagcttgctgtttatatctactgctgagggaatttggaaaaatcttttagctaggttcaaacaagatgatgcacctagagtctatgaaatagaacatcgtttgagtattattcaacaaggtgctatggatgttagttcatattatacagaacttgtgacattatgggaagaatatagaaattatgtggaattgcctgtttgcacttgtggaagatgtgagtgcaatgctgcagtgttgtgggaaagattgcagcagaggagccgagtcactaagtttcttatgggactgaatgagtcatttgagtctacaagaagacaaattttgatgctgaagccgattccaactattgaggatgcattcaatatggtaactcaagatgaaaggcagagaagtattaagacaccttcatcaaaaactgtagtgtttcaagcttcaggacctaatcaatcttctggtcaatgttatcaagatgtctcttcatatcaaggtcagatggataatacagcttttgcagtacaaaatgaatatcgtccgagaccacctagaccagtttgcacccactgtggtcaatctggacatgtagtacagaaatgtttcaagattattggttatcctccagggtatattccaaggtttaagagcaccatctctaactatcaatctcagagatctcctgctccatcaacctttcagcctagaggatattctgcaaatgctgcatctaaacctcattcagttgcaaatatcatgactaatcctcctagtctatacattccaccaccagctacagaagttaacaaccttgatattaacaagctgagtggagatcaaattcagacattgattcaacaactctcaggtcgtattcaaacttcagagcctttggctccttctccatcaacatcggcaccatcaacagttacagaacatggtataatggctgttcaatcgtctactggtacaattccttttccttcttcatctcttcgttttgaaaatgatcaacttactttccaacatcaatgcttatcttccttatacacaaatcttcctcatggtagctggataattgatagtggtgccactactcatgtgtgttctgatctagcaatgtttaatgaaactaatacagtttttggggtaactgtttctttaccaaatgatactagagtttagatcacacacacaggcacaattccattatctcattcactcattttgcaagatgtgttgcatgttccttcttttaaattcaatttgatttccgtgagtagtcttttaaaaacaaatcattgctcatctcacttctatgttgattcttgtattattcaggagtttattcagggattgacgattggtagaggcatcctacttcataatctctatattttgcgacttgatgcaccatctacacatgatcaatttgctggatccttggtagttgatgaaaattctttggcaccaacgccttggacatccatctgctgacaagttaaaatgcatcgcatttcgggtactctttcttcgtctaagtctagtttcatgcatccatttcattgttctatttgtcatttaccaaaacagaaaagattgtcatatgagtctcataatcatttgtcttcactttcatttgatcttgttcatttagatgtgtggggtcctttttctattgagtctttagaaggatacaaatattttcttactatagtagatgattgcactcttgtaacatgggtttatatgatgagaaataaaagtgaagttacacaacatttttcagattttattaaacatgttcttacacaataaaaagttgttattaaaatgattagaactgataatgctcctgaacttgcttttaaatctattgttaaagaacatggaatggtacatcagttttcttgtgcatacacacctcaacagaattcagtagtagaacgtaaacatcaacatctactgaatgttgcaagatcattgttgtttcagtctaatgtcccgattgcatattggagtgattgcttgttaacagtcgtgtttcttattaataggattccatcagttttgttgaaaaatatatcaccttatgaataacttacaaagagaaaacctgcttatgattttttaagatcttttggttgtctttgttatgtttctactttgcaaaaggataggaataagttctctcctaggtctgaaaagtgtattttcttgggttattcatcaagttataagggatataaagtcttgcatattgatttaaattgtgtttcagtttctaggaatgtagtatttcatgagaacatctttcctttccatgataatccaatctcacctgtttctgatgtttttagtcatgctatcttaccattacctgttcatgttaatgatgaaatccatacatcatcatcacctaatgcacataatgaacattctcatgcatcatctgcatcatcgtcatccacaacatcatcacaaccatccacttcaagctctagtatcataccggttttgccagaagcagttacaacagagacagcatgtgtttcactttctgttgctaggccaaaacgccaaggtaaggctcctagttacttatctgactatcactgttctttcacacaaatttctgagccttcaccacaaaattcttttccacatctcaaagtttattcaacaccatatcttatatcttcagttctctcttattctagcttaaaatctccatttcatgcttttgctttatcttaatctactgaaacaaaacctaaaactttataacaacccattatatctgtacaatacactaaatcccacgattagtaactttgggctatacaccttaataacacttctaatgaagttcttttactccccaaaacaatgtactcattctgaaatatttttataccattaactacaattccaatcattctat

SEQ ID NO: 167228 - DNA, 846 bp, Arabidopsis thaliana landsberg
cctcagatagttcagctccgtggctcggtcaagcaacctatcttcagttgcaagtttagcagagacaggtgacatttgagttcttcatatatgcataaatctctctctctgtactgtttgtttagttactgatggtggtattgattcttcagggtgtcacaggtggatccgttgaatgggtactggtcaagttcaggcgatggaactgagcttgagagtgagagacgtgagagaaaaggctggaaggtgaagatacatgatctctctggctctgcagttgctgctgctttcataacaactccttttgtcccatccactggctgtgattgggttgcaaagtccaacccgggtgcttggcttgtggtccggcctgacccgtctagaccaaacagctggcagccttggggaaagctcgaagcttggcgggaacgcgggatcagagactccgtgtgttgcagattccatcttctatcaaacggtctagaagttggagatgttttaatgtctgaaatcctcatcagcgctgagaaaggtggggaatttttaatcgacacggataaacagatgctaacagttgcagctacaccaattccaagcccgcagagtagtggagacttctcagggttgggacagtgtgtctctggaggtgggtttgtaatgagctcgagagtgcaaggggaagggaaaagcagcaagcccgttgtacaattagctatgagacatgtaacttgtgtggaagatgcagccattttcatggcacttgctgcagctgttgatcttagcattcttgcttgtaaaccttttaggagaacgagtcggagaaggttccggcattactcctggtga

SEQ ID NO: 167229 - DNA, 2657 bp, Arabidopsis thaliana landsberg
tattctcgaccaacagaagctacagagacttgtagggagtttaacaagtttatagaggattacagaaggttctagtcaatagggaacaatgcttcaggacaaacagaccaagtgcggcccaccttctctcctctttgtccccccatgcgtttttagtgataaggaaatcccaaggcttcatcacagccagtcgatcctacctcatctcttcccaccgacgccatctctccctcacaactctcactggaccaaacctcactcgtcatccctctcaccgtctctctttcactcgattgcgacgtcctctccaatcaccgcctctgtttactcgacgacctcatgccgttcactcaccgcaagcttgactcggccaccaaggaactcgcctctccctcctcaccgttcacgccccctctcaaccactcgtcctcatcgttgccatctctcatcaaaccgtcaccgtcttctctctactctgatttctttcactcgacctcacgccgttcactcaccgtaaagctcaactcgaccgcttatcaaaccgccgctgtttcccggtgaagattactcgacctcgccggacacaccgccaccactcgaccgcaatccacctagaaacgaaaacccaaggcacaatttcacacggccggttactcgaccggtttacacgacctggttattccacggtttactcgaccgagttactctatcggttcggtctattggtatactcgaccgcttgtgtttgttgggactaacatattgacgtttatctttgagttgtattttttctcaggaaatcaatatgagtaactacagtagcgaatcctctatggatgcggattacaacgtcgatgaagctgagtcttggtcaactagaccagagaaagagcaacaggcttgtgagagcttcagaggtgacacccaacgctcagtagctcgacgcaatgagaggagagctgagattgctagaggaaagagagcaatgacaagtagatgcgaattgatcgacgaagatattgacgtcgagtatgagcctgagtcatgacacagagagacgaagctgttgaacaggcctgatgaaattacagttgaggagtacatcagacttttcgagctgaacgacttctgggaatgaggtatccctgttatcagactttagtccagctggggctactagaggacgtacatcacttatttgagaagtatcatctggagacactgatgtcttacccgtacgtcgcctacaaaaaggaaacaatagagtttctctccactctgcaagtggagatgtatcagggacttacagcaaatgagctggagagtgaagggttggggttcttgactttttcagtgagcgagcagcgctaccagttatctgtcaagagtttggaaggattgtttggtttccccagtggaaagggaactaaacccaagttcgagagggaagagttgaaggatttgtggttaactattgggaacgatatggcgcttaactttgcgaggtcgaagaataaccagattcgaagcgctgtgatccgctactatcaacgctctatagcgtatgttctgtactccagggagtctacaggcaccgtgtctaacacggacatggagatgatagattatgcgcttacagggattctccgccggacgaagggaaagaatgtcttgagcggcgatctcaacaacgcaccaccagtaatgcctctgttgatccatctgtgtggatacaggaagtgggcgttgacgaacggaaagaagaaggtgagaggagcactatgcgtgggtggcgttgtgacgccaattttgcaagcttgtggagtaccgctcaacgaaccagggttagcaccgaggatgatgaacttagatcatttgcgccgatgtgatttcttggagtttgacatggctggcgactttcaccgctacaggttcgagcattcatcgattaaaatcgccaacattcttctcccctgcattgatgctactaggattctcgagggcaggaagattgacttcaagcctgcgcttgaagaactttatttcgagggcagtccaccaactgaggagatcagtcataccgaagaagctacaacagaagatattgatgagacggatgatatagatgaggcggagtttgacacgagcatgtatcatttcagtgagcatatacctcctgcgagggaacaacagcaagctgcaaaagtggtgcaagaaacaggacaagttactcgccaaatgcctcaaaactatcaagtttctgaaggacaagatcagctgctcctcttccactacagctattccgcgaggacaacctcctcaggacatgccttcgaggagatatgacgcgcccgagccaagtcggcgcaggcctgagcctagagagcaggagatttcgcatgtccatgcgagtcattcatcattcgaacctcgtgaatcagggaggaagaggaggaccacactcactcgatctagcagcaggagtagacaacttttgctgtctcgtagtttatgccgaccgcggtgctggccgcagcagaagaagagaggtcgagtatcctcagagcggtgctagccgccacagagctgatgaggtcgactacccacctgctggagctgatacggaacatggcggttcgtctatggcctgggagcat

SEQ ID NO: 167230 - DNA, 342 bp, Arabidopsis thaliana landsberg; identical to SEQ ID NO: 76938

SEQ ID NO: 167231 - DNA, 168 bp, Arabidopsis thaliana landsberg
atgattgtaggacagaaaaatcgtccaccattaatatatttgttaaggatctttcttgaaatacctgccgacagacggataaagacaaatctatatgcactgaacaagagtaagtagagcataaaggagaaatacgtagaagcaaaactactgaggacttactttaga

SEQ ID NO: 167232 - DNA, 550 bp, Arabidopsis thaliana landsberg
cgccatggctaacaccaatgcttcgagctgattacttcgtgacttgttcgattcattcacaatcgagtaaaagtgaatgtaatctgttttgtttggattgttcaggcaatgccttttgttcttcttgtctcgctcatcacagaacccatcgtgttatccaggtttggttttcaatttttcattacccatctatctctcaggaattttgtcgaacacgtttgtttaatgaacctaattctattttttttttttttgttgttacagattcgacgatcgtcgtatcataatgtggtgagagtgagtgagattcaaaaacatattgatatctcttgtattcagacttatgttatcaatagtgctaagatcttcttcttaaacgcgagacctcaatgtcgaactggtaaaagcttaaacaaaacatgtcagatctgttctcgtaaccttctcgattcgttcctgttctgttctcttgcttgtaaggtaaatgctgcaatgttgtggtctttcttcaactcaagttgattattaggttcttgatgttctatgtcta

SEQ ID NO: 167233 - DNA, 685 bp, Arabidopsis thaliana landsberg
acccaaatggaagcaaattcgtttcctgcagagtcaaagttccagtcttttttatccattacgccgtaatttcatcagatgctgttcttctccagatgggtttctcagaaaaaccaaagaagacgaagaaggaaacgaaatcattcagcttccgtcaattggtgtaaaccctgtgaaattcgcgatttgcgttgtgttgtgggcttctttctctctgctttggtttgctaggtctggagatgcaaaagctgcgactgattctatcaaatcttcgagctttggtctcagaatcgcctccactcttcgccgttttggttggccagacgaagctgttgtgtttgctttagctactcttccggttattgaactccgtggtgctattcctgttggttattggatgcaactaaaaccggtggttctcacttccttctctgttcttgggttagtctcttagatctccaaaaattagtttagccacatcttgatattgttggtgatttcatgatttgtgcttagaccagagtttgcaagtgtctctgatgattatgtattgttgataaaagtgtgaaatttgagcttttatggttgagggtacacgtttctgttgttttatttgattctatgataagtttgactctttgagtaaacaaagtctagcaagtgttctcatttaggtggattggcg

SEQ ID NO: 167234 - DNA, 243 bp, Arabidopsis thaliana landsberg
tgaacgaggcgagacaagaggcgatgggaacaagcacagatgctaaggcacctgatgtttcactcagctatgcagcggatactgcgaaagaagggttaaaacaagccatggataaagccaagaaaaagagcggagacctgccacggaggaggcacaacggttgcaggcggcgaggacgagagtgaagagaatgtgacagtgggtgagataggaactcttaaagggaaaaatcaatcttcaagc

SEQ ID NO: 167235 - DNA, 337 bp, Arabidopsis thaliana landsberg
atgatggctcagaggtctcttttccaaggcgaatctagtgttgatgaggtatttatctccacatctgaatagtacaaatcgttgcccatctaacgtcgagtacatcatgtttgtgtttatgtaggagctcgaccgtatggaaataaggatgctaacgaggtacggcgaaaacaggaagcgcgataagggcgttccgatcgagtgtgattgcaatgctaaggttgtcgttgccacttctcttgatcctgttacaaccggaaaactttttttcagttgtccgtacgaaatatcggatgtaagcatcttttcttgagttaatattctttattttattttt

SEQ ID NO: 167236 - DNA, 244 bp, Arabidopsis thaliana landsberg
gcttcaaagacactacttaaaatgggagatgttttaagagaaacaagagtgttctcaagtgaagatattaaggcctatgctgaggtgagccatgattggaacccactccatttcgatccagaatctgctcgtaaagccggatttgagaatcgccttgtccacgggatgcttgtttcttccatgtttcctcgtatcatctctgcccatttcgtaagttttctacttttagtttgcattcattata

SEQ ID NO: 167237 - DNA, 924 bp, Arabidopsis thaliana landsberg
  unsure (1)..(924): unsure at all n locations
tgtgacttggattgtgtttgttgtgcgagtcagagatggnagatacaccacagaagaagaggtttttgatggtagagtcgatgggaggagcagtagtctttctcttgcaccgcaagaaacccgagttctgggatggaggaatccttattgcacccatgtgtaaggtgaacatatatattcagatatatatatcattttatataagaattatgtataattactaatttgatgagagtcagattgctgaggagatgaaaccatcacgaatggttatatctatgataaatatggtgacaaatctgatcccatcatggaaatcgataattcatggacccgatatccttaatagcgcgattaatctgcctgaaaagagacatgaggtactcttactctctttcggctataagataagagattttgtttttggtaaccaataaattctggaccttctcggaccagagtcgatatccactgaccgtttaaaacacagataagaacgaatccaaattgctacaatggatggcctcgtatgaagacaatgaacgagcttttcagaatcagcctcgatctagagaaccgtttgaacgaggtaatatcctatatacgcattgaggcaaagttccattggcttgttccagtcacttaataaataaaattacacaaacacacacacacacaattaatctacatgtctaggcaaaataaatgttaatttggggatatgttcatgtgagatataggtgacaatgccattcatagtcttgcatggagaagatgataaagtgacagataaaggagggagcaaactgctttatgaggtggctttgtctaatgacaagactttgaagatgtatccagaaatgtggcatagccttctttttggagagcctccggagaattcagagattgtgttcaatgacattg

SEQ ID NO: 167238 - DNA, 479 bp, Arabidopsis thaliana landsberg
ggcgtacgcctcttcgagctcgggggcgcgtacctcaatcggctcgatctcgcgacggtcgcacgtccacacctcgaacagctgatggttcgcctcggacacaccgtccacctggccgtcttcgaccggggacaggtggtcttcatcgcgaagatcgaaccccattcgtttgttcggttctccacctaccccggcatgcggcaggttctgcacaccagcagtctcggcaaggctctggcggcacacctaccggcccaagacctcgagggtgttctcgccgccgggttggtgcgcctcacggaacggacgatcacggatcctgaacagttccgtgccgtccttggtgaggtgcgcgcgcggggatactcgatcgaggacggtgaagcggaaccgaacgtccgctgtatccgcgctccggtgttcgacgccggaaagtaaagggcgcgatcagcatcaccgccctcgccgcgcaactggcc

SEQ ID NO: 167239 - DNA, 1735 bp, Arabidopsis thaliana landsberg
  unsure (1)..(1735): unsure at all n locations
atcgttttctaagtctatntcgtcagtcagtaaatctaaaacaaaaattctatttttcattgctaattattttcattgttatgaggttaacgtcattactaatcattatcagtagttatctctttttagttatacattcaaattaatattatttatgtatcgaatattttaccgttacaaatattatttcgatatttagtatgttagcatgttattattcatatattcgattatcttaccatgttaagacaaatattattttgatatttagtatgttagcatattattgttctatgtaatatgttataatcgtgatcatgttaattacgtaacatgatattttattttgttgatatatatatatatatatttatttataaatactgattcataactttaaaccgataaacatttatttaacaattgaaacgacgacttaagaaaaaactctcaaacataagtatcgaggaatctccaccggtcatgttctacggcgccggcaacgctcttccttgccggcaatgggtgataaatcatcttgcgtttcttcgatcttaatcttgtgtttctgcctcctttttagttaaactttttaatctctttaatccctcacaaatcttctcaacccacaagtatctcctgtacgcttcaataattaaaaacaaaggagaaaacaaatggccggcgatagccatccctcaacaccttcccgtaccatcccatccggcacgattcattttgcccaactggaactcgatttccctcaccagaacatctaacccatggttttcttcctgggacttgattctcgagtcaaccccttagccactgacctcccgtccaccagagttgctcgagccaccgcaaaacccttcagcctctccgtacggcagctgctctgagaaccgtaatctgccaaccaaagggaaattaggttttcttcaggtgggcactgcatttttcgtcacattacagtatccaaagcccaacttcaaatgttgtgatccaagccttatctagcaaatattcaggtctgttttaaactcctttttacccaatcttagtcaatctttctgttgtttgatgtattcaattgagctaggacatcaattcggacataacgcacatttgttactagttgggtataaaaatcttttgagaacccttcctttagttacaactagggatttgagtaatggaaccaatgcttatgaaacttaaaacttgaaggaattcggcattatgatcccgtctttacgaagcggtgattaccgaaacatccgctacttgttatattcgttgcctttgaatccagagcttaagcaaatgttatctttcatatacgattggtggatcatccgggcattatttcttatggtattctccttaagaggtttcagcacattcatggctattttgaaaagttttaagagtttgaaggagaacgacattttgaccccgtctcaaagataggtggttaccaaagcttctgcaaccttccttatctaataacctcctatgtggagaacgtttctaagaactcctatgtgttatccgcacgagccacttttgaccacttgttggtcgaggatttcgcgaagcccgtcttcatggtcgaatccgctatggtttgaacagatttttcaatttccttgaaaaactcatgagcctctatcttttcttgctttatattttcatagttccaacttgtatgaactttcatcttttgatgttt

SEQ ID NO: 167240 - DNA, 324 bp, Arabidopsis thaliana landsberg
tgatttgttttcttttttttacttacatttaattattaatgttttgcacaccccaaatcaattggtgtctttttgcagactcgctagagcttccgagtgcaacgattcttcttactgtggttacaccaaatttcttagtggaaatagtcagagacaaactaagagataaaggaagtgtgtgccttttcacgagcatgtactttctcagtagtcacactaaagcttgtggcttctttatggttggtcgtaactcagttttgcatcaaatattggaaactttccgtttaaggaattataaagatgtattattgcttaatttttcgg

SEQ ID NO: 167241 - DNA, 476 bp, Arabidopsis thaliana landsberg
gcagcagaacttcgccgttgctccgccaccaacttctgcccgcccaactggagctcctaacggcggtggtgcgcccgccccgcccccacttcgacatgtcccagcccgcctgggagaccatcggcatctacagcgcaggcatcatccccgtcctctaccagcgggtcaagtgctggcggagcggcggcgtgcgcttcaccatcgccggcttcgaccacttctacatggtgctcatcaccaacgtcgccggcagtggctccatccatagcatggctgtgaagggcgccaacacggactggatccccatgtacaggaactggggcgccaactggcactgcctcgcaggcgggctcatcggccagggcctcacgttcgcgctcgtctccaccggcggacagaacatcgtcttccaggacgtcattccggcgtggtggcagttcagccaaactttcaacacctaccagaacttcgactac

SEQ ID NO: 167242 - DNA, 1747 bp, Arabidopsis thaliana landsberg
  unsure (1)..(1747): unsure at all n locations
atggcggaatgtgacttatatgacttaagacactcaggaaatttcttctcttggcgtggaaagaggcatgatcatgtggtgcactgctgtctaaatcgagctatgtcaaatggagcatgggctgaaacttaccctgcaagttgttgtgcttaccttcgctttgaaggatctgaccatatacgacttctcactcactttgatctatcaaagaaaaagaaaaaaggagtgttcaaatatgacagacgcttagagaataatgaagaagtaacagcccttatacaagcggcttggaacctatgtgatactggggatgtgaaggaataaattaatcgatgccgcttggacatcattacctggacccaagaaaagcaccagaacagtcaaagacttattaaggaaaaccgcaaaatttgaggaagcaatggctagtcaagaacacaaccatgacctgatctctaccatcaataacaatcttttcctggcttacaagagaggggaagagtattggaaatagagaagtagacaattatggcttgctttaggggacaaaaattcgggttacttccatgcaattactaaaggaagaacactcactaataagttctcagttctagagagagaggatggggcacctatctatgaagaggcaggaattctgaaggttatctctaagtatttccaaaccctgttcactgcaaaagacggagaccatgttgcgactataaaagaagccattaaaccatgtatataccctgaaaggaaccaacttctcatcaaaatgccttcagggaggaaataaaaagatcttgtttctctattcatgctcataaggcccatgtccctgatggtttccccaagcttctttcaatctcactgggagactgaggtccaaacattgtgctagagattcagtcgttcttttcatctgccaatctgcacccaacaatcaaccaaacaaatatcaggcttatacctaaaatccaaagccccgaaaggatggttgattacagacctatagcattgtgcaaagttttctacaaaattatctccaagttgctctcaaggcgtctgcaaccggtcctgcaagatataatctcagaaacccaatcagcttttgtgccaaaaagagcgattaatgataatgtccttattacacatgaagcactccactaccaagcatggataagctggatcatgcaatgtgtaactactgttacttactcttttctcctcaacagagcggcccaannnnnnnnnnnnnnnnnnnnnnnnnnnnnnnagggagatcctctctcaccttacctcttcattatttgtagtgaagtactttcttggttatgcaagaaagcccaacaggatggagtgctaattggtcttcgagttttaaaaggcagtcccaaaatcaatcatcttctttttgttgacgacacgatatttttctgtcgatcagactctggtcaaatgattaacaaggcaaagtcagctatcactttttctgggaaaacaccccatgccatcaaattggaagctcagcaaatccttggcatacaacttacagagagctaggaaagtatttgggcttacctgagatgttttgtaggagaaagagagatctgttgaaccagatcattgaaagaatacggcagcgctctttgagctggtcttctcgcttcttgtctactacgggcaaaaccacaatgcttgaatctgtgctagcttcaatgcctacatataccatgtcttattt

SEQ ID NO: 167243 - DNA, 205 bp, Arabidopsis thaliana landsberg
  unsure (1)..(205): unsure at all n locations
atgagtcgtcagcgttaccccgaagaattcatgatcgaagcggtcaagcaagtgaccgagaaaggcaaacctgtcgccgatgtcgcccagcgcctgggcatgtccgtgcacagtctttacgcctggatcaaggtctacagcaagccccaagagcagcgtcagcaagacgacgatcatcangcccaactgcgcaagctacgcgctg

SEQ ID NO: 167244 - DNA, 610 bp, Arabidopsis thaliana landsberg
caaaaaggtttcgttagtgtgtgcagagaaaccaaagtgtggaggaatattttgaggaatttgaacaactcaagaaccgtctagagttcgaggagtcggaagagacgctaatggcacaattccttgacggcttgcaagaccgtattgctagaaaggtagaaagacaaccataccattatttagggatctcctccacttagctattcaggccgaacaacacattcaaaggaaagtagcatctactacccgatccaagtcgcattggaatataccatctgtgaggaatgtagataaggaaaagtcactagaagttgaatcacggtttaagaagcaagcacctgcaacatcgaaagaagctcaaacagaacaaagtaagttcaaaaataatcaacgagctagagatataacatgttttaaatgtcagggtaaaggacacatggctagagaatgtcccaacaatcgcgtgatgatcataacatccaccggtgattatgagtctcaagataaaaatgaagagaatgcggatggctcggaggacgatgttgaataccctgatgtgggcgagctccttgtaacaagtagaatgttgagtatcatggttgagccagaa

SEQ ID NO: 167245 - DNA, 293 bp, Arabidopsis thaliana landsberg
caggtggcctcttagctagcgagtatcatcttggcagcatactatatgttgttgttcgactgtaagaagtctgcacaaaggtaatgactcacaggagtacccctatctttccatcggtttactggctttggacaagtacgagttttcaaccgcggagaccgtatcaagtgttagcaatctcttattatagccattggcgactgacacggatcgtaatgccccagagtcggatagggtggccaatacgccccgaagcccttgccaccagtgtgtatgaaatacaccatgcctag

SEQ ID NO: 167246 - DNA, 411 bp, Arabidopsis thaliana landsberg
atggatcaaatgttatcaggagaacaagatcttgaagtagatattgaagctggtcgatctgacgttacacaagaatccacatcagatactgtttcaggcaatggggtctggagtgaacgggcgaatttcggtgtctctgaaaagattgctgatgatctgagctatccattgataagagacgaaaaccgagtagaaactagcagtcagagtttggatctttcagagaaaaaatgcggtaatggaaagtttaagaagtcgagaaaagcttcaaagcctccaagacctccaaaaggcccttccttgagtgagaatgaccgtaagatcatgagggacatacaagagctcactatgagaaagcgtgcaaggattgaaaggatgaaaaagtccttaaaacgttaaagcagccaagac

SEQ ID NO: 167247 - DNA, 922 bp, Arabidopsis thaliana landsberg; identical to SEQ ID NO: 50745

SEQ ID NO: 167248 - DNA, 2342 bp, Arabidopsis thaliana landsberg
atgttggacaaggcatgggttcgtctatgcaggtaagcagataattaatatgggttagttttctgattaggtttggttgctttaagagtttttttttatttttcctgtttacttgaagagctgatcctggatatgagaaaggtgctcagaaatttgtaaccgatgtggctgctgcattaggagacattgacatgatagtatgtccctgcaaagactatcgtaatgtggaacgaaagtcaggctgcgatgtggtggatcatcttgtaagaagggggatggatgaggcttacaagttgagagctgattggtatcatcatggggacgtggactcagtggctgactgtgagagcaacttcagtcgttggaatgctgaaattttggagctataccaagcagctcaaggttttgatgctgacttaggtgagattgcagaggatgaggacataagagaagatgagtttctggcaaagttagcagatgctgaaacacctctatatcctagctgtttaaaccacagcaagttgtctgctatagtgactctttttaggatcaagaccaaaaatggttggtctgataagagtttcaatgaactccttggaacattgccagagatgttgcccgcagacaatgtgcttcatacatcattgtatgaagtcaagaaatttctaaggagctttgatatggggtatgaaaagattcatgcatgtgtaaacgactgctgtctatttagaaagaggtacaagaatctagaaaattgtcctaaatgcaatgcgtcacggtggaagagtaacatgcaaactggagaagctaagaaaggagtcccacagaaggtattacgatactttccgataattccacggtttaagagaatgttcagatcagaggaaatggccaaggacttaaggtggcattatagtaacaaaagcgctgatggaaaacttcgtcaccctgtagattctgttacatgggataagatgaatgacaagtatcctgaatttgctgctgaagaaagaaacctgcggcttggcctttcaacagatggatttaatccattcaacatgaagaatactaggtatagttgctggcctgttctgttagtaaactacaatttgccgcctgacctatgtatgaagaaggagaacataatgttaagcctgcttattcctggaccacaacaacctggaaatagtattgatgtgtacttagaaccccttattgaagatcttaaccatctgtggaagaagggtgagttaacatatgatgccttcagtaagactacattcactctaaaggcaatgcttttatggaccatcagtgactttcccgcctatggaaaccttgctggatgcaaagttaaaggtaaaatgggttgtcctctatgtggaaaaggcacagatagtatgtggttgaaatatagcagaaagcatgtgtttatgtgtcatagaaaagggttggcaccaacacatagttatagaaacaagaaggcttggtttgacggaaagatagaacatgggagaaaggcaagaattctaacaggtcgtgaagtttcacaaaccctgaaaaacttcaaaattgatttcgggaatgctaaagaatctgggaggaagaagatatattagcatctatattagcatctcaggcatctcaggatccatttaaaacttcaaaaataattaaaggatccatttatattagcatctcaggcaaagcaagtcttctattcaagggtagatgattcatctagttggtatgttgcaatgaaaggttcatcaagaagatatagtaaagaagatgctcaggaaggaaacgcagagattggtccattaccagcagatattgacatggacgctgaaatggatgaagctgaatatgctagatctgattgtgaaggcatttatgtgccaaatgtagattcttattcattttatgagtcattgttctatgccttgcatgctctatgtttactcttgcttttttggtttcagatttcttttttagaagtatgattgacatggaattctttttgtgaaatgcaggtgaactgaaatgggtaaagcaaagaagaaaggtggacaaaaaagaaagaagaaagctgtagatgatgagccagagtatatcggcaccattgagccccaagatacagcagctgagcctgctaaggaaactgagcctgataatgaaactgagcctactaaggaaactgagtctcaaactgagcctgtaatagaccaacaagctgaggagaatcttttagtgaatgatacggatgggctgaatgaggaagaggcgataggtgagatggaattgtcagaaggaactgagcctccggctaagcgtaggag

SEQ ID NO: 167249 - DNA, 1244 bp, Arabidopsis thaliana landsberg
gtgcaaccaacggatgttagtactggtacaggcaaggtattattgctagatactaagcggtatggatactggaaagttcgtatgacacaaatcattagaggacaaggtgaagatgcttggactgctgtagaggaaggttgggaacctccgttcgatctaacagaagatgggttcaaaatcactaaaccgaaggcaaactggactgcagaagagaaacttcaatcaaagtttaatgcaagggctatgaatgctattttcaatggtgttgatgaagacgagtttaagcttattcaagggtgcaagtcagcaaaacaagcatgggatacgttatagaaatctcatgaggaaacttcgagtgtaaagagaacaagactggatcacattgctactctgtttgagtatctcaagatggaaccatatgaaacaattgtgaagttcagttcaaagataagtgcccttgcgaatgaggctgaagttttgggaaagacctacaaagatcaaaaattggttaagaaactgttacggtgtctgccaccgaagtttgttgcccacaaagcagttatgagggttgccgagaatactgataaaatatcatttgttgatcttgtgggaatgctcaagtcagaagaaatggaacctgatcaagacaaagtcaaaccgtcgaagaatattgcatttaatgcagatcaaggctctgagcagtttcaggagattaaggatggaatggcactgctagctaggaattttgggaaagctctgaaacgtgtagaaagaggtcagaatcgtgacagtacgccctggagcaataaagatggagagagatcacgtggaagattctccagatctgagaatgatgactcaagaaagaagaaggaaattcaatgctatgagtgtggtggttttggtcacattaaaccggagtgtccagtcaccaagagaaaagaaatgaaatgtcttgaatgcaaaggtgtgggtcacactaagtttgaatgtcctaacaagagcaaacttaaagagaaatctcttataagtttcagtgatccagagtctgatgatgaaggtgaagagctgttaaacttcgtggcgtttatggcaagttctgattcaagcaaggttatgagtgacacggatctgactgtgatcaggaagtgaaccccaaggatgaatacccagccctatatgacagctaggtgcaactaagaaaaaacaagctgaagttggtaaaggaaaagctaaccctacaa

SEQ ID NO: 167250 - DNA, 416 bp, Arabidopsis thaliana landsberg
ccgtctctttcatgttccttagggtctctttcatgttcctttggaagctatggttagttaagttatataactgatttgctgtggtatgaaaacgagcttctctatttgtggtacaggtgatcccatggggtgatctagactcactcgccatgcttcagagacaactcggcgtcgacattctcgtaacaggccatacccaccagttcacagcctacaaacacgagggaggagtggtgataaaccctggctcagcaaccggagcttacagcagcataaaccaagacgttaacccaagctttgtccttatggacatcgatggtttccgagctgtagtctatgtctatgagctaattgatggagaagttaaagtcgacaagattgagttcaagaagccccctactaccagctctggtcct

SEQ ID NO: 167251 - DNA, 381 bp, Arabidopsis thaliana landsberg
atcagacaaccactcgacctcttcactctacctaaaggtcgagtatcgccatcacaccactcgactacatactcgatgaccagcttcagagccttcttcattccgccctcaaccagacactcgagcacaaggaagaaaagaagactccagccgttcactcgacctctcactcgaccacctaggtcgagtacggttcttaatccgttccaatacttcgtcgttttgagtattagggtttcgggatatttggctataagtagcatgtatttctcattttcgcaacaagaagtttttacctagtttttatttccgcagaccttgtgttctagactttttgtaatccggatttctctttatctattcagtattcagtattcagtt

SEQ ID NO: 167252 - DNA, 1505 bp, Arabidopsis thaliana landsberg
tcttgactgtactccagatattagtcatcatgaacaaatgacagtgatcattcggtgtgtatatgtttcagcaacttcaactaaggtcaaagaattttttttgacgtttttgaaagttgatgatacatctcgggaaggactttttcgtgagcttcaagatgtgttggctgcttttgacttaaaaattgatgatgtgagagggcaaggttatgataatggttctaatatgaagggaaagcataaaggagtacagaaaatgtttcttgaaataaacccaagggcgttttatacaccatgtagttgccacagtcttaaccttgcactttgtgatatggcaaccacttcttcaaaggcaatttcattctttgggattattcagcgtacttattgttttttctcagcttcaaacaagcggtggaaaatatttgaagatcatgtgagtggtctgactctcaagccattgtcacacactcgttgggaaagtcatgttgaaagtgttaaggcgataagattttaggctcctaaaatcatggacgctttagtttatattgctgaaaatagtgatgatccgaaagagcagagtgaagctgaatgtcttgcaacaagtgaaacacatggtattggaagttttgagttcttagtttccatggttatctggtacaatcttctctctgttgttaacatcgtcagtaaaagcttgcagtcagaagacatgaacattgatgttgccattgatcaactgaaaggattggtgtcttattttcaaaagtatagagattcaggctttgagaaagccaaattagaagctaaagaaattgcagagtctatggagattgaggctgtgttccccaaaaaagcaaagcgggtcattaaaagaaaaagacattatagtgaagaatcagaaaacgttataggaagtgttgtattatcaccagaggagagctttagaattgactacttcatccaaatcatggatcaagctctttactcgcttgagacaagattcgaacaattccaaaggtatgaacaaatatttgggtttttgtttgatttgaaaaagttgcagtcggcgagtgatgatagtttgatggcatcttgtaccaaccttaaagatgctttaactcatggaacacattcagatattcttgctagtgatctcttttatgaactaaaaattctaagagaagctttacccaaggaagttaggaggcctattgaagtgttagacttcttgcaaaaagttgaaggttgttatcctaattcatggattgcttatcgagtattgttgacaattccagtttcggttgcatctgcggaaagaagtttttcaaagctgaaattgataaaatcttatcttcgttcgagtatgtcacaagaaaggttaagtgacttgacgatcttatctatcgaaagagcattggttagagaagttgactttgaacgtttggctaatgattttgttgggaagaaaggaagaagaattacgctttagaactatttttatg

SEQ ID NO: 167253 - DNA, 1021 bp, Arabidopsis thaliana landsberg
ttcaaaatatcacaaggggtgctttttgtagagtgaacagggccggaagtgatggaaagagatagataagcagacaaagatctattcctagagataaaaggatcaaaaccaaggcttggtgaaaacacaaataattaaccaggcacaggaaagaaaaatgaaactagaggaagccttttgggaccaacagtactatcaaaactcctggaactgactgctgccctcttgaccaccctcatgttccttctggccatttggttcaaattcaagaagaagaacgagccggaggctacggcgttagttagtgtaacaatattgttgtagaatgttggataagataaatactaaatagacacttttttgttattaagataaatagaccttattgtttacattttaaaggacttgttctataatattaaccacgtaaccaataaggccgtgcctcacttatgaaaaaagaaacatttgcttggggcatcaaattatggaaaaacattttggggcatatattacagatttactctttaacagagttatataaatatgtttggtgccccaagcaaatatattaataatagaatgtaaatattgggcttccacaattcattgacatagccccatggacttaattaattaatttaaaaaccaaaccattacttaatataataaatgtgttacaagagaaatttgggtaagcgaaggttattaaacaattaaggtgtcaaaatctgttatcaaacaattagggtattagattttcttaaaacagttgaaattgttatccaaacttatgagccgcttatcaaataccattgacgattccgattttggtttcatctgctgaaaatagcttttcaaaacttaagttgaacaaatcgtatttttttgaattgcgttgctgccttccaaaatccctaagcatgattcaagtcataagaaattctagatgttccgatcgaccaagtttttttttttaaattcaatcgattattattttgttggttccagggtttttttt

SEQ ID NO: 167254 - DNA, 1006 bp, Arabidopsis thaliana landsberg
ttaatcatctaagtggtgtctattccaaggaatagtaaaaggatacctttgttttgtctatggtttgctatatgtttttggaaaatgaggtaggttctttcctgatggagaatatttgggcgatgcataaatttgaagaaagggaaaaagataatgtgggaaaagtgatatctaatggaatcaagaactataggggatggataacagcattagcatatggctattgttttggagtagagcttaccattgacaacatcatcgcagaatatttcttcgatagattccatttaaagctccagacagcagggattatagcagcgagttttggactagccaattttttcgctagacctgaaggaggaattttctctgattttatgtcgagacggtttgggatgagaggaaggttgtgggcttggtggattgtgcaaacatcaggaggtgtattatgcgcatgtcttggccagatttcttccttgacagtgtctataattgttatgcttgtcttctctgtattcgtccaagccgcttgtggacttacctttggcgttgttccctttatttctagaaggtaacatacattttggtattgagttgcttgattggttattcaacatttttgcttacaaaagtttgtttatgcagatctcttggggtggtatcgggaatgactggtgcgggaggcaatgtaggcgcggtcttaacacagttgatattcttcaaaggatcgacatacacgagagagacgggtataactctaatgggggtaatgtcaatcgcatgttcattaccaatatgcttgatttactttccgcaatggggaggtatgttttgtggaccctcttccaaaaaagtaactgaagaagactattatctcgccgaatggaacgatgaagagaaagaaaagaacttacatatcggaagccaaaaatttgcggaaaccagcattagcgaaagaggtcgagccacaacgactcatccccaaacttgataaattcatggtgtt

SEQ ID NO: 167255 - DNA, 3453 bp, Arabidopsis thaliana landsberg
  unsure (1)..(3453): unsure at all n locations
cctaaaattccccacaagcgacggcgtgaaaaccatctagggaaatcagaaaaacgctcgaatctgtttcatggcagcgcataagctcaggaaccccgtcactgaatcgatggccgacacgagtcataagaaggccaagcttggccaagctgaagaaaaatcaatttccgagcagttatagcaactaaagatcgaggaggctcgggaatctgcaacaccaactcccgatccggtaatctccatatcccgtgacgacgaaaagcccaagcgatgcgtagaattcggcggagatctaggagaagagttaacaactgaactcaccgctttcctcaaagagaacgtcaatacgttcgcctggtcccgagaagatttgctcggagtaagtgttgacatcgtgtcacacgagctcaacatcgacccgacgttcaaatctattaagcagaaaagaagaaaattgggtcgggagcgagcagaagccgtgaaagccgaagtacaaaaattactgagaatcggctccatcaccgaggcaaaatatcatgattggatcgcgaacctggtcgtagtaaaaaagaaaaacggcaaatggagagtctgcgtagatttcaccggccttaacaaagcctgcccaaaagacagcttccccttaccgcacatcgatcgcctcgtagaatcaacttttggaaacaagctactgtcattcatgaacgctttcgctggttacaacccgatcatgatgaacncgatggttcaagaaaaaactgcattctacacagaacaaggcatcttttgttaccgagtaatgccattcggactcaaaaacgctggggcaacttatcaacgtttcgtcaacaaaatcttcgcattatagatcgggaagacaatggaagtttacatcgacgacatgttggtgaaatccttggcagaggaagaacacgtatcccatttgcgcgaatgtttccagcagcttaacctctacaacgtctaactcaatctagccaagtgccgcttcggggtaagatccggagagttcctcgggtatctagtcacgcaccgcggcatcgaggcaaatccgaagcaaatcgaggcattgttgggaatgtcatcacctcagaacaagcgagaagtgcagcgcctaaccggaagagttgcggcccttaaccgttttaactctcgttcaacagacaaatgcttagccttttacgatgtgcttcggggaaacaaaaagttctagtggacgatccgatgtgaagaagcttttcaagaactcaagaagtacctagcaacaccacccatcctcgccaaacccgtaatcagagagccattatatttgtatattgccgtatcggatactgcagtcagcggagtgctattccgagaagacagaggcgaacagaagccgattttctacgtctcacagactttcaccggcgcggaatctcgctatccacaaatggagaaacttgcttcagcggtcgtaatgtcggctcggaagctacgaccctatttttaatcccattccatcgtagtaatgggatccatcttacacagtccaagccaatcaggacgtctagctaagtgggcaatcgagctcagtgaatacgacatcgaatatcggaacaaaacatgcgcaaaatcgcaggtcctagctaattttatcgtcgaattacccaccaaagaagctcgggaaaacccactcgacacaacttggctcctacatgtagacggctcgtcatcaaaacaaggctcgggtgtaggcatccgcctcacctggccaacgggtgaaatcctcgagcagtcattcaggttaaacttcgaagctaccaataatgtggccgagtacgaagcacttgttgccggacttaatctagctcgggggttaaagattgaaaaaatccacgctttttgcgactcccagctcgtcgcgaatcaattcaacggagaatatacagctcgggacgaaaaaatggaagcctacctggttcatgttcaaaagttagtaaaacatttcgacgaattcaagttaacaaggattccacgaggagaaaattcatcggccgacgccctagctgctctggcctcaacctccgacccgaacctgagaagagtcatcccagtggaattcattgaaaaaccaagtattgagctcggcgaagaagaacacgtcctcccgatacaaatcagcacggatcaagatgacctagacgaatgcagcccaaagtggatggaacccatcataagctatatatccgaagggaaattgccctcggataaatggaaggctcgtaaactcaaagctcaggctgcacgtttcgtcttaatagggaaaaaactttacaagtggcgattatctggacctttgatgacctgcgtagaaggagaagcgacttgcaagatcatgaaggaaattcacggcggttcgtgcggaaaccattctgggggaagggctttagccatcaaaataaaacgccacggattcttctggccaacgatgatcaaggattgcgaagaaatttcaaaacgatgtcaaaaatgtcaaaggcacgcgccgacaatccatcagccagccgagctcttgtcatcaatcgcctcgccatatccattcatgcggtggtcaatggatataattggacgtatgcatcgctcgaagcagaaaaagttagttctcgtcttgaccgattatttctctaagtggatagaggccgaatcttatgccagcatcagggacgctcaagtcgagaacttcgtgtggaaacatatcctatatcgccacgggataccttacgagatcgtacggataacggctcgcaattcatatcaacccgcttccaaggcttctgtgataaatggggaattcgacttagcaaatcaacaccacgatatcctcaaggaaacggccaagccgaagccgctaacaaaacgatcctcgacggtttgaagaaacggcttgctgctaaaaagggctcgtggtccgacgaactcgagggtgttctatggttgcatcggacaactcctcgtcgagccacgggagaaccccccttcgccttagtctacggaacggaatgcgaaattccagccgaaatgatggtaccgagcctgcgccgaagtctatctcccgagaacgaaccagataatactcaaaggctgctcgacgaacttgatctgatcgatgaaagaagagattcggccttggttcgcatacaaaactatcagaatgaaacgcctcggcattacaactcaaacgtccgacaacgaagattccatgaaggatatcgagttcaccgaaaagtttttcaaaataccgccgaaccaaacgctgggaagctcgggacgaactgggaagggccatacctgatctctaaggacgtctgacccggagtatatgagctcgccgacttaagcggcaaagccattccaagatcctagaacgcaatgcacctaaggaaatactacaac

SEQ ID NO: 167256 - DNA, 653 bp, Arabidopsis thaliana landsberg
tgccgaacgtgcgctcgatggtgttcaaggaaacggaaggctcctatgtcgtcggcgtgttggcggcgctcgcctccaagaccggcacggtcggcttcgtcggcggcatggacgtgccgctgatccgcaaattcgcctgcggctatgtcggcggcgtcaaggcgaccaagccgggcgacaaagtgatccagaacatgaccggcgacacgccggcggcatggaacgacccgaccaagggcggcgagatctccaaggcgcagatcgaccagggcgccgacgtggtttatgccgcggccggcggcaccggcgtcggcgtcctgcaggcggcggcggatgcgggcaagctcgccatcggcgtcgattccaaccagaacggcctgcagcccggccacgtgctgacttcaatggtcaagcatgtggacgtcgctgtctacaacgccttcatggatgcgaaggacggcaagtacactttcggcgtcgagaatctcggccttgccgaggatggcgtcggctatgccatggacgacaacatcaagtcgctggtcacgccagaaatgcagaaggccgccgaccaggcgaggaaggacatcatctccggcaagatcaaggtgcacgactacatgtcggataacgcctgcccctactgagccgga

SEQ ID NO: 167257 - DNA, 380 bp, Arabidopsis thaliana landsberg
ttgtgattgcgagagttttcggaatcagaaggttgcggttttaagcattataatttgaacgactggtttagcggttaaaaattggtgtatttgcgagagctttatgactggttaacggatttacgtttatggtagaaaaattacgggtgtatgttttttgcagaaaaattacgggcttacgttttttgcataaaaattacgagtttacatttttttgcgggaaaattacaggtttacgtttttggcgggaaaattacgggtttactattttggcgagaaaattacaagtttactattttggcgggaaaattacaggtttactttttggggaaaaattaataggtatgttttggcgggaaaattacgactttatgataata

SEQ ID NO: 167258 - DNA, 743 bp, Arabidopsis thaliana landsberg
aaatcatcaccttttactaataatatcaagaacatcatccatggttattcatcgattctgttgttctttgagattctcgcgatgatctgttatttgaataaacagtaagtacaattttgattgtgtgagttttgactctcacatatggcacatggttaggtcggataaaaataagctgcaaggtatgttgatgctccttatgcggactgctttgacagagaagaagagagtctgatggtttgtagttaatggcgtgtccatccggtactccatgagagaacatgctctaataactggtctcgattgtcattgctatgaatcagattataaagcaaggagctttggtagttatgactttgtgaagagggtgtttggaacaattgctgttaacgtgaaggatgtggaagacatgtttgattcaatggaagatgagtgttgtggagatcgattgaaggtggcagtcttgctctttttatgcaagatagttagaggaaggagaaggtttaatagcatccattcatttgttctgaaaatagtgaacaatttagaagaagtagaaaagtttcattgggggcgaaatacctttgaagacactgtggatgagatccatcacttgatgaagaaaaggttaaatggcacagtgggagtggactatttatttccaggcttcattgtgcctcttgaggtacggttctatatatctttttaataagttctctgtttggatgaataagattgtattc

SEQ ID NO: 167259 - DNA, 173 bp, Arabidopsis thaliana landsberg
atgcatgagatctagtatgcagtatggtcccacagaagtatctggttatgggcagttcctctatattctctttctggcgcatcaggcccttctaggacagatttcaagcattcggtggacctcttatttggtgacaaaggaaaagccatgagtcgtcatcgactccccgagaa

SEQ ID NO: 167260 - DNA, 726 bp, Arabidopsis thaliana landsberg
gtatttcgtatatgtcagttgcgatcacaagaccttaataatctagtttacgaagaaagaattgagttgtggaatttggaaaacgaacaatttgaaaagttagtagttcaaccagctttgaattattatgaacggtattttcaaaaagtccagtccaaactgatagatgtttgggatggagaaatatatggcgtcgactacagcaagatgatgctgcttgacttcagttattactaatgtcacttccatgtttcacaacattgtgtaatatgttgcaaacaaattatggtcttcagccaacattgaatataagtattgaagaaagagttgcgatgtttctatgaatatgtggacacaatgaagttcaaagagatgatggtttaagatttggacgaaataaagagattgtgcagagaaagtttagagaagttcttacggcaactgaattattagcatgtgaatatattagaactttgaaaagacaagaattttatcgagttccgaagatattggctatattttagtgggttcgttggagctaatgatgggactcatgtatgcttaaaagtaaagcttgagttatagagaatgtattggaatcgacccgatattgcatcattgaacatcatggcaatatgttatttgaacatattattcacatatatttggaacgggagcaccaagttcatgccacgatacaactatttgtacatatagcacaaccaa

SEQ ID NO: 167261 - DNA, 503 bp, Arabidopsis thaliana landsberg
atcaccacctccggagctcacagcagatgaccgtactttcatcttcctacaggtaaactaacattttcataattatggtctgcatattctcatggtctttagtaattgtttgtctctttcttttcagtccacagagaaagataatcgaggaaattattatggagtgggcagtcttaaggagcatcttccggatctagtcacaggaaaacgcaaacacttaggagaatctttttctttcgtggcattgcaagtgcaactgaaggaagctcaacaaaaaattgaagagcaagctgctcataatgcaaaacgtgaggaagagcaaaccaaggctgtagctgagcagaaggacaagttggcacacttgtccttggttgagaagtatttgcgccaaactgatccagcctttctccacttcatcgagtctcattcacctgaatcaactacagagcctatctcatctccaactacttcttaagttacttgtccctctttaaaactagcat

SEQ ID NO: 167262 - DNA, 347 bp, Arabidopsis thaliana landsberg
aaatgctgcagcacgacaccattttcaccaacgtggcggtgaccggcgacatgcagccgtggtgggaaggcctggacaagcgcgtgccggtgaaagactggcaaggccgcgattttgacccggccagcggcgatccggccgcgcatcccaactcgcgcttcaccgtggcctcgcgccagtgccccagctggtcgcccgaggccgagcccgcgcaaggcgtgccgatcagcgccatcgtgttcggcggccgccgcaccgagctggtcccgctggtgttcgaggcacgcgactgggcgcatggcgtgctggtcggtgcgtcaatggcgtccgaagccaccgccgcggcc

SEQ ID NO: 167263 - DNA, 587 bp, Arabidopsis thaliana landsberg
  unsure (1)..(587): unsure at all n locations
atgctgggcgtcgccctgccgaccggcgcgaaaaacgcgcttgcggtcgcgccgacgcccgcgacggtggcgncggtttcgctccagggcgtgatggatttccatgcgcactccgcgcctgacgtcagcaagcggtccgccaccagcttcgaggtgatccgcgcggacaaggccgccgggatgcgcgcggtcgtgctgaagaaccattatgtcccaaccgccgcgctcgcgcagcttgcgatgcaggaggtcgacggcatcgaggtctacgannnnnnnnnnnnnnnnnnnnnnnnnnnnnnnnnnnnncccgaggccgtccgccgcatggtcgaagtcgagggcaagcgcggcaaggtggtctggtgcccgacgttcgacgcggagaatcaggtgaagtccacgaagtccaaccagcccttcgtgcccgtcgtgagggacggcaagccggtgccggcgatggcggacatcttcaagctctgcgcccagaacgatcttgtcctcgccaccggccattcctcgcccgaggaataaaacatcctgctccaggccgcgcgggaggcgggcgtgaagcgcctgggggttcg

SEQ ID NO: 167264 - DNA, 624 bp, Arabidopsis thaliana landsberg
  unsure (1)..(624): unsure at all n locations
ggattttcttgcgaaaaaaactccgacagatcgctatctcttcaagttcaaccatccggagcttggaccttctctgttacccctaccatgcgagaaccgaactttggtgaagacaaggcgcaacatcaatttcatgccatctccctctgtcttgaacatcaacattggagtaggtcgagaagatgaaccagaatatagtcaagctgactatgagcaacaggagtatttcactcaagatgactatgagcagcaaaccgagtttgagcaacaaagcgagcaaccggagcaagaggcgaacgaattcgagcaagctcaccaaagagaaaatgcggatcaaggaggagatgagatagctgaagttcacaagaagctcggtgtgcttgaagagcttgggaaccttcacagcaaaacagtaaagggtttcaagaagaagatgagaacaatgaataagtcgctgaagagtatggctgctcaaatcaaggacttccagagcaagccagaggcaccatctccgaccccctgaagtaagaagaagccggttcacaagctcagctgcaaggagggctgaaaggattgatcaaccccgagcttcatcatntgagtctcgggaaatgatctccgagt

SEQ ID NO: 167265 - DNA, 304 bp, Arabidopsis thaliana landsberg
cgcgctggacacctcgctcgagcccttggccctgctcgatgcgctgcaggccatcgaaaacgaccagggccgcgtgcgcgccgagcgctggggcccgcgcacgctcgacctggacatcctgctgttcggcgagcaggtgctcgacctgccgcgtctgaaggtcccgcattaccatatgcacgctcgcccgttcgtgctctaccccttggccgagctggtagccagcgacttcgtgctggccgacggccgcaccctcgcccaactgctgcaagcctgcccattcgtcggcctggagcgcctgtaa

SEQ ID NO: 167266 - DNA, 821 bp, Arabidopsis thaliana landsberg
gataatgatatactattcgatgactctcttcccgaggagcaactattagcaattaggcttttggatgcaagtcatgagacctataaaaaacttgaggaggtgaagacattgaatgaaaatggcccatggtatgcggattatgttaactatttggcatgtggaaaagaacctccaaatttgagtagctatgaaaagaagaagttcttgaaagatataaaccacttctattgggatgaaccatttctttatagtctatgtaaagataagatctatagaagatgtgtctcgaaagaagaagtagaaggaactttgcgactttcaagacggttaccaaggttctacaagcgggtttatggtggccaacgatgtttaaagacgcacaagagttcatttcgaaatgcgattcatgtcaaagaaaaggaaacattagtagacgaaatgagatgccccaaaatccaattttagaggttgagatctttgatgtatggggaatagattttatgggaccatttccttcttcatatggaaatagctacatacttgtggcggttgattatgtgtcaaaatgggttgaggcgattgctagtccaactaacgatgcaaaagttgtgttgaagctattcaagactataatatttccaaaatttggtgttcttagagtggtcataagtgatggagggaagcatttcatcaacaaggtctttgagagtctactcaagaagcacggagtgaagcacatggtcgccacgccttatcatccgcaaacaagtggtcaagttgagatttctaaccgggaaatcaaagctattctagagaagacg

SEQ ID NO: 167267 - DNA, 574 bp, Arabidopsis thaliana landsberg
  unsure (1)..(574): unsure at all n locations
cggctcgaccgcggcacagcactcgcagagcntggagtcctggttcttgcacgtgccgggcatcaaggtcgtggtcgcgtcgatgcccgacgacaccaagggcttgctgcgccaggcgatccgcgaccccgacccggtgatcttcttcgagcacaagcaggtgtatggcgaccgtggtggcccggccggcgacgtcgtcgaggtcgagccgatccagttcggcgtcggacgtgtgcatcgggagggttccgacgtgacggtcgtctcctatctgaagacgttgcacgactcgctcgccgcagcggaaacgcttgcagcggaagggatctcggttgaggtgtgggacccgcgaaccctcgtcccgttcgaccacgccggcctgcgcaggtcgatagccaagaccgggcggctgctgatcgcccacgagggggtcgagcgcggcggcgtcggcgcggagatcgcggcctgggcggcgcaggagtgcgccgacgtgctgcgtgcgccggaagcgcgagtcggcgcccggaacacaccgattccctacgcaccggtgctcgagcgggaggtcattccc

SEQ ID NO: 167268 - DNA, 1707 bp, Arabidopsis thaliana landsberg
gatggaacgtctacctgtttccaatacctcctcaacgtatactgggccacattcaggaaaaaccattcttaattctttggaatatgcacacgcagtcacactttgtagtggaaggaaattgctcaacacccaaccaacagaaaagatcactgaagatagtgaagttcaagaaggggaggaccagcataaaaacgaagttcaaactgatgaaccaattaagcttgatcagccttcatactcactcgaccctctactcgatcgaacaaagccaacttttgaggaaagtaaagccgcggctgcagaaaaaataaagaatggtctccgccacccttcaaactgactatgcttttccaagaaagattcaagaaggaattaatagaaaaatacaaaaccctttttgataagcagctaaaggagattgagctaagaatgtcgttaatggatgctttcatgctcattccacactcccacaaggacctcaatgatctgattatggaaagaaccaaggaagtgcagggaatggtggtaataggccatgaatgcaacgctttcatccagaaaaatataataccaaggaagttgggagatccgggatccttcaccctaccttgttcagtaggaccgtcatctttcagtaaatgtctatgtgatttgggtgcctcaatcagcctcatgcccctatctgtagccagaagattaggttttagtaaatacaaaccctgcggtatccaactgatattagctgacagattagtcagaatacctcatggagttctcgaagacctgcctgttaaagtcggatcaatagacatccctactgatttcgtaatactggagatggatgaggagccaaaagacccattgatcttaggaaaaccattcctagctactgcaggagctattatcgacgtgaagaagggaaaaatcgacctaaacctggggaaggagatgaaaatgaccttcgacattaacaaagctatgaagaaaccaacaatcaatggacaagtcttttggatcgaagaaatggatggattggctgacgaattactggaagaacttgcagaaggagatcacctagcaagtgccttaaccaacgaaggagaagaagattacctacacttagaaactcaagggtacaaagagtatctagacgcccacataccaatggaaggaccagaagagtttgaggaattgattgttccctcagaagaagcagtatcaggatgcacaatgagcctaatcgctgaaaaaacaaactctactgagatgctagaccatggaggagagaatataagttcagatgactggtcagaactcaaagctccaaaggttgaccttaagcctcttccaaaaggtctgaggtacgcgtttctcggtccaaatgatacttatcccgtcatttttaatgatggattaagtgatgaacaagtgaaccagttgttgaatgagcttagaaagtataggaaggcaattgggtattcattagctgatattaaaggaatttcacctagtttatgtactcataggatctatcttgaaaatgaatcatatactagtattgaaccacataggagattaaatccaaatttgaaagatgtggttaaaaggaaaattcttcaactgcgtgatgctgatataatatacccaatttcagagagaacatgggtctctcccgtgcactgtgatagtaggatttttgtcaattaa

SEQ ID NO: 167269 - DNA, 621 bp, Arabidopsis thaliana landsberg
ccttcctcccgaatttgcaggccttcgattgtcaattgccttgaagaatcaattgaccttttctcctcctttcttcaattggaaggtttctcttcggtttccctttgattcttactttacgtctatcggcgaatactcttaggggttagaattagagatttaggtttctattgcgcgagaaattataagaaattgaagggataatgaagaggaatcaatgaaacggagagaattttcctgcatgtattttttttctgtatatcacagattcataggacatctcgaggagatatttgatgctgagcatcgtgaagagattcttcgatatatctatcgtcaccttgtattcttgcagcagattttaaagaagaagcttgaccagagaagatcctcacatgagttctgtttttgtcccttaatttgcagaacgatgatggtggatgggggttacatgttgaaggcaagagctttatgttctgcaccgcactgaattacatatgcttgcgtatactcagagaaggtcctgatgaaggacgagaatatgcgtgtaaactgacgagtaagatgccttggatcgtgacatttttgctcatctacaacaatgaaagttgtttcccatca

SEQ ID NO: 167270 - DNA, 1049 bp, Arabidopsis thaliana landsberg
ccaatccacgagcctcaaaccgttcttcaaagcaacgagggcaagaagtgtacctagcaaggtgcacaagttgaggcgcgggactcaatgaggaagagatggccctcatcattaagcgtttcaagacagcgctaaggggttgcaaggagcatcccaacaagaccaagacgaaggggaagcgctcatgcttcaaatgtggtaagattggtcattttatcgctaattgtcccaataatgatagtgaccaggaacaagggaacaagagggaaaagaagaaggcttacaagaaggctaagggcgaggcacaccttggaaaggagtgggactcggattgttcgtcgtccgactccgacaacgaaggactcgccgccaccgccttcaacaagtcggccctcttccccaacgaacatcacacctcctcatggcaagggaaaagaaggtaagcactcataatactagtacttacgcttcctcaagtgatgaagaatctagcgatgatgaaatagactattcatgtttattcaagggcctagatagaactaagattgataagattaatgaattaattgatgctttggatgataagaatagattgttagaaaagcaagaggatcttttgtatgaagaacatgataaatttgcagaggcacaaaaatctcttgctttagaagttaaaaggaatgaaatgctttcttgtgaactatctacttgccatgagactatttctagtttaaaaagtgttaatgatgatttaaatgctaaactagaattagcaaatagatctaactcttgtgtagaacatgttgtgatttgcaataggtgtaaagattttaaggttgatacttgtagtgaacacctagtttctattgcaaagttaaatgatgaagtggctagtcttaatgcccaacttaagactagcaaaagtgaatttgataaactaaaatttgcaagggatgcctacacgattggtagacacccctacaattaacggatcgggcttcggctattatagatgggaacgccaaacgaaacttcaacgaacgtaattc

SEQ ID NO: 167271 - DNA, 2057 bp, Arabidopsis thaliana landsberg
gaatcttacgggccttactccttgtgggattactttttatctacgtggcaatctttggtaggtcccggactctggtgcagaatccgacaccaacaattagccccctaagtctttcgaagtgttcttcgaattcagaagactaacatcttaatgggcaaagattgcgctagatgactttctgatttcctgccaaaagctagttactccttcgattccggcaatgtccatatttatccgtatgacatctgtcaccattatgaccgcatcttaattattactattaaagcgggaaaacccttccacttcctccacgactcccgagcggtgtcatcatcaccaccaacttgcgtgaggtaaattcatttacctctttcttacttttccgctttttctttagaacaaaatttctcgcctttttcttctaccaactttctcttcttcgaacgcttaattttttcaccttcctcgatgaatcctgatactgaaagacccgaatccccgtctttcgacgaggggggttctagcaatgacatatgcactcgccttaacggtatcgctggtccacactacacatccatctgtacccttcaatccctcgaacgactgaaagatctctgccagattctgcctgagattatggcggaatcaaagatgcctggcccctttgagtccccggaagagcatcgccctggttatatatgcgtttacgagatctatttcaaggcctgcgggttgaccttccctcttcccaaggccttggtctgttacttagatgctctcataattgccctaccccaactaacccccaacctcctccgaactatttttaggatcataactattgcggaggaagccggattcgttatcggggtccctgaactgaacgagcttctcagcatgagaagttcattgaagaaaactggatatttctcggcatactcgaatgctaacaagaaccatctcgcatctcctaaacaaggataaaaactggcatcatccttggtttttgattaagaaaacccctgcttcaatcagaaatcttttcgatgtactcccatcgaagtggtttgcaaagcccggtagaaattaggtcacatacaccttcttcatttatctttatttttactgaccaaatccattgtctcgctttgcagatttcatcgctcagactctcccgaccaaaatatttattgaattcttcaaaatcgtccttgaaggggataccctttggaactccttcactcttgattggtttatagaagctaatcgcaaactcataatgaatctatccggatagaaccttccgctgcctccccctttacctcaagtaacatcagctcgggctcttgcttcccggcgcatgatgctatccaaacagatggccgaggcctgtgaggcaaataagacattcctcatttccgtcatcgaataaaaacagtatagttggaccctgttagttgacgacggtagtgctgagggggccggatctgctgacgcttttagatcaactccatgtcctgaacgtcgtggtggccgtttgcctcggagaaaccgatctccccatcgcaactctcctcgttactctccctgaaatggactgagtagcgaaccagttgctgacttaattcgcaagaagagagacatatcagcccgaggtagctcttccccactgagagagaaatcaaaggctcggacggaccgttcccctaggttatctcttccacctcgatcgatgggtcctccccatcctgtggtcacatctccccctcctcgacttagtggcgagaagactgaccgaggtgtgactcctcgacaggaaggttctgagtcacgagatactcctccgaagtcgaagaatcgttcttgtttctcaagccaagtcgctttcaggttcggtaaaaaagtttccttttctgacttctgcgttgttcgtggcctcaataacccttgaccccttctctctttttcagctatggaaacagagggtaacgttttccgatgtttcaagacccagaaggatgcgatcttgccgaacttcgatagatggcgtcctacaa

SEQ ID NO: 167272 - DNA, 611 bp, Arabidopsis thaliana landsberg
  unsure (1)..(611): unsure at all n locations
gacgtcaaggtcatctcgcacgaatacacgcgcgagatgctgcagcggtggcgggacctggtaggcaccaggcgccccatcccgctgcccaccgagacgttctcggccagggctcgacgtcaacggcgtcaagttccagctcgactacaagggcgtcaaccacgcgccgggcaacatcttcatctacctgccgcagcagaaggtactgggcgccatcgacatcatcagcgccgggtggagcgtctacaacgcgtgcgacgcttcggagaacatccgcggctgggtcgaggcccacgactgggttctcgaatacgacttcgacgccgtcgtctccgggcacgtgaaccggtggggcacccgcgacgacgcggtcgagtcccgtcagtacgtgcaggacatggtggccttctccaaggaggccatgtcccnnnnnnnnnnnnnnnnnnnnnnnnnnnnnctcgggttctccaacgcctgggtcctgtgggagaactggatgaacgagctgaccaactacgcgaccaagaagacgctcgaaaagaaaaacgacaacggccagacctgggccgagcggctcgccggcgccgacgtatgaccaagtaccgcgtctc

SEQ ID NO: 167273 - DNA, 583 bp, Arabidopsis thaliana landsberg
  unsure (1)..(583): unsure at all n locations
ccatnnnnnnnnnnnnnnnnnnnnnnnnnnnnnnnncatcgtgctgcgcgacggcaagcaggtgaccgaattccgcgaaggcctgctgccctgggcgctgcagaatccggtggcgctggtgttcgacgaatacgacgccggccgccccgacgtgatgttcgtgatccagcgcgtactggaagccagcggccgcctgaccctgctggaccagaacaaggtgatccgcccgcatccggccttccgcctcttctcgaccaccaacacgatcggtcttggcgatacgacggggctgtaccatggcacccagcagatcaaccagggccagatggaccgctggagcatcgtcaccacgctgaactatctcagccacgacgccgaggaagagatcgtggcggccaaggtgcccagcttcgaccgcaagaccatcgccgccatggtgcgcgtcgccgacatgacccgcaacgccttcatcaatggcgatctttccaccgtgatgagcccgcgcaccgtcatcacctgagcgcaaaacgccgaaattttcggcgatgtcggtttcgccttccggctttcctgcctcaaaaag

SEQ ID NO: 167274 - DNA, 409 bp, Arabidopsis thaliana landsberg
atgctcaatcccgtccccgccacctacgactatcgcccgcccactgacccctggctcacggtggtgcatgccgacgaggatatcgtggtgctcgacaagccctcgggcctgctcagcgtccccggcaaggacccggcactggccgattgcctcgaagcgcgcgtgcgcgagcgctggcccagtgccgccatggcgcaccggctcgacaaggatacgtcgggggtcatcgtcatgtgcctcaacaagcgggcgctcggccacgtgggccatgagttcgagcagcgccgggcgaaaaagtcatacgtggcaagggtctggggcgacatggcggaggagtccggcctcatcgacctgccgctcgccaccgactgtgagaacaagccgcgccagcgcgtcgactacgagcgcg

SEQ ID NO: 167275 - DNA, 750 bp, Arabidopsis thaliana landsberg
  unsure (1)..(750): unsure at all n locations
gacgtcttgatacgattgttatcagggaattaatagaaagtcaccactagnaaaagaaggatcctgctataagattgctcctagtaagaaaacttctgcaaccaaaaccaaaagcaatgcagaaactgaaaaaaaaaggtcagtgataccattccttcagctcactctgctaaacaatgtctagactactgcatttctttcctttcggatttatttggatcttccttatttttcatctgtagttaaatctatttatctgacatattctcttacttgtctcatttcatgcagagaccgagtttggaaatcaattacaatgtcttggataagctatttgatcctgtaagtttacccctctttccaatttgtaaattatcttttatgcaagaatacaaagtgtcagagatatctggtttttggtgatagaatggacctcttatttctctgcttagtctcttatgtgtattatgtgtattcacatctttgtaggagaactctcccaagagggcgaagctagataaaccagttgttgttggtgcccaaatagaatattcaaagcaaaacagtgaagaaagccttttgaaatctcagtattctgaagaagaagaagaagaagcagaagaaccagactggaatgaggattacagtaatgaagatgcgtatagaggaaacgaagaatgctacggcaatgagaatcttgaatttgaagatctagatgacgttgaagaagatgatgaaggggtaatttgg

SEQ ID NO: 167276 - DNA, 588 bp, Arabidopsis thaliana landsberg
atggaatccatcttctccgatcttcagcgccttgtccaccagaaatccaaatcaaattcctccgctgaacaatctcagacgagagcaggctacgagaaacctgaaattccaacacagacggaagcagaatttcaggtgtcaaagccagtcaaagaatcagaggagctagacaatcggtggggtatggttctttttacatctctgccgcccttagtcatcgaggtggaggaaagtgtgcattcttcaattgatcgtgttcagaagactgaatcgactgtaccagaggttgcaacatctcaaccctctatagcatatcgtttgcataagaggaaacagtcgactgctgctcaggttgacaaaaggcagaaaaagggcaagggcaaaggagtagccgcttcatctaccttcgaagaaacccggtttgtatctcgagaggctgaaaagaggtatgcttacttctcccataagaatattattgtggaagaaggtctttctcgaaagcctgatgataaggttagagaatttatctatgatgctgggttaatccggactgtgactgagctgaaaccgtttaagaaggacttgtgt

SEQ ID NO: 167277 - DNA, 1246 bp, Arabidopsis thaliana landsberg
atctgatagagacaaaacatgtttggtcctcaaataagacgagtgaagttggagaaacagagcgaactcagaatcgaattacaacctacttcacctctcagactccgtttgctcgatggcaaggctgagattttcggctatgaacttccacatgaagtttggatcacatttccacctctcatgacatttgcggtatgctttttacttacgcaacttcaaaattcatcttgtggacttgtgggttagtttaaagatctaagctttaggtaatgaatgatgttatgaattgagataacatagaaagttatactcttgatgatttatattgctctactattcaggtttttacatggtatggtgcaactattgaaatagatggtatcacaggaaatgaatatatatcatgtgaggtaagtttttggttccactcactcttagttcagataatataatgtttactaaatatatctttgttatagacgcctatggtgaactatcttggactgcacaactctctacaagtataaagacatcgtgttacttcctcaacaagagattctgcatcttcacaggtaaatttttttcttactaaagaacattaatttccagttcttgtagtaacttgaattgcggttttgtttgaaggagggaccaagggttatcattgtaggggatatagactctgggaagagcacattggctaaaatgcttctgaattgggctgtaaaagatggttggaaaccgacatttgttgatcttaatgtcggtcaaagctcgattaccataccaggaactatcgctgctgctcctatcaaaatgcttgtggatcctgttgaagggtttcctcttgataaggctcttattcactactttggtctcacaaatccaaggtgattgacttcaaattctgattctttagggtttaatataacctaattttcgtttcttgtaccttcagtgtaaaccttagactgtacagaacccttgtggaagaacttgccagagaattaaaagaagagttttccgcaaacgctgaatctagagcttctgggatggtgattgacactatgggatttatcgttcgtgaaggctatgcggtcattttagcatctttttctcttgtttttttgtgaactaacatttatgctatgaactacaagatttctaatatggtatcatttttaaatttaaagctgcttctccatgcaataaggacgtttaatgcgtctttagtgattgtcgttgg

SEQ ID NO: 167278 - DNA, 1261 bp, Arabidopsis thaliana landsberg; identical to SEQ ID NO: 38720

SEQ ID NO: 167279 - DNA, 1717 bp, Arabidopsis thaliana landsberg
  unsure (1)..(1717): unsure at all n locations
aatatatattattgtaagaaaaagatctccatttggtttttggttttgtaatcttgtggtttgggtatgggtttaggtggggaagggtctgtctatagtcgacaaagctcagaaattggcctttcagcattggattgaagctgtaattcctttcttccacaaatttcaatatttgtttgtgttatattctgattaaatgtaaaaagaagactaataatatgaaaatttgaaaatcagattgatcctagacaccggtatggacacaacctgcataaatactatgannnnnnnnnnnnnnnnnnnnnnnnnnnnnnnttcttttactggtatgcttaaaatcttaggttcatttagttagtgttttcttgtagctcaagaatcttttttaggtgataattcttatctataactttgtgatatatccggttttttttttttggcaggttggatgttggaggagggatagatttggatcttaacgaatgtccgaggtcaaagcttaagcagcaatgcattagatatcttggacctgtatgtgccattttttcctctcttatgtcaatattggttttacttgtttttgggatttctctcatataagccttttctggtatcagcaagagagggaagagtatgagtatgtgatcatagaagggaagattgttcacaagttaactggaaagttcttacacacaatgcatggatcggaaggaacaaaatggatctttgttatgagtactttcaagaaactctatgccggtctggtaagttaaaaccgttatatctttctattggtgatgaattgatattagtattgaaaaagattctaatggttcttttctttgtttatgtttacttcagaaaaagaaaggaaggttccatcactcaagctttttggctggaggagctacattagctgctgggagggtgattgttgacaatggagttctcaaggtaacttactaaggccacgtccttttcttagagtggttgagatacatgttcattcatatcaacttttttattatgtctgccttctgtgatttctctgtttgatcgttctgttttcggtttaatctcagacaatctctgcatatagcggacattacaggccgtcagacgatagtctcgacacatttctcgggtttctcagagagaacgcagtgaacctagacaatgttgaggtaatgcccttgttctaatcttggctggtgaatgatatcattaactagagtttggttgtttaaaaaaagagactacttgagagctaatatatctatgtatgtgtaggtgcataaagctagtgaagattctgacagctacgatgattatgttaaatccaacggaggatctgaaccggaaccgttaaagaaagaggacacaacattccaagcagagactgaaacagatgagaacggtaacggaacagtgggaacacttgaggaggcaaaacggagtagctaccagagaacactctcaggtggacttgggagtccaaaagctaacgtgccgcagaaatctatgctactaaggataaactcaaagaaacagtcaagatcattacaattgggacatcagttgtcactgaaatggtcgacaggagttggtccaagaatcggttgtgcagctgattatccggttcagctcagaacacaggctttggagtttgttaacttgtctcctaaataccggagtagcagactttctccgaccggga

SEQ ID NO: 167280 - DNA, 1262 bp, Arabidopsis thaliana landsberg; identical to SEQ ID NO: 18354

SEQ ID NO: 167281 - DNA, 4630 bp, Arabidopsis thaliana landsberg
ggttcctttgggccttgggccatagtccaaaggtctgcgtgtgtcgtgccgcgctcgatgtacatggagtaatgcttcaggaaggcgattgaaagttccagaaaacttcctattgaattagcaggtaggtcgaaaaaccaattcaaggccgcccttgtgagatgttcggagaataactgacacttgccgacctcagcttcgctcggatggaaatggtctctttgtgtggcgacgctgaaagacgataaaaattgttgtgggtccgtgttaccttcataactttttaacttgatcttcttatcatgccgaactgagacattactaatatgcacggcaaaaggcgtcttctggtttttttccaggatctgctctaactcgggagtggagctggttgcctgatgaagtttctgggacatcacctgaattgtacttctcagctcctaaatttcctcgttttgagatcgttcttgatatccacgtccaacggcatttagaccgctcggccttgtgttatttgctcggcgcatggcgcttgcgaatccttccgaatgtaagctggtggttgaccttggaggtccgtgtaagcgttagtgagaacgtcgaaccgttcgacattctttcgatcctgagcttgaatttgcgccagaatgttacgcatcaatgctcctggatcatctggccttgctggtggagtcagagctgggcgtccttccatcccttgtactcctggctccaatcccacggtcggcgttggtgtgttgagtgtgggtttgttctccacgggattgacctcgatcgggttcgtcgcgtctttgccctgctcacctcctgttggagcgacggcggcatgctggatcctgtctggggtgtcttcgacgaactccccacggtcgctttcatgttcgcttcccggcatccttccttctcgtagatcttcctcggctttctcttctccttttcttgtggtagacccctacctggcgcgccaattgttggagtataaaaccgaacttccaaaccgaagaatgaaatgccgagccttaaggaagatctttattaatatccttgaagttcggctgtttacaaaatgtttccacagccgagcttaaacttatttaatacagacttcacaagtcaaaactagacttatgctttttgaatcttaattagaagtttctattgcttttctctgccactttttcctcttcctttttctgacattcctttgtcaacatttatagtactgaaaggacagtctatcgttcaggtttcttctcgatgtgggactttctcttgaccaacagcttccttgaggcgggcctcgtctgatgctgggctctttttcctttaacgggccggtcttccctcctttccttctttattactaattttgatgtgttgggcttttaaacgtgttggtggggcgaagcccatgtccaacagttactcccccccttcaaaatccactcaggaccttgaggaagccgtacggtttcacgctgccagctgctaagcttctggatctttccctgccgcgcgtgaagtccctgaagacgcgtgggcgggcccagctgcaatcattattgctaggttttaggcatagagcccattacttctgtcgttcccggaaagtctattctgtcttaaatcaacatcagccgtctccgaagcactctgctctaaaggtaataactttattcgacccttcgactttgattttctgattcgatctgcattctcttgtattcgtgccttctgttacattttctgcctttcttccaaatctgcgtttttctcgtctcaagcaatgggttcttcatctccaaacaactccgtcgactcttacatccgcgagaggacttcttcggacctttcagggaagaaatctccttcaataggttggtccgaggagtcgtctcgtcattctgtcgggtcttcgactcatcgtggaaaatctgctgaggttccttcctccgagatagatcgtcgcgaaatctccgccgttagagatagggttccctcctctagtcgtgttcctactgttgttccgagcttgcgagatgatactgattctgacggagctgggaatcgttatgccgacgatgagagagaatcggcggatgaaaatgtttcgggtgaatctagaaaaaacgagatggtcgatctgggacccactacgtcgacccgtgaatctgttggccgaacgaccgacttttgcttgttgccgggccctctaactattaggatcccacgagatacggatcggccgagtgattgtcctgaggggttcatttgtctcttcgaagggtttttcaccgagacgggacttcgctttcctattcccgactttctcatgcgattctgtcggaaccgtcagattgctatatcccaactgacggtcgcttcgatacgaagtgcagcctgcctccagatgctttgcacgaggtgcggcattcccctttcagtggagcttatggaagaacttacttctttcagtaaagtacctcacaagctcggccagcattatattagctcagttaggggtttcaagattctcgaaaacggaacctcaaagacccgggactggttaggaggatacttctatgctaaagtggaccggaaccttgtggaggatccttcggttgaatttaaaaactgaatggaaccttgattatggtagactttaggcctctgtccggctctcctagggtcgtcatttcattttgtcttcagtttcgtttaatattttcctttttattatttttttggagcgtcgaaccttcgaatccttcgaaattgctctcgacgaatccttgatcaggccgagactctgagagaacaagctccgattgactggaaacaggttccctgtccgaagcataagaaacagaacaagcgcaaaccgcaaaaacgaaagagttcggcccgtccaaagaaaatgtccggcgaaaatgttaacttggcaaccctcatgcgtgagaaacgagctcgcaaggaggctgaatccaaagctcgtctagcgatagttgacaaaactcatgaggacaaggctcgtcttgatgtagccgagaaaaatcgcaagggtcttgaggataagaccaaaaagggtacgtctggcgccgaacgtcgggacgttaccgatgtgacccgagtggacaaagctcgtccaatcaccgttggtcagaaaggatcatctggccgcagcgtggatagggagaggagcggccctgatacctctggctctaagcgtccatgttcttcaaaagaggtcgctccagctttggacaaaaggaggcgtatcgggagcggtgatgtcgacctttcagccgggccccgtctctcggcaaatgctgatcactcattccgctatgagtacaaagtcagggactccccgttttctgccgaccgggttgaatgtgctcgtttccttcggaaggtggttggagctcccggagaaccggaacatgagtttttggccgaggctgaccttttcgagaagtgggcgcgtgcagagtgccaggttagctgcaagtagaatgacgttctcttctctactccccccttcttcggttattttttttttttttttttttcttttttcttttgttttttttttttttttaaggaagacaatatgtgcgcttggcaggctgttggggcgaataacctcctgatctcgcggtatgatcgcaatctgcgctcggctcgtgaaaagattctggagctcgagggcaaattaaagaatgccgagcgtaccattgctgataacaatcaacaagctaaggcgggttttgaggagttgaaagccttgaaaaaagagactgttgttctgaaagctgagcgttcgaaagaggctgcgacgctcgagaatgttctgaggcaacaaactctgctggaggcccggttggctgaggagaaagagatttttcggcgttttcaggaagagaagttcgcagaggaaatggcgaagacgcgtgccgagcttctgaacaagtattacgaacgctcggaaaaaatctttcgccatattgccgagactgaaaatgcctcgcatatggtgaagatgcatgcgcaagcaaccggtacacttagctgtctgaagtttctagccgatgaggataaaatccctataccggcgagtacgtttgaagagtttgaggacgaggccaaggagtggaaagacaaaattgaagcgttcgtcgtgacggagctggtgaacggcgggagggtcatcacgcctgtcgctcctcatggttcgacggaaaatgtgcagggttcggaggagtctcccttccggattaaccaatttggctcgaaccttgggatcctggcggcttgcgagattgatcccataaccgagttcttcaccgatcctaaactcgctgctttggtttctgcgggagttaagaaggcgattgtgacgatctctgatgatttctgttgtttatgttgttgttctaagttgttgttgtttttttttatctgcttcgccgacgttgttgcaccttattctataatgaaaaatctggtttccctttgcaaaaattttggtgtttcagctttgtgtctttttcgcttaatgggtcgcagaacgtcttctgccgacccttattattgcgggggacgctaa

SEQ ID NO: 167282 - DNA, 520 bp, Arabidopsis thaliana landsberg
  unsure (1)..(520): unsure at all n locations
tgctagacaagagattgcgcgaaatcccgctgatgatgtagataatcctgcttcgttatcaaatttggttaggggctgtgctctaaaagaattgtgaaagtattcatcctcggcttgatggttctgaaccatgaaactcatcacatacctagacacagtctgtactgtgctgcatctgaactagatactaacaatcccctgcttatatagagtatagtctttgtgtcgataacttgccagaatagtcttttaactgttgctagatacgtnnnnnnnnnnnnnnnnnngttctgtgttgctacgactgacttgccctttatagatggatcgtcgcattcctgggcgttctgagtcattttggaaggaagtcaatcacgtgaagggtttatggaagaatctggcggatttgaaggttgaagatgctggaatagctgcactttttggcctggaatgctttgcgtggtactgtgcaggagagattgtaggatggggctttactttcaccggctactacccttga

SEQ ID NO: 167283 - DNA, 527 bp, Arabidopsis thaliana landsberg
atgaatggatccgacaatatcactccgtcccgaccatggtcgataactctgccttcgcttgccttctcctccttgcccccattgagcccttctccgtcgtcatcccgtcgcaattcattaccattgatgaacccgtcaacttctatggagagtagagactcttccatgaggtttaagaaaaactctttattgcctcctttgggtgtgaagaaaatagcacccaaagatattggacccctaaagagacactacatgagtgtttcaatggatagttgtttgagtgacttactgaagctaactccttctccgggtaacactccatcttcaagatcggttaatggagaccagaatgcttccaggctagagtttgatgccaatgattatattgatgatgaattgaataagatagcaaagagtaacaaacttaaagaggttgcatcggatcctaaggaagtcagaaggtaagtgaacatgtgtgacaaaattattatttgtgctttttgttttttttttgtattcctttttta

SEQ ID NO: 167284 - DNA, 1796 bp, Arabidopsis thaliana landsberg
  unsure (1)..(1796): unsure at all n locations
atggggaactcgttcagccagctgccagattttttcggtggtacttgcacttgtgcttatcagggaggttgtatgagatctgataaaggggcctggaaagactctgagatactaaaggtcgagtgcttgtgtcttcatactccacatcttattgttcgttatgtttctgttatactgatgttaaacctaactatacaggattcagctaatgatttctcagtgttcatgcagatgggccgcagtggtgggacnnnnnnnnnnnnnnnnnnnnnnnnnnnaagcagtgattcccaaatatcttcatcggataagccaacttattcggtaaggttttttggtatttggaacatacgttttctttttctttattttttgtttggtgaatcagacactaatagatatcctctcttggctcagttgaaagttagtgacacctcaacagcagagtcagggtctgaattggaagagatggcttcaccgaaaacaaatacgaacaatcatgtacccaagttaactcctgtttctgaatatgtaagtgttctcatgtagaaaagtgacataaacaacagagaagtttttagttcttatataggacctgatatatgctactatgtttattttagatcaaggccaatggtaacataagtcctactgttttatctgagtatgaagaatgtgtaccaatggtggacaaagttgtggatgttgcttggcagctccaagaaatgccaaatgcttccgaaggtaagacaagacctgcaaaaatcggacaattactcaattgaaatgcatctctaaaggttgcaggcctaaaatagcatgtaataatataatggaatgtgtttgcaggtccgcaatatacatcaagtttgggaaaaataggatcggttcgtcatatctggagtgaaataaatagagttcttcataagctttttcacactccttgcgtctctggctctgccacagactaaagaacactcacagttgcattcttcaagcgttagagctgagctgtgtgatgaacgaattgcaagggaatctcgtcctccttcgcctcctcgttcaactatcactgaaagagttatcatttcctctgttttaagcagactaggcgatcttgagaaacagatagaaaatcttcactcaaggaaatccgagatgcctcacgagaaagaggagttgctgaatgctgctgtatatcgtgtggatgcactagaagcagagctcatcaccacgaagaaggtttaaaaatctatgatatgattttaaaccctgaatgatattgataatgagtcattgtgaaccttgtaataaccgaatatcggtgttgatgagcaggcattacatgaggctttaataaggcaagaagaacttttgggttacatagaccggcaaaaggaagctaagtgccgggttagtctcctttcgtagctagttttgctgtccttataagtcggtaagtatgtactaatgttgggaagatgatgcagagaaagaagttctgctggtgaagaactcaagcttgggaggtaattagcaaatattgcttgttcagggatctgattaaaaaccatgaacattgacacaagtaggtctgaaagcaaatatctctgttgaaacctaatgtatataaatataagaaaaaaacttgcaatgagatttcaatttcatctctttttagttgaatttgtatgatactattggatagtgtgattaattggtgtttgggacattggattctgtattggaggttcaaaagtaaaaaaagaaaaaagaatgatcaaaaatatcaaatc

SEQ ID NO: 167285 - DNA, 952 bp, Arabidopsis thaliana landsberg
aaaagatatgtcatacatgtaaaaagatgtgtgtatgtagagaatgtggcgttaaaaagaagaaatggaacattatgatggttggtgacggcatcgatgccaccgtgatcacgggtaaccggagtttcatcgacggctggactactttccgatctgctacatttggtaagtccaaatttataatatctttcacctagtattttttgttttcttactattaatgaagattatgaattggttataaaactatttggcagctgtgagcggtagaggatttattgcacgcgatatcaccttccaaaacacagcaggaccggaaaaacaccaagcggtcgcaatccgatccgatacggatctcggggtcttttatcgatgcgcgatgagaggttaccaagacactctctatgcccactcaatgcgtcaattctttagagaatgcattataacaggcactgtagactttatattcggagacgccacagcagtattccaaagctgccaaatcaaagccaaacaaggccttccaaaccagaagaatagcatcacggctcaaggacgtaaggatccaaatgagccaaccggtttcacaatccaattcagcaatatagcagctgataccgacctacttctaaacttaaatactacggctacttacttaggtcggccgtggaaactatattctaggacggtgttcatgcaaaactacatgagtgatgcaatcaaccccgtaggatggcttgaatggaatggaaattttgcgttggatacattatattatggtgagtatatgaatagcggaccgggggctagtcttgaccgccgtgttaagtggccaggataccatgtgttgaatacttcggccgaggctaataattttacagtatctcaactcatacaagggattttgtggttaccatcaactggtatcactttcattgctggtctagtctcg

SEQ ID NO: 167286 - DNA, 1215 bp, Arabidopsis thaliana landsberg
atggctgatcaacaatcttcccccatgttagagcctgttaaaaacatagttctagttgggaaaactggcaatggaaaaagcgcgactgcgaacactctcataggtgaccgacagttcatctccaaaaaacaggcagtaggtgttaccatgaaatgtaagatgcttagagctgcgacaccagatggcccaataatcaatgtcatagacactcctggtatgtgctccattaataactcatagttaccctaccacttttaatatagcaaagtcaatttcatcaaagtcagaaagtaatcttgtacgtgaacaggcttgttcgacttgtctgtgtccgctgaggttcttagtaaggaaatcatcaattgcttaactatggcagaagaaggaatacacgctgtgttattcgttttatcggttaagagtcggatttcacaggaagaagagtccacacttgataccttgcagttgattttcgatagtaaaattcttgactattttattgtcgtgttcactgggggtgacaaattagaagcaaacgagcagacattggacgattatttttctgaaggttgtcccaaatttttaacagtatgttttcctacgttataatcctcacatttttttacaatgcctctagtggtacatgttttctttcattaatggtaaaatttcagggagttcttagactgtgtggtggtcgaaaggtcgtgtttaataacatgactaaggataaagtcaagaacgctaagcaagtcaagcaacttttggctcatgtcgaagctattgaaaagaataatggtgggaaaccgtatactaaccagatgcatcgtatgataaaggtataaatttttttgtttggtatgcattcaatataaaaagtatgtttgatctcttgtatggtatttttaaatgttggaattcatcggtttcctaggaaaagggtgataagcttagggaacaacaaaggaaggttaagtctaaaaaacttgcatcagaaatagaagtcatgaagcaggatttagaactggagcatgacgaaaaaatgagacggatgacacaacttgtaaattcatattgatacactttgaactatatttgtttttcattagtttattttggtgtaatacaatctttttatttttcagttggagaggaggcttaagcagaattctgaagcacatgaaagagcgatgcgtgagatgagagaagctatag

SEQ ID NO: 167287 - DNA, 1288 bp, Arabidopsis thaliana landsberg
cagggcttcctacgctttcttgctttggtctcatgaagaatagccatgatgggaagatttatagcaccaacttagcttttgctcctcccgagtatttgcgccttggtactgtgatagcggagagcgtcacatttagctttggaaccttgttattggatcttatgagcggcagacatattcctccaaaccatgtaacaatagtggcaaatttttagttgcattttggactgattcttagcttttttatatgtacatgttaatgagatattttgtgcaggcacttgatttgttccgtggcaaaaactatttggtgctaatggattcagctcttgatggtcagttctctgatgaagacaggacagaactaatacacgtagcttctcgatgtttcaagactgaaccagaagagaggccaagtataaagtttcttaaggcgactctttctagacttcagaaacgggccaagttgtgccctattaatgtcaaaagacctatgtctgtacgtgtcactctctccatatattcaagaatcaagaatagtctctcttgaaactacacaaatttgaattaatggtaccaataaatcatattatttgacagcctccatcaaaaaatctgcctgaaaagactaaacctgcaacagagtcattgaagttgactcctttcggagatgcatgttctagagcggatctaagtagtatacatgaactactagagaaactagggtatgaagaagataatggggttggtaacgaggtatattgatgatgtttattcacttgttatctgaatttgagagttggatgttgctgattctgataaatgtgacagttttcattccaaatgtggaccggcgaaatgcaagagaatatggactacaagaagcatggagatgccgcgtttcttgcgaaagattttgatactgccattgaattctacacagaggtaaagaatgtcattgacacactctgcaactctacatcatcgagaagtataaataaaaggacttgattcattctttcattattttttgcagttcatgactggagctcctacggtatcaccaacagtattggcaagaaggtgtctttgttacctaatgactgaaatgttcagcgaggctctaagcgatgcgatgcaagcgcaagtagcttcaccggaatggccaattcctctttacttacaagcggcttgtctcttcaagctagagatggaagctgaagctaaagaagcacttagacatggttctgctcttgaggcttattagtctttgtaaaaaaacttattt

SEQ ID NO: 167288 - DNA, 3345 bp, Arabidopsis thaliana landsberg
atggagcgaaatagcgttaaatttcatgcagagaagagatccggagcgtttgatccaggttcaggattcggatcttccaagagggtcaaaacgcatcacacgcagctgctctcagctctggttgtgccggtgggacacgcggcgtttagattgctctgccctttatcacacgtcggtgcggtgattggaaaatctggaaacgtaatcaaacagctccaacaatcaaccggagctaagatacgggtcgaggagcctccgtctgggtctccggatcgggtcatcacgataatcgcacaagcagattcgaaatcaagggtgaaattgggtgctaataacaatggcaatgcagaaggagagaaaaaggaggaggaagttgaggtatctaaagcacaaggagcgttgattaaggtattcgagcttttagcggcggaagctgatagtgatacggtcgtgtgccgattgttgacggagtctagccatgccggtgctgtgataggcaaaggtggtcaaatggttgggagtattaggaaagaaactggctgcaaaatttctatacggattgagaatttgccgatttgcgctgatactgatgatgagatggtggaggtacgaattctaattgatactaaatttagaaactatgaatttctctttggagaaaatgttttgagctgaaacgttggtttagcactctatagatgcttgtttttttgcagattgtaatgtattggttttcatattgaactatggcaggttgaaggaaatgctatcgctgtaaagaaagctcttgtgtctatctcccgctgcttgcaaaattgtcaatcgattgacaaggtaaggatggttggaaacagacctctcgaaaaagagttccaagcatctttgcataggcctatagagacaataattcaggagtctcttcctaggtccgttgaagttaacccttacgattataggctgagaaacgacgagatatttccccggggcactgtagctcgggctaatgatgtgattcctcatgatactttgcatcttaggcgtatcgaggcggttccccagggtgctttacgcatgtatattgaggcagaccggcaagatgttttacgcaggcatgttgaggcggaccggcaagatgctttacgcaggcatgttgaggcggaccggcaagatgctttacgcaggcgtattgatgtggttcctcgagaaacgttatacatgccttctgatgttctcaggggagattgttttctacagcatagagagagggatgattctcatgattccttgcatagacctttcgaaatggttccacgtgatgctatgggcatgccttttgagtcgtttccacgtgatgcttacggaaggcctattgaaacaatgacacaagaaactcttcgtgggcaaagtgcagattatcttgcacatcgttattcgactttagacacacatcctcacagcttcactacgtctgcttcaatggctaacactgccaccatgaagccacctccatcagaagtggaagtagggaaccaagatgtggtttttaagatactttgttccactgagaatgctggcggagttatcgggactggaggtaaagttgtcaggatgcttcatagcgaaacaggtgccttcataaatgtgggaaatgcacttgatgattgtgaagaacgtctgattgcagtaactgcatcagaggttggtgttttctatttcttcccattttcatggatgcttatgcagtactgttccatctatttactatccttggttgataattgttgcttgttcatcatgtagaaccctgaatgtcaaagctcgccagcccagaaagcgattatgcttattttttcaagattatttgagcttgccactaacaaaatcctagataatggcccaaggtcatctatcactgcacggcttgttgtcccaacaagtcagattggttgtgtgctgggaaaaggaggtgttattgtttcggaaatgcggaaaaccactggggctgcaattcaaattttgaaggttgagcagaacccaaaatgtatttcagagaatgatcaagttgtgcaggtacttagatcatttgttgaccttatggttatggtacatattccacgtgacaatctctcatctgatttgtgagcataatttggaattagcatgctaaatgttagtggtttgcttttcattaccgaatcctgtgttggtctctattcaccttgcacacttgtcaaaagttggtggtgttttagttattgctacattctgaaagaaattgaaagattcatgcaaacagagagttaaaaagatcatttactgtaaacttggttgagagattaactcggtcatattgtaagctccattgttccttaagttgtctggcataaactaattctttactggccaatagattacaggagagttccctaatgtgagagaagccattttccatattacaagcaggctgcgagacagtgttttctccaactcaatgaaaaattccttagccaagagcagctccgccttaactactgagagattctacgacagacaatcagacaatcctctgtctattgggtctcatcaatccgttagtaatccagctaccaactcctcaagtctgcacagaagatctgaggattcctttttaagtgggtctcattcatcagttaactattccagatcagttggcacagatccttacataagaccagaagacccatttcctgataggtttaatccctcagcaggctattctcataattttggtcggcggtttaccatggaccacagtgataactcccatcacttaactgaggccccatctcgtttgtgggcgtccccggtatgtctccatctctctgtattctcccatcctcccctttctgctgtacataagtacttgttgatactcccattcttcctctacacattcagattttgaacatttgtgcttctatctaacttctgtagctgatagacatagtttttatgtagcctccagcagctccaagaggcttatctgatgccagtggcggattatcttctgcaagggctggccatgtacttggcaggtaaaagcactacaattatagacagttatgtgagataattactctgatctttgtgtagtttacatgctcgcttggtcttttctagtggacacaaatctgccatcgttacaaacactaccgtggaaattagagttccagctaatgctatgagctttgtgtatggagagcagggttacaatctggaacaactgagacaggtaagccatttttttgtttacaaatcttttattggttttccccatagcgtcatccaaaagaggttaggccatga

SEQ ID NO: 167289 - DNA, 513 bp, Arabidopsis thaliana landsberg
ttatgccatggaccgattctttttcaggaagaggctgttccagatgattaatgagctgccaaccattttcgaagttgtgagcggcaatgcaaagcagtccaaggatctatctgttaacaacaataatagcaaaagcaaacctagtggcgtcaaggtatctcttctgtttcaccattttgttttatcaatctctgctaagttttatctctttgtattcctcacaaacagtctcgccaatccgaatctctctcaaaggttgcaaagatgtcatctccaccgccaaaagaagaagaagaagaagaagatgagagtgaagatgagagtgaagacgatgaacaaggtgcggtttgtggtgcttgtggagacaactacggtacagatgagttctggatttgctgcgacgcgtgtgagaaatggttccatggaaaatgtgtgaagataacacctgcaaaagcagaacacatcaagcattacaaatgcccaacttgcagtaacaagagagctagaccttga

SEQ ID NO: 167290 - DNA, 767 bp, Arabidopsis thaliana landsberg
  unsure (1)..(767): unsure at all n locations
atactatctcgaaacatntgtatggatattatcttaacccacttataattcgtattctccatttggaaatccgatttttgtatggttcatatcctcctcttaagttatttgctcttgaatgtaggagatatatggaataggtggtcggacatttttggtattgaatttagcaccggttggatgttacccggcgattttaaccggttacactcataccgatgctgatttagacaagtatggatgtctcattcctgtaaacaaagcagtcaaatattacaacacgttattgaataagacattatctcagaccagaaccgaactaaaaaacgctaccgtaatttatttagacacgcacaagatattgcttgatctctttcaacaccccaaatcctacggtacgttatgtcataaccttatctggtttagttgtacttaaaccgataaattttcaatttttggtattttacgtaaccgaatccttttgttttgctttcatatatgataatatctaaggtatgaaacacggtattaaagcttgttgtggatatggtggacgtccatacaatttcaatcagaagttattttgtggcaacaccaaagtgattggaaatttttctgcgacggccaaagcttgccgtgatccacacaattacgtgagttgggatggaattcatgcgacggaggccgcaaaccaccacatttccatggccattctcgacggttcgatatcctatcccccgttcatactcaataacctatgttcgcct

SEQ ID NO: 167291 - DNA, 1764 bp, Arabidopsis thaliana landsberg
atggccgaaattaccgaagatcctaacgtagttccaccagtcgctagcttaacaggtaaataactttaacctagattcgttttgtcactcttctctgtcgttttcatcttctataactaaacaacgttttaaattgttcaggcaaggctgcttttcttgatcccgttttttgggataatgatttgccaccacggttgtacggaaccaaacgttacccagacgctcgacttaatgtatattccaagtttgattatctatgtttcattaagaaacatatggaagggacacatgagtttaatcgtattcttgattctgcttttggtcctctgttttctcttctcgttcaacggtgttctctgtcgtgcaaactcatccatgccctagtttgtcgacaattagttacaaaaagaaagcatgaaatgtggacagtttttggtggtcacccattgcatttctctcttgctgagttcgcttctgtaacaggtctcccctgtggggatttctctgaagattacgatcctgattacgagccaaagatcccaaaagaagctgatgattattggctccaaaagattgggaagacaaggctctccagtttaggtgatatttctttctgcttgccgctgacatctggtgatattcaactccggattgctcttctccttataatcgacggtgtcctaattgcatccctacaaaacgctcgtcctacatacaagtatgttcaaatgttggaggacgttgactcttttcttaaatttccctggggccgggagtcatttaacaaaaccatcaaatccctaattcctccgaggacggttgggtctaatcttgaaactgaccttgcagcattccgtggtcacctacaacaaaggtcttttcggttgcgtggcttccctcttgccttacaactcttagcctataggaatattccggctctggcactcgctcttacagacccattggacgatacagttatattagactgggataacgcctggattcctcgtcaatcccgtctcctggctgatgttcatgcagttgaacaagctccagatgtatgattctactttcattgttttcaccattttgtagcttccaactttcgtcaagaatttcgattgtattgcaggtaactgtggagtcttttatcgaaatgggggatgacaggttgtatgagtgggatgatgaagtcagggacaagaaggtgtcttatatgttagagaagataaaaacaggttatgtttttggaaagtgtgaatggcctggtggcgtcatgtctttagacctcattgacattgttaaggttaaaaaagttgtacctcccccttcgaagattctttccaacaagaagaagaaaaaaaggcctttgttgaattgtcctaaaggctccgtcaaacgtagaaggtccaccagctcaatcctgaattacctccatctcctcctcaagatttggctgctcgtgttgattctcttgaaaatgaaattgggttgcttaaagctcaactaaagaaagtcagtgcccggaatacacttgttgagtcaagttttctacatgctagacgcagagcacaaccatctatgtttctcttcaagaaaatcgtccgtaaccctgcttcagaaacagcctcaagattcctgcatgctagacgtagagcagaacctactttctttcgaaagccctttagaaaggatagggtcagacaagattggactcattttgaacggccgttaggtggtcttgaccgtaactctgatccctag

SEQ ID NO: 167292 - DNA, 1490 bp, Arabidopsis thaliana landsberg
tcggctggcttagggtcaatctatgtggaaaaacagttacacgtttgtacgttgaagttaggagttgttgataatacctttgtctcgtgtgaattgattgatatgtatagcaagtgtggggatattgaagatgctcgatgtgcttttgagagtatgcccgagaaaactactgttgcttggaacaacgttattgcgggttatgcgcttcatggttatagtgagaaagctctgtgtttgttgtatgacatgcgagactcaggtgtgtctattgatcagttcacactttcgataatgataagaatttctacaaagcttgcaaagcttgagcttactaagcaggcacacgctagtttaattcgaaacggttttgaatcggaaatcgttgcaaacacagctcttgtggacttttatagcaaatggggtagagtagatactgctagatatgtttttgataaattgccgagaaaaaatataatctcatggaacgctttgatgggtggatatgcaaatcatggtagaggaactgatgctgttaagttgtttgagaaaatgattgcagcaaacgtcgctccaaaccatgtcacatttcttgcagttctatcagcttgtgcctattcaggtttatctgagcaaggttgggagatttttctatcgatgagtgaggttcatgggatcaaaccaagggcgatgcattatgcctgcatgattgagctgttgggtagagacggtttattagatgaagccattgcgtttatccgaagagctcctttgaaaaccacggtgaacatgtgggcagcactcttgaatgcctgtaggatgcaggaaaacttagagcttggaagagtggttgctgaaaaactctatggaatgggacccgagaagctcggaaactacgttgtgatgtataatatgtacaacagtatgggaaaaactgcagaagctgcaggggttttggagacattggagagcaaaggattaagcatgatgccggcttgtacttgggttgaggttggagatcagactcacagctttctttcaggagataggtttgattcttacaatgagacggtgaaaaggtaaattatctgacaatactaaaatctttctctgtcttcatttcataatctcataaccttacgatgtgtgaatctaaatgaaacaggcagatataccaaaaagtggatgaactaatggaagagatttccgagtatgggtactcagaggaggagcaacaccttcttccagacgtagatgaaaaggaagaagagcgagtagggcgatatcacagcgagaaactagccatagcttacggattggtgaatacgccggaatggaatccattgcagattactcagaaccataggatatgcaaagattgccacaaggtggttgagttcatatctttggttacaggccgagagatggtagtgagagacgcgagccggttccattattttaaagaagggaagtgttcttgtggaggttattgg

SEQ ID NO: 167293 - DNA, 708 bp, Arabidopsis thaliana landsberg; identical to SEQ ID NO: 26798

SEQ ID NO: 167294 - DNA, 705 bp, Arabidopsis thaliana landsberg; identical to SEQ ID NO: 4431

SEQ ID NO: 167295 - DNA, 596 bp, Arabidopsis thaliana landsberg; identical to SEQ ID NO: 44030

SEQ ID NO: 167296 - DNA, 523 bp, Arabidopsis thaliana landsberg; identical to SEQ ID NO: 54243

SEQ ID NO: 167297 - DNA, 1042 bp, Arabidopsis thaliana landsberg
ggctctctctactctgaagaaggtgctgtggtacaagttcgatttccaaaagaagttaaatctgtccaaaccacagggaatccgggacgccttgcaccgagcctcggattatggttcccatgaggaagaaatggaactactataaaaaggcacgagctgccgaagcaaacgcctcgtggtgaaaaatcccaaccaatcgctttgagccacaaaaagggcgcccaaggcgtgacgttcttacaccatgaggggtgaaacttctctggagcccacaattatcaagccgatacaccccgaggtcgaggacgaggccgcaaccgaggtcgtggacgagaatcctatacttggacaaagaaccaacccgcaggaaacgagcaggagtactgcgagttgcataaaagctacggccatcatacctccaggtgttgtagtctcgggcgaagtttacagctaaattcctagaaggcagaatcggtggaggcctgaccatcgaagacttagaagcagagaaggccaaaaccgagcaggtaaatgctatggcgaacctcgagcaggtagcccccgcgacaaaccctgaaggaccgaagagaggtagaggcaaccgcgaggtagatgacgataaaccggaagctgctcggggaagaatcttcacaattttaggagattcggccttttgtcaagacacaacggtatcatgatgaaccccgaggaccaagaaaaaaacgctttctacacagagcaaggaatcttttgctaccgagtgatgtcattctgacttaagaacgtcggggtaacttaccagcgtttcgtcaacaagatcttcgcattatagatcgggaaaacaatggaagtatatatcgacgacatgttggtaaagtccatggaagaggaagaacacatatcccattttcgcatatgtttccaacagcttaacctctacaacttcaagctcaacccaaccaagtgtcgcttcggggtaggatccggtgaattccacggatatctagtcacgcatcgcggcatcaaggcgaatccgaagtag

SEQ ID NO: 167298 - DNA, 849 bp, Arabidopsis thaliana landsberg; identical to SEQ ID NO: 14444

SEQ ID NO: 167299 - DNA, 724 bp, Arabidopsis thaliana landsberg
ctctctctctctctttcgcttttattagtcgacatgggcacttgtagagaatcagaacctactcaaatcttcgttcctggtccgatcatcgtcggagccgggccttccggtctagccgtagcggcttgtttgtcaaaccgaggcgtaccatcggttatcctcgagagaaccgattgtttagcttctttatggcaaaaaagaacctacgaccgtctcaaactccatctccctaaacacttttgcgagcttcctcttatgcctttccctaaaaacttccccaaatacccatccaagcaactattcatctcctacgttgagtcctacgctgcccggtttaatatcaaaccggtatttaaccaaaccgtcgagaaagcagagttcgatgacgcatctggtctatggaatgtgaagacgcaagacggtgtatacacatccacgtggctggtggttgccacaggggaaaacgctgaaccggtgtttccgaacatacccggtttaaagaagtttactggaccggttgttcacaccagtgcgtacaagtccggttcggcattcgcaaaccggaaggttttggtggttggttgtggaaattccggtatggaggtcagcttggatctttgtagatacaatgctctgcctcatatggtcgttagaaactctgtaagtaaaatattaatcatgctcattattaaactctataagcttttgttaatataagtagtaa

SEQ ID NO: 167300 - DNA, 1399 bp, Arabidopsis thaliana landsberg
tgatgcctggtgctaaccatctactgttgctatgcacgatgctcctttcaatcagatagcttggtttcctggaatgtttctccttgttactggaagctgggataaaactttgaagtaagaatgatttctgcatcatacaatcaatctataaggaaatatctcacataatagcatgttatgaagcatattggttacaccgttctagatattgggacacaaggcagggaactccagtgcatacccagcagcttccagacaaatgttatgcattgacagtgaaagaatctctgatggtcgttgggacatcggatagaaatttgctagttttcgacttgaaaaaccctcaggtgtgatttttctttccattacaagcctgtataaaaacttcacatttgagctgatatcatggttaaaatgtctcttcttatactgtagattgagttgaagagaattgaatcgccactaaaggaccagacaaggtgtcttgctgcatttcctgatcagaaaggatttttggtaagtactcttgtcacttttctcgatcactgatattctacagttaagataactaggtccaatgtttgctataggttggttcaattgggggaattattggtgttcatcacattgatgatgcacaagtgagcaaaaactatacctccaaatgccacagaatacgcaatactattttctctataacctctctgaattttcacccggtaagccctatgattcaacaatttacaagttgtagactgatgagcgactaacttcatcatccttgttgtgcatttcagatacatggcacgtataccagcactggctctgatggtacattcagtttctgggacaaggatagtaaagcaaggctcaaggtgttttcagaagcatctttgttgcataatgtgtttttcttcagtttgctctatataacttatacctaacagacgcatatttcactccccggttattatttcaggctagttcaaagtgtggccagccgattacttgcagtacgttcaatcacgacggggcaatgtttgcgtatgcggtaatgcttctcttccttagctttgttacaatgcaaacaccagagaagcactacactttgtagattatgtgggttatgtgagtaacgcttgcgttaacaataacaggttggttatgattggagcaaaggtgcagaaaatcacaagccaaatgaggccaagaccagtttatacttgcacctgccagaggtacgtctctcattggccatatatcatcacacgttgaactgttttagaagattggcgcaatttctaacaggtcaaagttatgttggtatcaggaagccgatgtgaaggccaagtcaacatacaaagtcggcagatttactgtgaaaaaggaggagatctga

SEQ ID NO: 167301 - DNA, 1099 bp, Arabidopsis thaliana landsberg
  unsure (1)..(1099): unsure at all n locations
gatgtatatgatcaacacatgcaagtgaaccatttagctccagctctgctttccctactccttttgtcctcacttatccgaggttccccaagcaggatcattaatgtgaattctgttgtaagtatcttcatcgctgaaactgccagctgcatagtttttcatatagttttgcagtgatgttggaaagtttgatattcttggtatacagaacctaaacaaaccgaaagtttgaactttgtatatacagggttaccattgcttttctctctgtgaaattctgctgcactgctttgattgaatctaaatacgaataacaacgttctgtttatcatctaaggttattcccatctcatgcaagatcattgtttgttgggtttactcttttggtagatgcactatgttggtttcgttnnnnnnnnnnnnnnnnnnnnnnnnnnnnnnnnnnnaaagtttacaagcctcgttggatattctggcagcaagcttgcacaggtgagagcttacacaaaacatcattcaatacttttctttcttttattctttatctcagaaactaataaatttactttctatttccctggtcaggttatgtttagcaatgtacttttgaaaaggctgcctctagaaactcgcattagcgttctttgtttatcccccgggattgtcctaacaaatgttgtgagtattactttaagtctcactccattgctcgttcctcataacttatatcacattaaaccatgttgaacatccaattatgcaggcgagagatctgccaagatatgttcaagttcaatacgcgttgataccttatttcatcttttcgcctcaagaaggctctagaagcacactcttctcagctacagacgctcagattccagagcattgtgaaaagctaaaaaccgaagataagcccgtttgtacattcatatctcaaaattgcaagcacacaaagccttcagaagaagcacacaacgtagaaacagcagaaagagtatgggaaaagacgataaagctgatcggtcttcctcttgatgctgtagagaggcttatacaaggagaagaggtccaatgccggtatgggactcatcaacaataa

SEQ ID NO: 167302 - DNA, 1859 bp, Arabidopsis thaliana landsberg; identical to SEQ ID NO: 9397

SEQ ID NO: 167303 - DNA, 933 bp, Arabidopsis thaliana landsberg
atgaagagaggaagcgaagagatcaaagaagagacctcaccattgccggctaaacattttcagcgccgggaagtttccatcgccgaagatatcggtattcctatcgatctaatggtggaaatactcaagaaactccctgcaaagtctctcataaagttccaatgcgtctccaaacaatggtcatcaattataggcagcagtagagacttcatagactcgatcgtgactcgttctttgtctcagcctagtcgtgatatactcatctcattttccaccacattgacaaattccctaaaacagatttcttcatcttttcctctacgtaccctagatatactgacaaagaatcagtgtcagtactttggggatcgtatcaatacgtccatggcttgattttttgttggtcgacagcctatactgaggcagctatatataaccctaccacgaggcagtccctttctttaccggaaaccacggccggccactcccatgtgagcacttccttcttaggatacgaccctttcaagaatcaatacaaagtaatatgcctagacaattataagaggcggtgttgtcatgttttcacattgggagatgccataaggaagtggaggaaaatccaatataactttggactttactttccattgttacctccagtttgcatcaagggaactatctattaccaagcaaaacaatatggttctacgtatgtattgttgtgttttgatgttatatccgagaaatttgatcaggtcgaggctccaaagacaatgatggatcatcgatacactttgataaactaccaagggaagttaggattcatgtgttgccaaaaccgggtggaaatttgggttatgaagaatgatgagaaaaaacaagaatggtctaagatattcttttacgagatggcaggttttgaaaaatggcaca

SEQ ID NO: 167304 - DNA, 1831 bp, Arabidopsis thaliana landsberg; identical to SEQ ID NO: 29540

SEQ ID NO: 167305 - DNA, 687 bp, Arabidopsis thaliana landsberg
atggcgtcggggaagcttctgtgggagttggaggaagagatattgtgtcggcttccacctggatctcttgttcggctaagatccgtatgtaaacactggaacgatctttataacgacaaatggttcatcaagaaaagcttgggttttgcacgtccccaattcatcatcctggccggattcaagatttattcgataggaaccatcggtctggacgtcgttgatccgaagatagaggtgcgtgagctagcctcaatttcattttgaggctgagaagtgggcatttaccaggatcgcggcttgcaatggattattgtttcgtgacttttggaaccaaggggttaccatttggaatccatggttaagacaagttgggtggattgagtataaggaggacaaagatttccgtttttgcggtgtaggatacgatgctggtaaacccgaaaagggttacaagatctttgggtattttaatcgtttctatgacactaaactgaaaatcggccacagatttgcgatctttgaatgtgcgtctcaagcgtttaagttcattgattcccctgaatggccaacgctggcaggtcgaggtgaatatgtgtccttgaatggaaatccgtactcccactgcttccaatgaagatactcaaagcaaatttttggaagctttgatttctcctcggaaatatccat

SEQ ID NO: 167306 - DNA, 2883 bp, Arabidopsis thaliana landsberg
gcaattggaagtggctaactccgacgagatttgggttgtttttgccggtactcccattagattttcgttaagggagtttaagattgttaccggtcttccttgtggcaagtatccaaaagttcaaaagaataagaagagaggaactggtgggaagcagattccatactacaatacattgttcggtcttgaagaagatgttacggttgagagggttattacaatgcttacgaaaagggtggtaacggatcgcgatattaggttgcggtatgcttgtttggctctcgttgatggcttcttattgcctacatcacactacccaaaaataatgaaagatcaagcaaaaatggctgaggatctgaaggggtttctgtcatacccttgggctcgtctctctttcgagatgatgatgattttcattaaagagagggaagttgaacagctctccattacgtgtgtggcagttcaaggtcttctatacgctttgcaactcgttgtcttggaagcatcccccgccatacaggaaagccctcaaatagatgagtttgctgggtcagactcagatgaagaggccgccgttgaagtaggttcttgtcagggcgttgccctcaagcttggcaatgctaaagatgtggatgccaaatgcgaggtaatgttttttcacaataagtcgataacattttggttaccaccatagcatttgagttatagtttttaatagctttattatcgtaaataaagttgccactagagttatccgataatatttttaaatatgatgtaactatttatcatgataacgatttcattaacatattttatatggtaactattacttgcagtatcatgttgatccaattatattccccgattctcggttgaatcccgaagaagatttaacatggtccgacgacgaagatgatgttaaggttgagaacattgtgaagatggctgaggaaggcaagttcgaatgaaatgttttgtggcgggtgtatcccatctaagattgtggttgcgtctaaaaaaaaaaagaggtggcaaaaccaaggtggttcgtggcaggaaaacaccattcaatgctagatcagctactagtctgaggagaaagcatcaaagtcccattgaagaggaaggtgaagggtctggtggtgtagatctcgctgctttgtcctgcatgattgatgacaaactaaaggcacaagccaagaggattatcaaagggtgattcattggtttccggaaaatttgattgttgattctggtaatctcaaaggtgctgcttttggggaacatggtcctcaagctaacaaggaagccgccgatgctgatgaaaatgccaatccagtttcctctccggagtccaaaaacaaaattgctgatgcgaatgttaacctcaatccaccgtcgagtcaacccgtacctatgcagactgattttacccttccgtcttttcacggagaccaagctatatctgctgtagacgacgttgtttctttctacaactcggtggatgtaccggacggccagtcttgcgggggaacaaattttaataatgagaaggaatttcaggttagcggatactaatgatatcgggttaattcgttgaagaatttttttttctttcttaatcacgcctttgcgcaaggcgacgtggggatgataaatgatacaaccacagacgaacgaccaggttatatcgttagcggatactaacgatactgtgttaaattgttttgtacctaataatattctaacttattcacgttggcattgtagggcgacgttgagatgggagatgatattaccacaggcgcggacgaccagttggaaagatagttaagtttgttgtattacttataaagatagttaagattagtgaaatcttacaagttttttttgatgaaattaaatgattctcatccctaaacgttgttacttgttagcgtacttagacgttaacaaaccaaatatccgggcattttaaccttcttcttttaccaattcggttctatctcttctaatttccaaatgttgtcttggttgtagggcgaatctgacatggaaggcgacaaaaccacagttggtaacgaccatgttagataataaacgaagatgaataaatagttaacacggttttgtagtttttctgttgtcaatgcttgttaattggtaatcatactattatcgggtagttttctataagatctgcggggaacgaaaaagaattttgctttgataacatacttatccggtaacaaattactattctttttattgtaaattaggtcaataacatttctgcttatcttatacatgtgtgtttactaatttatatgtgcttatctcccatagtggtgaattaggtcagcgctaccctagagcctccaccgtcctcctgtcgaagtctgatataacagaagttagttgactaaatttcttattgccgcggttttttatttttataaatcagcactcagttaccggtttatggtggtttaacaattcatgatactactcgtggatttgatgttgcaccagatcgtgttgaggtatgttagaagtttaattatcttgttaagagaaacacacttgtgaatctatctgccagttaatgtttcaatctttatttttgcttgtagattagtggaattcaagtccatgtttcattgaaccccgtcattcagttgaaacccagttcaactgtctctgttgtcgttccaccaatcgttgtacccattccacttgcggtacacgcagaggttaatttttttttgcctcttatcggtaattttatttgtagctgctaaaggtttaaatgtcccgtttcaggctgctgacgattttcctatatattcttcccaacaccaaacacgtgtcagcgaggag

SEQ ID NO: 167307 - DNA, 1858 bp, Arabidopsis thaliana landsberg
  unsure (1)..(1858): unsure at all n locations
ttacaagatctgatctaactcttttagtctttcttttccaccattttggccttagcaacatgcaacttcaattgtgtcatactgtcaatccgccagtaaccaacaatatattgacactcacatgtgacatatcagagctcattaatctacacgacgaaggctttaatggttttgatccaagcatgagaccaaaacatatggtattagtgcaagcaaactgaaaatgttaagagttgtaaatggacgattagaagtttggaacgttacattactattctctcacgtaactcacgcaagtgttataaaaaacaaaattagttaaagtttgataaatcccactttttcttgatcgtaatcactattcaacttttgttaatttcatttgttttggcattgcttgtttcttctaatttacttattctacatttgttccgcaccaaattcatctagtataatctcactattcaactgtaactatatttcttctgtttgtttcatattatctgtttgttatgcatcgaattcatttgttcaacagccactatttgaattctatggatccttcggattccaagaataacggataagaacccacatggagaacgcttcaacggtcttcacatgtcatagctcttctagttctgtggacagaagcaaagccaatatatctttgggtaatcaatattcatcatgtctattgtctcgtcttattaaagaaaactaaaaagtatgaaacatatataattaaaacgcatgtggatcaatctcaccatattcgactttataataatactgtatgatttgatttatcccttaaagatcagaaagcaaaccttaactttcgtcctgagtaattcnnnnnnnnnnnnnnnnnnnnnnnnnnnnnnnnnnatgataagcgcaatgatttttaatgggatagatcaatacattaatgcgtttcagttataagttctttgattttcctatttcttcagtatgccataattaaataccaaaaatagttaaagatttgtgtaataaagctttagaaagaaacaaatatacaccacattttctataatttagataaaccacaatcctttttttaatgagagataaactacaacttttaatcttgaaagttctatatatataatcctggtggccgacagtttcatatttttggttgaagaatttaaattttgatattatctgaagggggtagcggaattctacactcgtacaagatgactgaagaaaattgcaaccaggagagctatacaaacggttgacacactctaattttgttctacataaatgatagatcggcgaaactcgtactgatacgttttcttaaaactggggtagacctttgatcgaaactcacgttatttttcgatggaaacaaaagaacccttcacagtttcaacgttgtggcagtaaaacatggttattcatttttcgttttttatgttacagatcatgggttggtgtttgcatctccgttaatgaatcacatgtttgatatgattatactaagaattctattaaaaagagagatatatactaatataatattaatcgggttcatgaaacatccatcccaatcacgtaacttctacttttgttttgctgcccacctcatcttccttttacttttcatattctattcactcatctgaatccatctactccactattatttataatcaacaaatcaatgaatacttgtcacgatcattttattcaaaaaaaaaaaaaaaactctgatcactaatcatacaatcgtcgtcacatttgtgctaatcatatccctattgttatatgacagattttactaactcgacttactccacaagccctctatcatcgctag

SEQ ID NO: 167308 - DNA, 424 bp, Arabidopsis thaliana landsberg
  unsure (1)..(424): unsure at all n locations
atggctcgcaccaaacagactgctcgtaagagcacaggtggtaaagcacccagaaaatctttggtacttaaatttcaaatttccctccgtttccgtaatcctgtgatctcgcgtctagggcaccaaagctgctcgtaaggcgcacaagatggccggttccctgtccagcggaggtgtcaagaaaccacatcgatttcggtaaaacaaagtctgtcgcattcttccaaatctgatcccatggttgtttagccctggcacagtcgcactcaaagaaattcgcaaatgtagctgctagccttgttgcaagcttggttgtccatcgttggtcccgatgtgtagatcaaaagtcaaccgaactgcttctgcganagctgcctttnnnnnnnnnnnnnnnnnnnnnnnnnnnngacttcaagaacgatct

SEQ ID NO: 167309 - DNA, 1001 bp, Arabidopsis thaliana landsberg
cgacgatccttcttcagtggccatggtttctggagatacaaaatcggatgcgaacaacgttacttatgggttcgtgaacttttgtatttcccaaagccaattttgtggaaatgagagagatcgatcgatgcttaaagctctgcttcaactaataatgtcaatttctttctctttttttcagagaccttccttcttctccagcggctacggattcttcagaaccttcttcctatgcgttagtgaattttattgtattctttagaaccaatcttttagaattgatctttgcttttctggttatgttttgattgatttgttatctcattttcagtgaacagcttgaaaggctcatgatgatagattcagaagaagaccggggtccctctgggtttgtgaccttctcgattctttaaccaccaatctttgttttctctggtctatctatgttttgatattactctttttttgttggttttgtttcaggtttacgactgatgaattgatctttcaggctttagaaacagtctacgagaatcataatggtcttgatgtcgatgcgattttcacttttatcaaggttaggaggatctctctgtctctataagtatctgtgtttcatggtcatatctcatgagtagtgtatattggttctgaaatgtgagtcaatagcgggattacacaatggaacattaggatctgaaaatttgacttcatgttccatcccctaaaagtcttccttttaaagtcttggttttgttgattcctccgttgttcttgatcaactaaccatcatgttcttgtggttaatataaattgcaggaaaggaacgagttacaggaagattttagggagcggttggaaaaccagctgagatatctagtttctgaaggccaagtatacaaggtaactagtttttcagagttgccccacccccatgttaagattcagtagttttgtaagatcaattcagaaaaacggaaaaaaaaacttgtaaatgcagg

SEQ ID NO: 167310 - DNA, 393 bp, Arabidopsis thaliana landsberg
atcgtgttcggctcgccgacctatatgggctcggttgcctggcaatttaagaagttcgccgacgccacttcgaagaagtggttcacgcgtgcctggaatgacaaggtgttcggcggcttcaccaacagcgccagcctcaacggcgacaagcaagtctcgttgatctatctgcagacgctggcgtcgcagcacggcggcatctgggtcagcctcggcatgctgccggccaacagcaaggccgcgacccgcagcgacgtcaacaatctgggcggctcgctcggtgcgctgttgcagtcgccgtcggatgccggtgtcgacgagatgtccgtcggcgatctggaaaaggtgaagcagtacgccgcgcgcgtggccgcgatcgcggcgcgcctcaag

SEQ ID NO: 167311 - DNA, 1010 bp, Arabidopsis thaliana landsberg
  unsure (1)..(1010): unsure at all n locations
cggccgcagccggactaaaaaaggtcggcctatcctttttcaaagagctcttcctttctctagactatcaaggcctacccgganncattaaagttagtaattaattttttttcaccttcataagtaactcgatcaagaagcgagtaacttacttaatagggtttatttatctataggctctggcagagtttatggaggaaatcagaggaaatagagtaacatttgatccaagcaagattgtcctagctgctggttcaacatctgccaacgaaactctcatgttttgtctcgccgaacccggggacgctttccttttaccaactccttactatccagggtaattttttaggtttttttatttaattacttgcctcacaagaaacctgagctgatagtatttgattcgcttatgcatacagattcgatagagacttgaaatggagaacgggagcagagatcgtacctattcattgctcaagctctaatgggttccaaataacagagtcagctcttcaacaagcttatcaacaagctcaaaagcttgatcttaaggtcaaaggagttcttgttaccaacccgtctaaccctcttggcacaatgttgaccagaagagaacttaaccttctcgttgacttcattacttccaaaaacattcatctcataagcgacgagatctattcaggtaccgtttttgggtttgaacagtttgtaagtgtcatggatgtcttaaaagacaagaacctcgagaacagcgaagtctccaaacgagttcatattgtttatagtctttccaaagatctcggtttaccaggttttcgcgtaggagcaatttactccaacgacgaaatggttgtttccgctgcaacaaaaatgtcaagtttcggtctcgtgtcttctcaaacacagtaccttctctctgcattgctttcagacaagaagttcacaagtacatacctcgacgaaaaccagaaaagactcaagattcgtcagaagaaactcgtgaccggtca

SEQ ID NO: 167312 - DNA, 2071 bp, Arabidopsis thaliana landsberg
cttttctacaagtatctatatattaagtgtttgacccttaccagtgtatttacttgtttctaagatctctgttagcactcacacttatttttatgagtctttcgtttatttatctatctgaggtgatcaagttgtcgtatttactactactcttaaggattttgacattgacatacaatgtgaaaccatcacacttaaattttcttggacattgttgcattttcttctttttttctgatgttggagatgtttttattcaattgtatagatgctcattgcggactttcgtttcgctgttagattcgattattgtttagcttgttttgttatgctacaatctagatgactaagtaaaggtactatctcccttgtatcaggaagcattgaaagcaatgattggattcatagatgttgctggtctgtattatgctctggcccagctgactcacagaaacatctcccaaaaccataagtttcaggctgttggtcttggtaagtgaatcactactgctacaaaatattgctagctttggctgtgacattcttatttcatgttacatatcgatgatatgatagtggaattgcttttaatggggttgtaaaaaaaaatataaactccttttcatgactaattaccactgtagctatcaaccatttctagacttccctcaatgattctttgcgtcacggaatatatataccaaatgtgatttgagagatttgttctttcttgtttcagggtgggcattcgcgtattctgttttgcacaggttggcacctctctgggttggtgctcgaggactggagttcacttgggattatgttttgcaaggccttaagccaatgccaatctggtactttatataccagttcttacttctagaaagatccacctgtaactgtttcttacttccatataacgtttgcgtcaaactcaggtgttcacgatatctctagctgcactaggttcattgatgtggctacgcaagaacaagccgaagagtctgatccccatcatatacacatgtgcagtcatcatcgcaacaatgccttcgatcacaagctatctaaagagagtcaatggatggcatttcccgaaaattgttgggtttgagctggcgacttctctggtaatggcttttatcagttgtcaactcttcatcctctgtcagagaccgtctttgtgagtgattccacttcccagcagagctttttgttaatgggaaactcttgcgacgcacttgccttgttttcggaaggactcggttccatgaaaactttgatgtttcccatctttatttgtagaagaatattgaaccatcttttcataacttattgatttgggaagtgtcattcgttaaagcatagacttagaatcataattactaagagatatttatcttgaaattatcttacaaatctatcactaaattattggtgagttgattcttaaagaatctaaagatttcaaaagtttagagattttaaaagttttacagaatcttatggattcttctcagtgagttgtataaactctagcaatgattttcatggattttttgtttatggctaaacaaagtgttactagataatatttttccatgtttttgttttgtttatttgttttattttaccattgtttggtttattacactaaataaatttataaatctcatataatataaattgttgacatattttttgtattattatcagttttcataatcgttaatgtaaaatattactgttttttatgttaacaaatgaagagatacatgagtttatcaattttgagagagagtttgtcaagaaagactttattcatcaacaagcaagcggagttgataatgctcatatgcgaatcctgctagttacttccttgcttggactcctcaaaaagctttatgtctttgagatatatgaggccaaggttgaaaaagagaagagagatgctagagcaatggtactcttgatgaacaagaatcctcactacaaaaaagaaactcatttacatcacataatttgtttcagaaaattatatgatactaatttaaatcacttatttttaatc

SEQ ID NO: 167313 - DNA, 827 bp, Arabidopsis thaliana landsberg
aaaagggatctatattacgtttatccatgtgaaaattttaacacgtcgtgattttaggcaagctcgggaacgacaaaaaagatccaaaactcgttgatgtggagaaagcttgttcttcgcccgatacaccaacggaagacatggtccgtgaaattctgaacattacatccgaagacatcactaaactcaagaacataattatcgaagatgagaacctcactaatgagaaggagaagaacatgaagatcacgaccgtggaggttcttgcggcctacgtttggagagcaagatgtcgagccatgaagctaaatcccgacacgattacggatttggttatatccgtcagcatccgcagctctatcgagcctccattaccagaaggctactatggaaatgccttcactcatgcttccgtggcattgacagcgaaagagctaagcaaaacgccgatgtctcgccttgtaaggctcataaaagacgcgaagagagcggcgcttgataatggttacgtgtgtgagcaacttagagagatggagaatacaatgaagctgaagttagcttccaaggagatccacggaggagttttcatgatgctgactgattggcgtcatcttgggttggatcaagacgtttggggaggtttagtgaacattatacctttggttcctctgacactgccctttttgtgtgttttgttaccagcgtcaaaagcggttccgggtaagagcggtggtgttcgggtgctgacaacactacctagggacgcgatggccaagttcaaggaagagatagatgcagtactccatccgtgaaacgatgctagttca

SEQ ID NO: 167314 - DNA, 394 bp, Arabidopsis thaliana landsberg
atggatgtctccacacccccaccagcagagatttatcttgccattcagttgccgaatccactcagcattcttttcaactacctacccgtttctttaactccaataaacacgctcagaagtctcgttaacacgctggagccgaccgctattaacatggatgagttcatgacgtggcttgatttcgtgttgccgaaaacacctttccaaccatatttcaccctcttgcttgaacggggagcaagtccggcgctttaccttgaaggagtccgtttagcttgcaacttcgtcaccgtagcacatggtataaccatgttgggatctatctctgccaccgacgcatatgcatgcttccttcatggtctgtttctaaccgcaactggcaacggacgggagt

SEQ ID NO: 167315 - DNA, 1852 bp, Arabidopsis thaliana landsberg
ggccttaacagtagttaaaggacttgcggaactcatttgcagaagcactgcaccatttgtgtttgagattgtcaatatgatcggaactggagaaaggtcaataggattctggacggagggaaatggtcttgtgaagaaacttgacaaagaacctcgaagcataggtactttatccacttggcaagatcatcttaaacatataatatggcctggagaggccagttctgttccaaaaggatgggagatcccgactaatggaaagaagttgcgcattggagttcccaagagaatcggtttcactgatctcgtgaaggtcacaagggatcctatcaccaattcaacggtagtcaaaggtttttgcatagatttttttgaggctgtgattcaagcaatgccttatgacgtctcttatgagttcattccttttgaaaaacccaacggtgaaccagccggtaatcacaacgacttggtctaccaagtgtacctcggggtgagtacgatcacacactaatcatccctcaaaaatagcattagcaaaaccattttagtgaattacttttgttttcttttccatctcagcaagttgatgctgtggtcggagatacaaccatactggcgaacagatcctcttctgttgactttacactcccattcatgaaatcaggtgtgggattgatcgtcccattgaaagatgaagtgaaaagagacaaattcagcttcttgaaacctttgtcaatcgaattatggttgacaaccttagtctttttcttcctagttggaattagtgtatggactcttgaacatagggtcaatccggacttccgtggaccggctaattatcaagctagtaccatcttctggtttgccttctctaccatggtttttgctccaagtacattctatctccaccttttacatgtcatcttatatatgtttctatttattactttgtttgattcttactcttgagttgctgccagcaggagaaagagtgcttagcttcggggcaagggcccttgttgtcacatggtacttcgtccttctcgtgttaactcagagttacacagccagtttggcatcgcttttgacatcacaacaactaaatccaaccataaccagcatgagtagcttgcttcatagaggagaaacagtgggttatcagagaacatctttcatccttggaaagcttaacgaaacaggtttcccacaatctagccttgtgccctttgacaccgcagaagaatgcgatgagcttctgaaaaaaggaccaaaaaatggtggtgtggctgcagctttcttgggaacaccttacgtgagactctttcttggacaatattgtaacacttataaaatggttgaagaacccttcaatgttgatggattcggctttgtttttccaattggatcacctctggtggctgatgtttcaagggccatcttaaaagtagcagagtctccaaaggcagtggagctcgagcacgcttggttcaagaagaaagaacaaagttgtcctgatccagttaccaatccagattcaaatccaactgttaccgctattcagctcggcgtaggcagtttctggtttctgtttcttgttgtgtttgttgtctgcgttctagcactcggaaaattcacattttgtttcctatggaagacaaaagggaaagatttgtggaaagagtttcaaaaacgagacaccaactcgtacatcaacgacatagagaaatgttagtgttctcaagatatgcgtgaagacagcaataaagcaacaaaccagacagactacggtattgagttaagagttaggaatattgcacaagtaaacatctagattcatgacagagactgtctt

SEQ ID NO: 167316 - DNA, 593 bp, Arabidopsis thaliana landsberg
ttgagaatatacacagtctcttgtttgcttggccaaatttccatgaatggtaactttgaacccgtatctggattttgttaggatatagctgttaatgctgctaaatggttgatattataactctgttggctgattcgagaagcctgtctatctaggaataagaggagacatggaattttagcaagctttagttcttgaatcttcaagatctaaatttgaaaaccaagaatgtgtatgcatatctaaacattaatcttatgtagttttcatctcgatacattacagggagcaaagaaaacacttgccgataagtatgaatacataatgcacgggaagctttacaagatctctgagcgtttcggcaaaactccaaaagcgtaagaatcccatataacccccccatatcaaaataattcaatccaattcaactcacatatcaaaccatcatgttttattttattttctttaaattatgtgtttccagagagctatatgtttcgtttggcggcctcctgatgttgcttaagggagatccagctcacatttctcacttcgaactcgaccagaggctcttcctactcatgaggaagctg

SEQ ID NO: 167317 - DNA, 502 bp, Arabidopsis thaliana landsberg
gacaatgtcacgctcgcgccgatcctgaccaagggcgtggcgcggccggcgcccgaaaagcgggcgatggaactgctcgacatggtcggcatggccgacaaggccaggcacgtgccggcgcagctctccggtggccagaagcagcgcgcggcgatcgcccgcgcgctggcgctgtcgccccgcatcatgctgttcgacgaggtcacctcggcgctcgaccctgagctggtcgaggaagttctcaatgtcatgaagaagctcgcggccgagaccgacatgaccatgcttctcgtcacccacgaaatgggtttcgcccacgatttcgccgaccggatcctgttcttcgaccgcggcaagatcgtcgaggagggcaagccggacgagattttccgtaatcccaagcaggaacgcacgcaaaccctccctgcgcaagatcatagcggccgggcaccgcgtctgaacccgattgttcccacatgctcccccaaacaccaacaagacc

SEQ ID NO: 167318 - DNA, 830 bp, Arabidopsis thaliana landsberg
cattgaaaagcatcgtacacatcgatgtatgctacaacaagcttacaggtaaaatccatatgcaattagggaatgtaaataaccttgttgggttagatttaagaaacaattcttgaacaggtacaatccctccaacgatctataaattgggtatgcttcagaaacgcgacatgagctaaaattctctattcgcaagaatcccggaaggtgtagaaaagcttcgttcgttgtctttcatggcgttgagcaacaacaaagtaaagggagcttttccaaaaggaatctcgaaccttcagagtttgcagtacttcataatggataataacccaatgttcgttgctctccccgttgaattagggtttcttcttaaacttcaagagctccagctcgagaattctggatattccggcgtaatcccggagagttacaccaaattgacgaaccttagctcgttgtctcttgctaacaacagattaaccggcgaaatcccatcagggtttgagtctctgccacacgttttccatctgaatctcagcaggaacttactgatcggcgttgttccgtttgattcaagtttcttaagacggttgggtaagaacttggatttgagcgggaacagaggattgtgtctgaatccggaggatgagtttagtgttgtcaagaccggggttgatgtatgcgggaagaacgttagtagtggtggaggtttatcggtgcattcatcgaagaagaaatctcaagcttctcggtattacagatcttgcttcttcgccaatgctctgtttccgtttgctctgtttctaggtttacatcaacgatgggttctctaa

SEQ ID NO: 167319 - DNA, 461 bp, Arabidopsis thaliana landsberg
catagttcagtttgtaccacagtacggtcagtcacatgtcatggtatatatcggggtttgttctcttgttggatcattgtcggtaagtacccaaaacttatgatttaacatttttattcattagctttgttttgagtcctaataacttgaacgatttgagcaggtcatgagcgtcaaagcgctcgggatagcattaaagcttacgttttcaggaatgaatcagttaatttaccctcagacatgggtcttcacgctgatagttctcacctgcgtgataacccaaatgaactatctaaacaaggtatagaggtagcatcagtttcatgttgatatctgttaacatatcatgaaatttcattcggcttctctttttgttttcttgattacaggcgcttgacactttcaacacggctgtagtttcacctatatactatgttatgttcacatcattgaccatccta

SEQ ID NO: 167320 - DNA, 514 bp, Arabidopsis thaliana landsberg
tgtctctgtgttcgctcatccatgctgctgccggtcgcgcttgccgtgccgctctgcatggcgctggcctggctcggcctcctctcttctgtcttcggcctcgcgctcgtctatctcagcatcctcgcacccttctcgacctgtctgatgagatccggcttcgtcggcattccgcgcgagatcgagcagtcgtcgatgatcgtcggggccgggctcttctctcctttgcgcatcctcgccctgccgcttgccatgccccttgttgccaccccggcgctcgtcgccttcttgctcggctgggtcgagttcgtctatgcgctgctcttcgcttccggccagcgtgcccgcacgctgtccgtcgccctcgccgcccttgccggcgggcgggtctccgactacggtctgttcgcgtccggcggcgtgctcgccgcgctgctcgccggtgctggtcggcctcctcgtgcggcgggcccacctatcgggccaaacctgcggtggcgtgtgcggattgcgt

SEQ ID NO: 167321 - DNA, 530 bp, Arabidopsis thaliana landsberg
  unsure (1)..(530): unsure at all n locations
gacagcgctgacgtcatcgtctacacaaagcccgagggcgagctggtcacccgcgacgacaccgaaggccgcccgaccgtgttcgagcagctgccgaaagtgctcggcgcgcgctggatcaccgtcggccgcctggacatcaacaccaccggcctgctgctgctgaccaccgacggcgacctcgccaacgcgctgatgcaccccaagaccggcatcgaacgcgaatacctgtgccgcgtgcacggcgaagtgcccgaggaagtcctcgaacagctcaaggccggtgtcgaactggaagacggcccggcccgcttcaatgccatcacgccggtcagcggcagcggcagccacagctggttccgcgtcaccatcagcgaaggccgcaaccgcgaagtgcgccggctgtgggannnnnnnnnnnnnnnnnnnnnnnnnnnnnnnnnnnnnnnnnnnnnnnnnnnnnnnnnnnnccgcgccctgcggcgcggccaatccgaaccgctggacgaggcctcggtcaagctcctgcg

SEQ ID NO: 167322 - DNA, 1809 bp, Arabidopsis thaliana landsberg; identical to SEQ ID NO: 17194

SEQ ID NO: 167323 - DNA, 1658 bp, Arabidopsis thaliana landsberg
  unsure (1)..(1658): unsure at all n locations
atggcggagatgaagaagagtagtcggcggtgaggagtttcggaagttaatgtatcatcgtcggcgacgacaaatctaggttagggggccctaacttcgtttggagaatgatttgacccaaaatctaggttaattttagagatttcaactcagaaattttcaattgacaaaggggttttggttttttccgccaaaaatagttgattgagtgtaaaaggtttcggcgtacgtgtatatgaatatcgagtttatgtttagttggtatttggatatagcgtacgtgttaagaacttcttcgtcttgttcaactttcaggaagtacttctaatgatccgggtgaattaccacagaggttgtttgcactcgatcactaccctagcaaggcgaagataaatgcgtattccagaccggagtacattggtcannnnnnnnnnnnnnnnnaggacacaccagaaatgacgttccttctagattctccatttggtgacctctttaggatccctactaacaaggcatccttttcagttagttacaaagaaacgttatgagatgtggatggtattccgctggtcatcctattaggctcggattaagagaatgggcacttataactggtttggaatgtggaacctatcctaaagataaggatgtagaaagtgttatgcagcgtgaggaaggtgaaaatacagtttgggctactctatttggagatgataaagctaatccaacagttgaagaattaagggatagattgatttctgaaactgacatgcctgcatggaagaaattagctctcgccctaattatcattgtggatagggtgctaatatgtgacaagtctcctcctttgagaccaaatgagatgacagttgagctgacgaagaaccttgatttcttctgtaaatatccctggggaaggacatcatttctgcttactttggagcgtatcgcaagtttcaaaggagagaccaacgttaaaaaactccggagtggttgcaagcaacattcttatgcactccatggcttcccacttggactccaactccttgcatttgaaactataccgtctattgctagtctcctaccttctgaaggaaataccgccgtctttacagaaaggactattaaaacctttccaaactgcgtccaatcaagacatccaccatattggcgtgcgagtctgctgaacaggtttgtgcagttgttgttgtacgtacattggtataaaaaaatgaagtacatacactctgaaattaacaatgatcgtctatgtaggtggatatcacatatattgtggacccagcagacagtaattgcccaaaatcttttgtatggaggaaagaaaaagaggacccaagagttgataacattttaaggatgttgaaatctgagcaggagtggaatgagaaaatatgggttggaggcgatgatgcgcctaagaagcaagtccggccctcagcaactggagagagaggtaaccatatcttttttcgtataacttatatcagaattaggttcctctaagagtagtaatgcatgatttaaccgtttaatatagttattttgaagaggcaaagacgggtggcagatccagttgaaaacaaaaaaaggaaaattagtcactctaatgatggtgtaggtggcccagtggtggtgat

SEQ ID NO: 167324 - DNA, 1910 bp, Arabidopsis thaliana landsberg; identical to SEQ ID NO: 26084

SEQ ID NO: 167325 - DNA, 557 bp, Arabidopsis thaliana landsberg
gttgaagaatctagaaatagaaagccaaaatcttcctttacttcaactctacaatttctatcttttctctgtacttagccatccagagtcataaccaccactatattaaaatgaagacttatgatttcatgaacgtcaactctttctctcctaaggaaagacccattcgcctctttggcttcgagtttggagcttctcatgaagaatctgagtccaaagacaattacaacgagaacaatgaaagcatcaaagacgataacaaagaaaaaagattcaagtgccactattgtttccggaacttccctacttcacaagccctaggcggccatcaaaacgctcacaagagagaacgtcaacaaactaaacgcttcaacctccattcaaacgcagccgctttcttccaccgccaacaaaaccacattgctgcttctaggctctacgaggatcgctatagccttgaagctgctcaaatcaacgacgcgagattagggttatgtcgtatgtataactcatctgcgagttttaatcgtgaccgttcatcttattataatagatat

SEQ ID NO: 167326 - DNA, 684 bp, Arabidopsis thaliana landsberg; identical to SEQ ID NO: 32852

SEQ ID NO: 167327 - DNA, 2770 bp, Arabidopsis thaliana landsberg; identical to SEQ ID NO: 21624
  unsure (1)..(2770): unsure at all n locations

SEQ ID NO: 167328 - DNA, 776 bp, Arabidopsis thaliana landsberg
gattcttttcgtcctgaatcccatgacccaggcattgaataacgagttctttgatctgtaagttcaaagatatcccaaacaggctctaactttgttggaaatcggctaatttttaatagatattgttttcttcttgttttgagatctgtcaggtcccttagacggcagggacacccttcagagaaagttagccgagggatcttattagctcctttggttggtataatcttgaatctcttggaggctagtgaagactcacaaccacagcaccaacatgatgtaattggtcttttcgcaagcatggactgtcccgatacagtctattacgggtttcagtatctcttggaatataattgggtacgtaagctcttaaatctagtttctgctcgtttgcttctcctactgacacagcttttcaaaaacattttcaggccggttgtgtaagcggggatgatgcctatgtaaagaaacttggtcaacttgagaacttcttgagccatctcataaaccgggcttcatcgcaagaacccgaaagaaaagaagagtcattcaacaaagacacgtcggatacagaagacaacacttgctgtatctgctacgcgggggaggctaatgcaatgattgctccgtgttcacatcgatcatgttatggctgcataactagacatcttctcaactgtcagagatgttttttctgcaatgccccggtgatagatgttataagagataaagaagaagaagaagcagacgatcctggtctccaaagaagcacataa

SEQ ID NO: 167329 - DNA, 528 bp, Arabidopsis thaliana landsberg
tcaggaaaattctatctggttgattgtggatttgcaaatcgtctcaatttcttagctccatttcgcggagttagatatcatcttcaggaatttgctggtcaaaggcgcgatcctgaaactccacatgagttattcaatcttcgtcatgtttctttgagaaacgtaatagaaaggatatttggaatctttaaatctcggtttgctatttttaaatctgctcctcctttttcttacaagaaacaagctggattagtcttaacatgtgcagcgttgcataactttcttcgtaaagaatgtcgatcagatgaagccgacttccctgatgaagtgggaaatgaaggtgacgtagttaacaatgaaggtaatgcaatgaacaccaatgaaattgataatgaggaacctctcgaggcacaaaaacaagacagagaaaacacaaatatgtggagaaaatctatggctgaagacatgtggaaagatgccacacatttggaaattcattgatagatgattttttttagttttccagtt

SEQ ID NO: 167330 - DNA, 867 bp, Arabidopsis thaliana landsberg
atggcgccgaagaaagcttcagcaactggggctgcagctctgcagcctctggaccataaccaggagacagtctctcttcgggaggcccgaagccagaagaggaaggctgttagcccgacgccaccagaggatgagatagatcaagaaatcagagacatggagatgcttcatcaacaggtgcagaggaagaaagaaaagatgaccaggctagctgaactgcaaaggcagatagacgaagcttctgaagaagttcgtcatcttgctcaggatgagaaacaccgaagcctcagcatcaagaccttcatcaggagggtttcccaacgaagatgactggtatgacaatttccatcatgggaattttgtttttgatgatgcttctcctctgtccgctgagctgcaggctacaccttggcctccgtcctacaagccgcctcagctccccgtatttgatggccactcagacccgaagcagtttttgatgagctacgaagcaacagtgtcttcgtatggtggcaacgcttcagtcatggccaaatctttcgttatggctgtcagaagtgttgctcaaacctggtattcctcccttcgaccagggacgattacctcatggcagaagctgaaggacttgttgttaactagctttcaagggtttcagacaaagccggtcactgctcaggctctcttccaatgcacccaggatcatgaagaataccttcaggcatatgtccgaaggtttctacgattgagggcacaggcgccaacagtgcccaatgagattgtcattgaggctatgatcaaggggcttcccagggccgtcagcacagtattttgccaggaagccaccacaaacgctggaaaagctgctcc

SEQ ID NO: 167331 - DNA, 945 bp, Arabidopsis thaliana landsberg; identical to SEQ ID NO: 25696

SEQ ID NO: 167332 - DNA, 1569 bp, Arabidopsis thaliana landsberg; identical to SEQ ID NO: 25159

SEQ ID NO: 167333 - DNA, 584 bp, Arabidopsis thaliana landsberg
gatgcatgtcccgatgcgcggcatgccgccgctcggcgtgctggagaacacgccggaggtgcacaacctggtggtctgcacgctgtgcagttgctacccgcgcgccgtgctcggctacccgccattctggtacaaatccgccgcctaccgcgcccgcgcggtgcgcaacccgcgcggcatgctgaaggaatggggcaccgacatccccgactcggtcaagctccgcgtcgtcgacagcaccgccgattaccgctggatggtgctgccgatgcgccccgccggcaccgaaggctgggatgtcgaacggctcgccggcctgctgcacgaaggcgacatgatcggggtcaccatcccgaccgcctgaccctaccggcgaaggatccccgcgcatgcttcgcctcgtcctgctcctggccctgctgctgcccgccgcctcccgcgccgcctcgctgccggcgcaggaggccgcgcacggcatggtggtcagcgcgcaacacctggccaccgaagccggcgtggccatgctcaaggccggcggcaatgcggtggatgccgcggtcgcggtcggctatgcgctggccgtg

SEQ ID NO: 167334 - DNA, 2877 bp, Arabidopsis thaliana landsberg
ataggtcagaggaatacgatgatcatatatttgattgtagtagtcaagaagattatgagttgtacaaagattcaccgagcgatcaggttgctggatcacaatatatttcgacatgaaagatatgttaagaagaaatctaagtttaaagaagtttgagggatttcctgcggattttacagtcgatagagagctcaaaagaaagacaagtagacatggagggaccagaggctgacgcccatgtcttccatgcaagagaccaagagacatggaatctcttcactcccactcgatctccacgcaaccccatcttcactcgatttctcctccatcactcgaccttgttttctcctccataacccaataaactcaaccccatccttcttaaatcaacgctcccttttcttctttactcgacctcgtcatctcctcctcaccacctctcattcatttcgttcactcgacttcgtcatttcccaacatcaacaacgtcactcgactccttatcatcatcttcttcatcgcctcatcacactcggccacagctctcttcacctctccatcatcaccgcttgccccctctctccaaaataacaactcgacctcgccattccgttcacttgacctccgtcaccaagccgccttcaccacttctacgacatcactcgaccaaggtgccatcgttctctcatctctcaagtccagccatctcttccgcgagctcaagttcactcgaccgctgctccttcacagcttcatcgctctcaccgccatctctcaacatactcgaccttgcgtagtcactcgatctcgccgcttctcaacgcctctccatcgttttcatcgccgctgctctcatccccacgaaagctcgtcatcgccggttcactcgattaagcaaccaaactcgacctctttcaaaccgcttcaccatctctcgcctctcaaggtcactcgatcgccaagcacaaccaaggaatcactcgaccgcgagttcaccaaaccgaaaaaaaaaaaaaaaaaaaaaaaaaaattttggtacactcgatcggtttactctgttggtttgtgtttttggttttgttgggactaacgtattaacgtctatctttgagtttaattttgttttcaggttccgtaatgagtaactacagcggagaatcctctatggaccctgattacaatgtggatgaagctgagtcctggtccgctagaccgagagagcaatatgtttaccagagtttcagggatgaattcgaacgctctgcagcccgacgtaatcagagaagagctgaaatcgccagaggaaagagggcgatgtcaagtagatatgagctgattgatgaggatatcgagactgagtatgagccagagtcatggcgcaaggagacgaagctgctgaacaaacccgacgaggttacagtggaggagtatatcagattcttcgagttgaatgacttctagggaacgaggtatccgtgctatgagactttagcccagttggggttactggaggacgtacaacatctgttcgagaagtattatctggagacactcatgtcttacccttaccctgcctataaggaggagacaatcgagtttctttccacgctgcaagtggagatgtatgagggactcacagactttgagctggataccatgggattaggtttcttgacgttctcagtggatgaacagcggtatcagctttcgatcaagaagttggaaaaactgtttggtttccctagtggaaagggaaccaaacccaaatttgacagagaagagcttaaggatttgtgggccactatagggaacaatctaccgctaaactcggcgcggtccaagaacaaccaaattcggagtcctgtgatccgctactttcagcgatcggttgccaacgtcttttactccagggaatctacaggcaccgtgtctaacatggacatggagatgatagattatgcacttacagggattctccgtcagacgaagggaaagaatgtcttgagaggcgatctcaacaacgcaccaccagtaatgtctctgttgatccatctgtgtggatacaggaaatgggcgttgacgaacggaaagaagaaggtgagaggagcactatgcgtgggtggcgttgtgacgccaattctggaagcttgtggagtaccgctcaaggaaccagggttagcaccgaggatgatggacttggatcatttgcgtagatgtgagttcttggagtttgacatggctcgcgactttcgccaacattcttctcccctgcattgacgctactaggattctcgagggcaggaacattgacttcaagcctgcgcttaaagatctttatttcgagggccgtccaccaactgaggagatcagtcataccgaaggagctacaacagaagatgttgatgagacggatgatatagatgaggcggagtttgacacgagcatgtatcatttcagtgagcatatacctcctgcgagggaaagcaagagtttgagcaaagctcacaggaacaacagcaagctgcagaagtggtgcaagaaacaagacaattactcgccaagtgcctcagggctatcaagtttatgaagaacaagcttagctgctcctcttctactatagctatttcgcagggacatctccctcaggacatgccttcgaggagatatgacgcgctcgagccaagtcggcgcaggcctgagcctagagagcaggagattccgcatgtccctgcgaggcattcatcattcgagcctcgtgaaacagggaggacgaggaggaccacactcactcgatctagcactaggagcggacgacttctgcagtctcgtagtttacgcgaccgcggtgctggctgtagcagaaggagagaggtcgag

SEQ ID NO: 167335 - DNA, 1516 bp, Arabidopsis thaliana landsberg
  unsure (1)..(1516): unsure at all n locations
atgaagatgaagatgatgatgaagaacacgtctctgatctttgttcttctttttatcaccttcttcttcacaagtatctcttactctctttcacttactttcaatggagatctctccgacaatgaagtccggctaatcacacaacgtcaacttctctacttccgcgacgagttcggcgaccgcggcgagaatgtcgacgttgacccatctctagtcttcgagaatccacgacttcgaaatgcttacatagctcttcaagcttggaaacaagctattctctctgatccaaacaacttcacaacaaactggatcggttctgatgtttgcagttacaccggcgtttactgtgctccggctttagataaccgccggatccgtaccgtggccgggatagatctaaaccacgctgacattgctggttatctacctcaagagcttggtttgttaacagatctcgctttgtttcatattaattcaaaccggttttgtggaaccgtaccgcatcggtttaaccgtcttaagcttttattcgagcttgatctcagtaataaccggttcgccggaatattccctactgttgtccttcagttaccgtcgttgaagtttctggatctaaggtttaacgaattcgaaggacctgtaccaagagagctcttcagcaaagatcttgatgcgattttcatcaaccataactggttccggtttgagttaccagataatttgggagattctccggtttccgtaatcgttgtagcgaataatcatttccacggttgtattccgacgagtttgggtgatatgaggaacttggaagagatcatcttcatggaaaatgggtttaattcttgtttaccgtctcagatcggacggttgaaaaacgttacggtatttgatttcannnnnnnnnnnnnnnnnnnnnnnnnnnnnnnnngtattggcgggatggtttcgatggagcagttaaatgtggcgcataatagattctcgggtaacattccggcgagtatttgtcagttgccgaggctggagaatttcactttcagttataatttcttcagtggagagccgccggtttgtcttgggttgcctgggtttgatgatcggcggaattgtttgccggcgagacctgcgcagagatcaccagggcaatgtgcggctttctcttctcttccgccggtggattgtggttcctttggatgtggtcgttctactcgtcctccagttgttgtcccatctaccgcctataactccgtctccgggtgggtctcctcctttggcttctaattctgctagtctatcgnnnnnnnnnnnnnnnnnnnnnnnnnnncgatctcctgggggttcatcctccttcaccgtctattgtctccgtctctcctttaagtagagcatctcctggttcttcgactacatcgacgactagacgtacgtctggtagttctcctccagcatcgccgacaacactaagtcctggtggttacctcaatgatcgcctgcgacaccaactcctggtggt

SEQ ID NO: 167336 - DNA, 1137 bp, Arabidopsis thaliana landsberg
atggaaaactcagacactgattcagaagttttcttttggtttcagaaccaaaaccaaaaccatagccataagtttccttcttcttgttttcctccgagctctcactctgctttttatggtatatctctgttcctccattctaattttattttattttattttcttgaaatgcatctttttcacctttgacgaatcttcatccccaaaatgtaaccactcagattaaaagattgtcctttcattttaaaagagtttgaaaagaatagcaagaactttgaagaacctcatgtgacgacataggtcagattctcttctataaaatttgtgtcaacctcattcgcttcttaattcaggatctagctcaatgatcacacagagactgaactatggacgaagaagacgtatgtgagaccacatgatgcgtgagataaccaagagacggaagctaacaccgatccaattgcgtttactagaggagagtttcgaagaagagaaaagactcgaaccagacaggaaactctggctagccgagaagctagggctgcagccaagccaagtcgctgtctggttccaaaacagaagagctagatacaagaccaaacagctcgaacacgactgtgactctcttaaagctagctatgctaagctcaagactgactgggacattctctttgtacaaaaccaaaccctcaagagcaaggtacagtttcttaataggttaacaagccactattttcatagagtctgttcaaaattttgatgacacattcaaacaggtcgatcttctcaaagagaagctgaaaatgcaagagaatcttgaaactcagtctattgagaggaaaagacttggggaagaaggtagttcggtgaaaagcgataacacgcagtacagtgaagaagaaggtttggagaatcaatacagtttcccggagcttgcagttctcggattttattatgatccaaccttaactgcttcaaatctaaggttgtgatagtgtaggtcaacaacgttccgtgtgcctcaagttatcttcgctgtctccatcctttttatcttagacttcatattctaagaaagaaagcagtaataatattcattgatggaataaatgaaaagtgcatgcttttcaaatgata

SEQ ID NO: 167337 - DNA, 451 bp, Arabidopsis thaliana landsberg; identical to SEQ ID NO: 61634
  unsure (1)..(451): unsure at all n locations

SEQ ID NO: 167338 - DNA, 377 bp, Arabidopsis thaliana landsberg
atgaaggagacaatcaggtgttgcatcgcttgcattctaccgtgtggagcgcttgacgtgatcagaatcgttcactcaaacggacacgtggaggagatcagtggcacgatcacggccagcgaaatcatgaaggctcacccgaagcacgtactcaagaaaccatcttctccaacgtcagatcacgacgagcgtgacgtcatctcagccacaaagatcgtcatcgtccctcccgaagctgagctccaacgtggtaagatttatttcctcatgcctgctactaaatctgataaatgcgccggaggaggaaagatccgccaggaaaaaagtaacgcaaacgccgtcgtcaagaaacggtcacagtatcgccggcggcatcg

SEQ ID NO: 167339 - DNA, 1224 bp, Arabidopsis thaliana landsberg
atgggttgcgttagctcgaagcagacggtctctgtgacgcctgcgatcgatcactcaggtatattcaaggataatgaaaatgagtgttctggatcgggtcgatagtggtgcaggatccgcctcgggcgacgttgaagaagctcgtgtcgtggaggagtaggagcggcaagaggaggagtcagaagagcggtagcgagttagggagtgagtcaggacgtgctagtgactcgcttagttttcgactcggtaatgttagtagataccttgaagctgagcaagtcgctgctggttggcctgcgtggttgagcaacgttgctggtgaagctatccatggttgggtcccacttcgatccgatgcgttcgaaaaactcgaaaaggttcgaaatttgacaattctttatgtgttatgtgaatgttgtttagaagaagaatttgtgaaatttagtttagatttggtttctgtagattggacaaggtacttatagcaatgtgtttcgtgcggtggagactgaaacggggaggattgtggcattgaagaaggtgaggtttgataattttgagccggagagtgttaagtttatggcaagagagattttgatacttagaagacttaatcatcccaacattatcaaactggaaggtttgattacttcaaaactatcctgcaacattcaacttgtgttcgagtatatggagcatgatcttactggtcttctttcttcccctgacatcaaatttacgacgccacaggttggtttgattttatagtggaagtatcattgttcataatgttggggtgttttgttatgtgtttggttgtgtgatcatttgtttttggctcctgcagattaagtgttacatgaagcaattgttgtctgggcttgatcattgtcattcacgaggcgtgatgcatcgggacataaagggttcaaatcttttgttgagtaatgaagggatactaaaggtggctgattttgggttagcaaacttcagtaatagttctgagacacaagaagaaacctcttaccagtcgagttgtgactctgtggtatcgtccaccagaacttttgctcggggcaacggactatggagcatctgttgattcgtggagtgttggttgcgttatcgctgagctgctcattggaaaacccattctcgcgtggaagaactgaagttagcctattaacagtctacactgtcttctattatttatgatatatgacc

SEQ ID NO: 167340 - DNA, 1516 bp, Arabidopsis thaliana landsberg
ccagtacgagttcacgccggcgaactgtcaagccccacttcaagattatgaacgagatccgattgcacagcctccaacaagtcaaaccgtgagggactatcctcctctgacgcatcttttccagtcaggcgaaggatctcctcgtggatatagatctcttcggggatctccttctcctcgcagatctggatcgactctgtttcgagcatccggctcgactcaacctagatctcgaggatctattcatcatctagcctccacgttgaaacaatctccagaggcagttcaacctgaagcctccaatcagtctccagcggcggttcaacgagaagcatccaatcctctacttcaggaagcgtcaaatcctccacctcgagtctttgtatcacatcacagctctcaagctcaaaactcacacgcggaggaagatgaagatgaggaagctgagtttgaggctgattttgaaagggaatcaactatccctgaagatttgcttgcaactctatatgagttgcttgcccagccaagccgtgagaaatatacaacggtcatctctcctaaattgagcctcaaactctatggttagcatctcctcttaccttgtttgtatatagatgccgagtatattaggtttgtatatagatgatgattagattaggtttatgattaatattgaataatatgtgtatgtatatagatgtcgagtagattaggtctgctaattggtttatgtcatagtaggtttggtcatgacaatggtaatctgatcagaaagatcataaaggtatttacaaacacgtttgatgggtcattttacagttgtagatgtgtacctactgaaaaagacacatacttcctcgaattcgccgtaaacttctatctcctcttaatcttttactactgtatgtatacatttggtttggctgtttgatcacttacatcaaactctcctcttgttttgtagaaaacatagacatggcatccctcactaaccggtgtgattgaagacaaattctacaaaatttgttagctacgtatgaaggacatggtttctaaggcttgctcaaagcgagcaagggatcaaccgccatggattgagaagacattttggaaagaaatgtgtgagtattgggacatataagaagccattgctaatagttcaaccacatcaacagctcgaatgtcggaccgtaatggtcttggtcttcacaagcaatgcggttaatctctttttaattttttttatcactttgatcatcttttcttttgtttatgcagttatctgtcacaaacgagagaggggtatatttaagaattagaagcttagggaggtacatcaataagaagcggaagtacacacaaaacagttcttctttcacttccttgcaatcacagctggaggacgccaaccgcaaaatagaggaacaagcgactctacaagcacgtcgtgaggtagagacattgcaggtgagaacgagatttaacaaacaaagaaacttgttgcaagaacgagaca

SEQ ID NO: 167341 - DNA, 638 bp, Arabidopsis thaliana landsberg
catggttccttaagaaaaataagtggacagtcgaatactcaaggttccaagactttgaacagaaagatgatgcaaaaggactaaacacagagcttcgtaccgagcttcccggtcttggtatgagtgttgtggttgggaagtggtacgtcccttttatatttgtgaaggaaagagacgtagaggatcagatcaagagatcgatgtactacagcatgactcttgaacaaagatgggaagaagttttctcttatgagaaggataaaagccgaaactatgatgttttagttgatgtagagttagatactgaagttgttaaggttgatggacaagagatttcaagaggtgtggaagcaaatgggtttgtctggtttgcggttggagacaaaaagattggtttaggatcagttgttgttgagaggatgaaatgggaagaagagagattcgggtggactggcaaaggcgacaatgagcgatcaatggtagttaagagattggagaaatcaacagatggtagcttgttgaagaatcgtcattgttatgtcctggtagagagctttgtcttgaagagaatggatgagagtttggtcttaacatatgagtttacacacgtcgataagctcaaaaccaaatgggattaa

SEQ ID NO: 167342 - DNA, 1042 bp, Arabidopsis thaliana landsberg
  unsure (1)..(1042): unsure at all n locations
atctccaaaagttgaagcaagaaaaaccttcacagtatccttttgaccatcttcttgaccatgggattctcgagctgatcgggattgaggaagaagaagactgtaatacagcatggggaatcaaacagcttctgaaggaaccaaagatatacacacattgcgaattggacctgtcattcttgttgggtgtgagctgtgcagttgtcccatttgcaaatcacgaccatgggagaagagttctctaccagtcccagaagcactgccaacaagccattggattctcatcaacgaaccctaacatccgctgcgatacgctgtcccagcagctgttctatcctcagaagccactgttcaagacattggcatcggagtgtcttaaaaaagaagtgctgttcaatggccagaacgcaattgttgctgtgaatgttcatctcgggtacaaccaagaggattccattgtgatgaacaaggcttcattggaacgtggtatgttccgttcagagcagattagaagctacaaagcagaggttgatgctaaagactcagagaagaggaagaagatggatgagcttgttcagtttggaaagacacacagcaaaatcggcaaagtagacagccttgaagatgacgggtttcctttcattggtgctaacatgagtactggcgatattgtcattggcagatgcaccgagtctggggctgatcacagtataaagctcaagcacactgagagaggaattgtgcaaaaagtggtattatcatctaatgatgaagggaagaattttgctgcggtttctctgagacaggtaagttccagatcatactaaatcgagctgttttttcagagaatgcattcctatgtatgaatcnnnnnnnnnnnnnnnnnncttttacatcttacaggttcgttctccatgccttggagataagttttccagtatgcatggccccaagcctgttttaggctacctagaggaacagcaaaattatcctttcacgatccaaggcatagttcctgatattgtgataggcccgtgcgctt

SEQ ID NO: 167343 - DNA, 2153 bp, Arabidopsis thaliana landsberg; identical to SEQ ID NO: 63073

SEQ ID NO: 167344 - DNA, 923 bp, Arabidopsis thaliana landsberg; identical to SEQ ID NO: 56040

SEQ ID NO: 167345 - DNA, 505 bp, Arabidopsis thaliana landsberg
agacccacaaggtacttttcccctatctctctcactttctctgcatttctggttttggtttaagttgagctgaaattgaagtgaagtactatgatttggagagtatagtggcggaaattggaatatcaatgctttgaaagtttggatttttcttcggttcactggctattcttgtgtctattggtgtcatagtgatagacttaagagtatatctggtgaagtttgagattactgaaactgagaacttcatattagctttagaagttttgaattgtttcagtaaaggtgtttccttttcttgattggtgttaagtctttgttgaatggaattatgagaatgtgtaatgtattttgttgataggcctcagcgaagcggttcagagtgacgggtagagggaagattgtgaggaggagatctggaaagcagcatttgttagctaagaagaacaacaagaggaaattacgtctatcgaaaatggttcgttttctttaatcttgtttctgt

SEQ ID NO: 167346 - DNA, 458 bp, Arabidopsis thaliana landsberg
ccagcgcagctgctgtcagttgctatgacagtggtggattattttatacagagatgctgaggaagaggatggagaatattgcagtaacacagggtcttggaggggtttcagcggagtgttctattgttttaaataacatgttggacttgtacctgaagaaactaatgaaatcatgcgttgatttggctggagctcggtccatgaatggaacgcctggaaaacacagtttagaaaaacagcagagccgagacgagcttgtaaatggggtgcgaacgaataatagttttcacatacaaactagcaaccaaccatctgacataacgcgagaacaacattcagtgtctttgcttgattttagagttgcaatggagctaaatccacatcaacttggtgaagactggccattgctacgggaaagaatttccatatctttattcgaggaacgagaaggggtgtaa

SEQ ID NO: 167347 - DNA, 2350 bp, Arabidopsis thaliana landsberg
caaaataaagaaatcaagagataaaagagaagtctctccaagattatgagtgaagaagacggcggctcaatgagtgtcaaaagcagtctctcaagcttcctcaagatcttatcttcttacaattccaatgttcttttagctgctctagtcttccttctcttagtcgtcctcttcgtcttgcttctccatttctacgctcgctttttctggtctccctctcatcaagatttctccgccgccgctagacatcgccggagaagacgaagaaaccggagaagaacagtgacgacaacaagaatcataccttctctcccactcggaggttttgatgatggagtatcttctccagctgctactgcaacaagggatgacaaaggtttggattcttcagtgatttcttcaattcctctgtttgtttacgaagaaaacgaggaagaggaggatgaagaagaagagtgtgtgatatgtttggggttatgggaagctggagattttggtagaaagttgagaaattgtggacatgggtttcacgtagagtgtatagatatgtggttgtcctctcattccacgtgtcctctctgtcgatcccctgttcttgccgccgtctccgatgaagaaaatcttaagctggccgttaacgccgtcgaagaagaagcagaggttagattacaaatgtctccagcgggagaaaacgagagcaacgtctccggtgatcggagagtttcactgtctctttctgtaatggaagatgatctcaaaacaggggatgacgatggagaagaagaggttagaattgaagtgtttgatgatgatgaggagatcaacgatggaggaacaagaagtgatcggagaagatcaatgtcaatgacgtcatcagcatcgagttcgttaatgaaggatgttaagtagtagtagtagtagtagatcggagcgtaacaaagtgttcccgccgacaaggcaagattcatctaaatagaaatattattatatatagacaagtaaaaatgttgttgtgaacaattttggaaatggaatatgaataaccaaaagcctcgtgtggttaaaaaacagaaagatgtttacaaaagaggtaatctatttgattaagcttttggttgaagatttaaagctaatggaggcaaaatctaataaggtcatgtaatcttaattaaattgtaatatgtaattagatctcatataaaatatggagttgtgtgatgtttgaaagatgaaaaaagcgtagagagcgacagtgaaagaatctcagagggcaacatcacacacttctcatttggttgggttgggatcaaaagcaaactaactactgttgaacttattgttgcaaacttaaaattatgcttttgtattttccattattcttggcctcttcttctatcttccatatcatttcatattcggtaggacaccaccatgctttgcagttttgttttgaagactagtttatttcgtctacatacatcgatttagaactaaataggtatcgagaaacgagtgatcaattaagaaaaacgttaactttctaatgaccacaacatataattaacctttatgatatttctagtcttcgatcaaagtatggttttccatcaaatgagctgagaggttgttttcaaagtttactatcttgattgcttactctaacactctttgtatttttagacctaaaccctgaaatcactcatcgcatttcttccctaaggacaaaagctaaactattcacaaaagaggccaaaatcggtagaatgagtgatgaggttgattgggttcgtgccgtggcgagtcggcggacttctgaatcatagctgctgcagtgccccgaacccaatcactctataattttatcaaccaatcatgacttgccacggcactgcagcagctaaaacgttaaacggcaagcgtttcttctcttagttttataccttatcttttgtttcatttcttctggaacaatcacaaacacttttttgattatgtccgtttcgttttaccgtgaccgcgaatacaactccacgttctctaatttgtgctaaattgttttttataaaagcccaccttaaggcccatgaaaatgagatttgtatgtgatgatgacaagtttgatatagtgaagaaccaacagcacaagcttaggcccatgttaggccctatggttgatgtacaataataatgcttcgatttgtttatataaattccccagcgaatgtgtttttcttttgctccaaagacttgtctgtttttactgtttcttgtcagaaaacaaacagtcaaccgcgacatgaaccacaacgcaaccaagcaggatttgcctttgccaggtccggaattttgt

SEQ ID NO: 167348 - DNA, 705 bp, Arabidopsis thaliana landsberg; identical to SEQ ID NO: 34782

SEQ ID NO: 167349 - DNA, 931 bp, Arabidopsis thaliana landsberg
atgttagacatctccaattatgtcttcttcttcttcacccttgtcacaattctcctatcatgtttggtttacatactcacgcgccacagtcacaatccaaagtgcgcgaacctccctccaggcccaaaaggttggccggtagttgggaatctgttacagttcgcgcgctccggtaaacagtttttcgaatatgtcgatgagatgagaaacatctacggcccaattttcacacttaagatgggaattcgaacgatgatcatcatctccgacgctaatctcgcacaccaagccttgatcgaacgtggagcccaattcgcaacccgacccgtcgaaactccgacccggaaaatcttcagttctagcgatatcaccgttcattccgctatgtacggtcccgtgtggcgatcactgagacggaacatggttcaaaacatgctctgctctaaccggttaaaggaatttggttcaattagaaaatccgccattgatatgctcgtggagaagatcagatctgaagctaagtaaacgctcgggctcgtctgggttctaagcaacgctagattcgctgctttttgtatcttgctagatatgtgtttcggagttaaaatggaagaagaatcgattgagaagatggatcagatgatgacggagattttaaccgccgttgatccacgaattcacgactatcttccgattctaacgccgtttcacttcaaggagaggaaaaattctctggaacttcgccggaaacttgtccaattcgtcgttggattcatcgagaaacgacgattagcgattcgaaatcgccggtccgatcaatcggcgtcgtctttcgcgtatcgtgatactttattcgatctcagagttgatggacgtaaaacgtcaccgtcagatcaagatctcgtgacgctgtgttcagagtttctcaacg

SEQ ID NO: 167350 - DNA, 382 bp, Arabidopsis thaliana landsberg
acataaccacaccattagccacaaacccaaccaccacaccaacaaccgtggtccctaactccgactctgacgcttccgcggtggccacaacgccactaacgattccatcgtcaccacacggtgtagcctcccaggtgatcagagctggtgcgttgctagagagaacgttgcaaaaatggcgttacaagcggctttggactatgcatgtgggatcggtggagcagactgctctgagatacaagaagcaggaaattgttataaccccaactcgttgagagcacatgcctcatttgccttcaacagctattaccagaagaatccttctccacaaagctgtgattttggcggtgcagcctcattagttaacaccaacccaagtgag

SEQ ID NO: 167351 - DNA, 507 bp, Arabidopsis thaliana landsberg; identical to SEQ ID NO: 70584

SEQ ID NO: 167352 - DNA, 280 bp, Arabidopsis thaliana landsberg
atggttgttcgtccaaacctaaagtacttagtattctacagttttaactacaactttaataaaaatactaacaatctctttcgttattttcaacaggttgctgctatcccagaagtttacttgctggccccgatgcttgctaaaattgttagctacgttgcagaatctggtgttgattctttgaaatcctttgttaaggctggtctgttatttaaagcggcagtctattccaaggaaacactaagttgtgtccgccttgacagatctcggtattttatgt

SEQ ID NO: 167353 - DNA, 488 bp, Arabidopsis thaliana landsberg
gttgtcgggctacctcgtgatcgataaaacgcgggcgctggccgggccccacgcaacgatgaccttcggggatctcggcgcccgggtcatcaaggtggaggcacccggcaccggcaatgacacccgggcctggggaccgccgttagtcgaagcaatagacggcgggcagcggcagtcgtcgtacttcctcgcggccaatcgcaacaaggagtcgatcgcgctcgatctgaagtccgaggacggccggaccgtactcaccgagctgatccgccgcgcggacgtgttgtgcaagaacttccgctccggcgtgctcgcccggatcggcttcgacaacaagcgcatgctggaactcaacccacgcctggtggtcctgtccatcaccggttttggcctcgacggccccaaggccaaccggcccggctatgaccagatcgctcaagacatgtaaaggattcatgttgttgcccggatccggtccgcacgctcgg

SEQ ID NO: 167354 - DNA, 2561 bp, Arabidopsis thaliana landsberg
cattagctgctgttggggagcgtgaaggcttgaaacgaggatgaccaacaggatagccatgtttcttgtagcatttgtcaacaacatgaccagtcctaccacagaaagtgcagataggtttgtcctttctaaactgaaaaccaccagaagaactcccctgttgagaaacttgaaaagctgatgtatcaagagtgccagaaggaggaagacaagcagatcgctgagaatcatcttgatctaacatgttgtaaacctcatagagagaaggcagactcttcttcatcaagatctggctacgaacagtgtcatatgtgttgttcaaacccattagaaagtcaatgacacgatttgtttctttttcagcaatcaaatcctcaacagtgtgcgcattaacctgaagactagacagttcttcccacagagattgagtgcgagtatgataagtagagagatccatactaccttgacgaagggaattgatctgttgtctgagtttgtagaggcgaggtaagttggacttgtggtaacgagtgtacagatccttccaaatctcatgagctgtgttgaaatagagaatactggagtagatctgcttcgaaacactgttaagcaaccaagacttcaccatactattgcaacgtttccaaatcaagtagtaggaatcagtttcaagaggacgaacaatagatccatccagaaaacccagcttattcttagcttcaatactagttgtcatagcaacaatccaggttccatagtatgtaccatcgagaagatcaggaacaagaactaaacctggatgatcggagctgtgaagatgataagggctgtgaatattgtctggagaatcagagatgacgaacggaggagatgacgatgtagatcgagcgttgagaagcggttttgcagaagctgagcccacatgaaccggcgatgagctacgatcgttgatcggagagacaggatccgatggatcaggggtggagacgcgatacttcgagttagtctttcgttttcccatggaggacagatttgagctcaaaaacaaatagcaaaagctagatgaagctgaatccgagaaggaatcgaaaagaaaacgaagatccaaagaacaccggtggtcgaaatcggaacaaagagcggaagcgacggctaacaaacttttccgatgaggattgttcgttagagagaaaaagagatttcttgctctgataccatatcagtaaataatctcattctcattcctttggtaaaagatacaattgtgggtttatatacatttgaccaggcctaaaccagagcctctaaaccagctaaaccaaacctatacagactccaattaaacctatacaaaaccataatatttacattgaaactatatacataatatccaccataccaagggtttgatacacagcgcctttgacaggatagttaacgaattccttttcgttggacctgcgatcaaatctataagaagtggcattgcaacctgttttcaaaccataaaagagatatctcctcatcaaattctcaagcggattgacagtaacagaagtcttttgttaagggataagagtttgatgattaattacagtatgctgtgcttgtactgcatattatacattcctcgtctacctggacgcgggataaaaaaacttatggacttctttgacgtccaagctcgcattcaaggtcagctagatgaggcgctctacacatccagtgatcgtctcaccctggatctatgggaacacatattcgcagaggttaaaagcagatcccgtttcgttgacgactatgaaagcgccaggatgttatcttcagctagaggtgattggactctgagcgaaatacaaggtgaagacaaagaaacaaaaagaatgcgtgagaaacttctacgctatgtgatggacatggattatggtcagagccttcttgtgtggcatattgccactgagctcttataccagacagaagaaggcactaaagcgaatcatagcagccgtgagttcagtaaaatcctttcagactacatgatttaccttctcatgatgcaacccactctgatgtcagctgttgtgggtattggaaatataagattcagagacacctgcgaggaggctaagaggttctttgataggaggcatatcgttgagaaatcctcaaagaaggtcaccgatgcaaagggagccagcttggcaattttatcagtggcggcgccagcagaagctgagcccatcgacgtgaaaggtgatagaagtaagtccgtcctgtttgatggggccaggctggcaaatgagctgaagggtttaagaaacatcgaggacaatgcaaatatgtggaaagtagtgagcaaagtgtgggtggagatgctttgctacgcagcaactcactgtgattctaaacaacatgcagctcaactcaacaaaggtggtgaactgatcaactttgtttggctattgatggctcatttcggactcggagagcaattcaggaccaccaaggaagattctagagccacactgattcttaccaaaacaagcacctcttgccttgtg

SEQ ID NO: 167355 - DNA, 835 bp, Arabidopsis thaliana landsberg
aaatgctgctacggacagtatcgtccgccaccgccgagacaaccgccgcattgataagcaagaacacatatctcgatttcttcaaaagatcaacttctatatctcaccttgctcaaacccatgctcagatcattctccatggcttccgaaacgacatctcattgctcaccaagcttactcaacgactctccgacctcggcgccatttactacgcacgcgacattttcctctccgtccaaagacctgacgttttccttttcaacgtcctcatgcgtggcttctccgtcaacgaatcacctcactcttcgctctctgtgttcgctcatctaaggaaatccactgatctcaagcccaacagctccacctacgccttcgctatctcggctgcttctgggtttcgtgacgacagagctggccgtgttattcatggtcaagcggtcgttgatgggtgtgactcagaattgctgcttgggtctaacattgttaagatgtacttcaagttttggcgagtcgaagatgctaggaaggtgttcgacagaatgcctgagaaagacaccattttgtggaacacgatgatatctggctaccgaaagaatgaaatgtatgtggaatctattcaggttttcagggatttgatcaatgagagctgtacccgtttggacactacaactctgcttgatattcttcccgctgttgcagagttgcaggagctgagactcggcatgcaaatccatagtcttgctccaaaaactgggtgctactcccacgattatgttcttactggtttcatctcactatactcaaagtgtggaaagattaagatgggaagagacac

SEQ ID NO: 167356 - DNA, 897 bp, Arabidopsis thaliana landsberg
aagcaaagaacatgtgagcttttagattaaagagtttttagtacttgtcaattctgtgtagagtttccttgtgctttaaaactaaagatgatgcttggatcgttcctagttatgtatctgttttgagatatttgtaagctgtggcaggaacataggaatgctttggaatcacttaggcagaagcatgtaacaaaagttgaagagctagagtataaaatcaggtaaaagctcattttacgactattatttcaagtgtcaatgtatctgaacttttggttaaataccccaaccatttatgtacagaagccttttggttgaaaaagcaacaaacgatatggtaattgatagacttcgacaagacttgacagctaacaaatcgcatattcaagcaatgtcgaagaaactggatcgagtagttacggaagtggagtgcaagtgtaagactctcacccacctgacctccaattgtacttaagtttgtattttctttacggcattcacatggcttcctgatataatcatttgatagatgaactcgagattcaggatctaaaggactgccttctaatggaacaagcagagaaaaatgatatcagtaacaaacttcagagtctgcagaaggaatgtaagaattttttcctcttcactaaaaagtcatagattggtttggtttcaggttttatcagcaagactaagagtccacagaacttcttaagtctatatattgcaaaactaattgaagatccctttttattatttgcagtgcttattagtagaacgtcaatagctgaaaagcagagggatacaacttcaaatcgacaggtcgagacattgaaacagaagctaatgaaactgagaaaagagaatgagatccttaaacggaaaattatctttttt

SEQ ID NO: 167357 - DNA, 1100 bp, Arabidopsis thaliana landsberg
gcagctttgtgctgatgggggttacagctgagaattaggagtcttgagggtacccctaattatggtcccgacacctaccgactcgggctcgggctacaaacgaaaagatgggaagaagaagaagacaaggcacatcaaggagatcgtctactacgacgacagcgacgagtcctcttcctcccaaaaggacaacgacgacaacgactatgagaaaaagaaaccggtcaattcgaacttttcttttgactactctcgtattcctcaaagtgcaaatgctcatttattatctattccacttggtaaacctcctcattttgatggagaggactacggattttggagtcacaaaatgcgtagtcacttgttctctctccatcctagtatatgggagattgtagagagtggaatgcactttgatagttcggatagtcccatgttcattaatgagcaaattcataagaatgcacaagctactactgttcttctagcttcattgtgcagggatgaatatcacaaagtgagtggcttggataacgccaagcagatctgggacaccctcaagatttcacatgaggggaacgacgtcaccttgctcaccaagatggagttggtggagggcgagcttggacgattcgcgatgataaggggcgaggagccaacacaaacatacaaccggctcaagacccttatcagcaaaataaggagctacggaagcacgcgatggacggaccacgacgtcgtccgattgatgctaaggtcctttaccgttcttgatcctcatttggtgaataatattcgtgagaatcccaggtacaccaaaatgtcgcccgaagaagtccttggaaaattcgtaagcgggcgaatgatgatcaaggaagcgaggtacgtggacgacgcgttgaacggtccaaatccatgagcctcaacccattgctctcaaggcaacaaggagcaaggaggcgttacctagcaaggtagcgcaagttgaggcggcagggctaaatgatgaagaaatggccctcatcatcaagcgcttcaagacggcgcttaagggtcgcaagggacagccaagcaagaccaaagccaagaggaagcgctca

SEQ ID NO: 167358 - DNA, 766 bp, Arabidopsis thaliana landsberg
  unsure (1)..(766): unsure at all n locations
tgttcatgatcatggcttacccatgtagtcctgatcatcataaagttctgaaacttggaagtggagaaatgagttggagaagattaanacgtaccttaagacatgaaattatgagtgaaggtatatgcatcaatggggttgtgtattacttgggtgatacgtctgaggttttgacttcttttgtggtagtttgctttgatgtgaggtatgagacattcagctttctttaccctggaagctattgtgaactgataaattacaaaggaaagttgggtttggttttttatgatgattacgatggtgataccattaagttgcgtctttgggttctagaggacgaggagaaaaatgaatggtcgaaatatgcctacgtgttgtgggatgatatatttttggctcattatgtttcggtagttgaagtgactgctacgggtgaattgttttgtcgatggctgattatacatctaagcaacccttctatattttctactataaccctgaaatgaatactcttcaatgtgttgaaattcgaggttttggagaataccatgaagcgtcgggcaataggagtagagtctgcgtctttgtagacaacgtctttgagaaagattgtagtagattctacgctttagcagaccatgtagaagatattaacgtcatcgattcaaagctactcaagtcaaagatctatgaagatacttacccgaacttagaagattatgaacaatcagaccacgacgaaacatcagacgacgaagaatcttta

SEQ ID NO: 167359 - DNA, 307 bp, Arabidopsis thaliana landsberg
ggcgctcttggctgccctacaacaaacatggatccgaggttttacttttgtcatctttgaaggagattgacagactttgataaatctggttgcgaggtctacatcccatggctctttagcaaatttattaatcgatatccatttttgggaagcaaaattcactagctgtcagtttaaattcattaggagagtgggcaataatatagcgcataacttagcaaagtttggttgtaattcatctgatttttattctgactttggttctctgccaaattggctctgtaataactctgtttaatcaataaaa

SEQ ID NO: 167360 - DNA, 1131 bp, Arabidopsis thaliana landsberg
aaggattgttgcctgtggcttgtaagtggtccaaaactgtgagttacaccggtgggaaattggttctgttcttgcagaaaacagagaaaacagagatttggtgtgcggaaatcgcagtggaaagacgcgagggtggagagatttggggtaaagtggagtggtgtaatgttgtgcttagtgggaattttcacataatggattgtgtagctgttgtgctctgatcttgtgttgtaatagacttgtgtcccctgcttgttcttgtgtgttttactagcttatgagtgtttagagggtctttgccaatttgataaagtgggagcttttcggcttttgtgctctgtgtttagctttgtctttagcttttttctttgacccgtttacagagtatgttcagtttatcagtttcgtaatgggactttactttggatttactttagtttacagagtactgctgctgctgctaacttcagtcgtggagagcttactactgttgctgctgctaacttcactcgtggagagcttactactgcctttgagaaaggtgagagctcttataaccccttgtgtttggcttcttattgtatggtggtgtaaaaccatttagctcttgagacttttggcttgtgaaataaacgggtttagctctgtgtttttaatttccaaggctcttgagtcttttggcttgtgaaataaataggtttagctctgtgtttgttttgttccaggatggatttgatagatatgaacgagacacttctcaatgcacaaaatgatttaatagatatgaaggaggaagacgtagaagttcaagcaccaaacaaagtgaaacacaaattcagccgactcaaactcaagttccacgtaagagaggcaaaacttcatttgtgtgggatgatttcatttcagtaggattagaaaatgatgaaaaagaaagagctaagtgtatccattgtggtataaagttggtggtaggtacaagcagtaaacgaaatggaaattatggaacaaatcacttaagtcgccatttagatacatgtcataagacgcctcagaagatagatagaccggtatatgacaagaaaatagatcgtgagatagttagtgcaataattatctatcatgatgtccttt

SEQ ID NO: 167361 - DNA, 1100 bp, Arabidopsis thaliana landsberg
ttgatgaatctcatgaacgtgtgttttccacaaaggttagcttctgattcctgttttaaagtattttcatctgaacttttcgatgttactaaattgaatgggtgcaaatacatttttctgcaagtaaattggccagtgtatgacctgcaaaaccttgttggtttgtatccatgagtggctatgatgtagcagagttctcgatgtctccatattttgtttgtagtgatcgcataaaactagaaaaatagaggtactataaggatgctagtttatcttttgttcattgtcactcaaagtatctttcgtcgtctggtattgatcttttaattggtactacgttcttgctaataatgtacattgcttgatttagttgcgtagtgtcatcttttcaacagaatattgaggaaaaacttactcagatatttaagataggccttgtcctacagttctttgtttggtaagagaatagtgaatcatgaactaactggcctctgaatggaagtatctaaatcagatagtgttggatacaccgaaacagatttagtgttagtattcttcgaatgttataactgattgaaaaaatcttgtgagttcatatgtgaaaagatttagctagtgataggtaagtcaaatacgtagatattggcagtgtgtaattaattatacatgatcacctcctttttttcgtaagagggttaaaggtttgattcatgtctgttttcttgtttacactaagagtatgtcaggtcatgttgatacttcattagacaaatgttcttggatatttttggtgtgaaggcagagttctgttaaaatgatggatattggaattaggattgagacctcttactatgtcttcatctttgcaggaaggagtacaacaacatgtgttgggtttgtacatcatcagaggggacaacatgtaattcttatcatccatcatcatcagtgattttctaacattgcaactgtttttttgtttaataaaaaaaatggtgtcatctttgatcagaggtgttatcggagagctggacgaggagcttgatgctagtctggatttttcgaagctgagagcccatccgttgaaacccgtagtgcat

SEQ ID NO: 167362 - DNA, 726 bp, Arabidopsis thaliana landsberg
ttggtaatagattgcccttcattaacagatgtggacttagttgacgtttgggaagactattgcttgatagagaatatgtcttgccttgatgtggcagacactggctttgttcctaatcccgataccaagtttcttagatctctttcttctgatgtatggatttgcgcttgaccaaatcaatggtagccattttatatatctctctctctctcgtattccttgttgtttcttcaactaatcttcgttttcctctatcataagtcgcgtgttgtagcgccattaacttctctctgctcataacgttttattttcaaacacaaaattccgtagactggttagaaccacttatgtttttgcttcaaaattctctaaaactgaaaactcttatgatcaacgaaaacacggtgacaagcgcatccatctaattttgatgaactcaacattataataaactgtactgataccaggacttcgagggtctccaaccttcctggaaccagtcgagttctattcccacatgcctgtcaactcatctagagatctttggttggaaagacaatggaagaagagaagatgagaaacaatttagtgacatacattctcgcaaactcaaagtgtttaaagacagtggaaatctccctcatagcagccttcaatcttaaggagaggcaaaaggagttagttaccatgcctaggatttcaacattatctaggcttctattcccc

SEQ ID NO: 167363 - DNA, 676 bp, Arabidopsis thaliana landsberg
atggccaggctagctgacttgcagaggtagatagacgaagcctctgaagaagttcgccatcttactcaagatgagcagaaccgaaggcctcagcacagagagcttcatcaggagggcttcttcaacgaggatgactggtatgagaatttccatcatggaaattttgcttttgatgacgcttctcctctgtcagcagaactgcaggctacaccttggcctccgtcttacaagccaccccagctccccatgtatgatggacactcagatctgaagcagtttctgatgagttacgaagcaacaatatcttcctatggcggcaacacagcggtcatggcgaaatctttcatcatggcattaaaaaatgttgcacaaacctggtactcctctcttcggccaggaacaatcacatcatggcaaaagctgaaggacatgctggtcaccagttttcaagggtttcagacgaagccagttaccgctcaagctttgttccagtgcacgcaagatcaagaagaatacctccaagcgtatgtccgaaggttcttgcacctgagggcacaagcgccaacagtgcccaatgaaattgtcattgaggccatgattaaggggcttcggccaggaccttcagcccaatacttcgctaggaagccccctcagaccctagagaaattgcttcaga

SEQ ID NO: 167364 - DNA, 1414 bp, Arabidopsis thaliana landsberg
gaagaggatgaggaagaggaagaggaggaggaagaagaagtggtggtggaggtaaagaagaagaagaaagggaaagctaagattgagcattcgagtactgctccaccggagtttcggcgtgcggttgctaagactagtgctgctgcatcatcaagtgtgaatttgatgaagattcttgatgagattgatgatagattccttaaggcttcagaatgtgctcaagaggtttctaagatgcttgaagctacaaggttacattaccactcgaattttgcagataaccgaggtattgaaactcttgtgattgaagcatttgtgtgtgtgttttcttgctatttggtgaatcttattggtgtggtctagtctatgatcaaagtatttatgtgtgtttttcttgcaatgtggtgaatcttattgagtgtcactgtcaagacacgaatttgatgtgccctagccaatcatcaaattcaaagcttattctattgtagtttgtctttgcttttctcagagttgtcttaccaaaacttaggttgctgctttttaaagtgattcataatgtgtctgtgattggattgtttagaaagtttgagtctttgtttctcttattgaaacaagcaaaaaaaagaaaaccagaagagacagttttttcttttgtagattacatcagggtttagtgtatgcaaatattcttaaagtatgagtctttgatgcactttttggtctgtgatttaacttttatgagaatctaagatgaaccttaaacttaatagatttggtggttttcttatttgccctttttccgtttaaagccattaaaaaaagttcttgatttgactaactaacactttaacctctttttacttgctattccctaccattatcttacctaatctgtttctattgattatgttgaatgtttcttggacaattgttgctttcttgctaatgaaattttttgcttcgcaggatatgttgatcattcagctagagtaatgctttttatattttggaataaatcgttaagaggcgtttcgggtggagaaggtggaaaagatgatcaagaatcagatgagcatgaaactcatgctacggagttggataaattgttagcatgggagaagaaactctatgatgaagtgaaggtacttttaacttttaagctgatcattgctatcagaagtgaatgatgtctagttgagtgcattgttgtggtggtgtagcatggtgagcttatgaagatagagtatcagaagaaggtatctttactcaacaggcataagaaacgaggtgcgagtgcagagaccgtggagaaaacaaaggcggctgtaagtcatctacacacaagatatattgttgacatgcaatccatggattcaacgggttctgaagtaaaccgtttaatggatgatcaatt

SEQ ID NO: 167365 - DNA, 653 bp, Arabidopsis thaliana landsberg; identical to SEQ ID NO: 34162

SEQ ID NO: 167366 - DNA, 1850 bp, Arabidopsis thaliana landsberg
ttctatcccaaattattttctttggaagcatttgttagctactgcgatatagcaataaaagcgttttcttgttctacatgttttttttgttctgttcttatatgttctgttctacatgttattatatgtttgccaattaatttgagaaaatgtatgggttcaacatgaattattataattcatattgaagaaacatgctatatattaacttacaactaagcgaaaaggggttcgggacaatctcatactataaatagggaacaaaacactaagggtgtgaatggtaacatataatttgcggaattcacgaaagaattttgagaaccgcacttagaacaccaatcatcatttatcattacaaatttacgttttttatatttttcttaaaatgtatactgcgtttttcatatacagcgtaaaagtacatggaccgccttttataactgaaacatctcattaccatgtggtacaagtaaaatacgcgatgaatgatattcatttctttttctttagctattaaaaatatatgtatatatataatttttgtatctaaatacatatttttctatctctctttttatatcatattttttaggcgtggacattcgagtatctgtacccatttagttttatttttcttttgggtatcggctctattcaggtatgatgttaagaaccattcaggtattctaaaaatttggttcggtttcgattcgagttcggatcggttcggttattttagtataaatgcaaaagtaaccaaaaatactcaaaatattttcaggtttgggtcggttcggtttttttactcatatataccaaaatctatccaaaatacctgattacccataaatatattggttactttttacccaaatataaccaaatgtaaccaaaatactaaatttacctaaaaagaaaactataacattggttacttttatctcaaatatatttaaatgtatataaattactaaaaaaatctaatatattcggatttataattattaatatatattaatatatatatatataatctataatccgcaccgcaagtagtttttttcaccaatcaaacattattttgtaccgcttattttgtacaaaccgtatttgtcccgcaaatatatttttcccacatgtaccgcagttggaccataccgcactatcaaaccacttttcaaatacgccgtcaccattcggactatgagtttacattctgaaatcatgtagcagtagaactatctaactcatattttcgagttatcagatttcaaaacaaaaatcacattaaaaattcgtataatcaaaacaaatgtttcaacgatttcattcaattatttctccacgtagtttaaaagcagaatacagataaagatctaattttagctaccatctaaggacattgacagtactgtttggaatcgcctatcaacgttacaacgtcagggcaagttcaatgattgcctgcgtgaatggtttaggacgagggcataaggtcggttggcattttcgatccttaaactaattctccggttttaatttttaaaatttggctcagaaaagcatatatggcaggtacccatgggtttttttaatgattaaattttccattcatccaaaaaaaaaaagaaaaaaggtaccatcaaattagaaatatgaattaataatcgtaaaataggcatggacgttccccatatatgaacggtattatattctgtattgatatcctttaccaaaaaaaatcattctgtattgataaatgttggttctacttctacccttcctctctacatcatcttcatttttaatattgaaagaagaaagagacaaatcgatcattttgccga

SEQ ID NO: 167367 - DNA, 1144 bp, Arabidopsis thaliana landsberg
  unsure (1)..(1144): unsure at all n locations
acaaaacttaaccaaagtttctctataatcattgtgtttaaatattccggtttctatatcttaaacccgaatttgtaaagatttctttaagaccatcctcaatgggaggttattaacaatggttcttagctctattttatgaatagattttaaaatttttgtagttaagagtttgattaaggttttaatttttgagcaacatcaaaggtagtatattaagttagggttcttaaaaaaaagaaagatatgattttggtttatgtatggttttgtagagaaaaatgaaaatatgattttggtttatgtttggttttatagagaaaatgaaaatatgattttggttttatggaggaaaaagagatatgtgacgaattaattggtgtaattggtggtgtttggtgtattgacaccatcgtcttctccgtcttatagtcaccggagacagcctttacttcagagaagtctctcttctcctttaccacaagcttcttgtgttggagatgaagacgatttggtattattctggtttgctaaaattaacaattggtttaagttagtttggaggtgaaacagagtggtcaaaacagagtggcgttgagtaaggaatggtccacaaagtcagccacaaaatcagcgatgcacttattatttccttattgtaaagattcgtatcataccatagcgtagacatcgtcattgatcaattcatatatgtacatgtatttcaactaagaaaaaccttcgagcttctgtttatttcatcttgaatcccgccgagttttgcggtggcactacggcgagttgcgccgccgtatggtgttgttgtcgtcgcggactcgttaacctcctcgtactcgcgatctacaaagttcctaaagaaatctgccgtcgcgtnnnnnnnnnnnnnnnnnnnaaacaactcgtggtgaacagaatccttgcgcagcttccgactgacggaaacaacgagcagatgtagagggttttccagaaattctaaattcacgatttgtctgttggatagcgacgatgtgtctgtcgacgaagatgatgagggttttagactccaaacaaaccaaaaactgccccctcacgtatgcttttactaagaaagcctctaaaaaaagagggcctcctacttaaa

SEQ ID NO: 167368 - DNA, 588 bp, Arabidopsis thaliana landsberg
atctcttagaaggtatcctatacagccagaagcattttcaggccagagattcagacatcgtccttgcaagcattcctaagtcaggtacaacttggttaaatcacttgtctttgctgtgattcataggcaagaattccaaacccctctagtatcccatcctctgctcgataacaacccgcatactctcgtgacctttatcgaaggtttccaccttcacactcaagatacttctcctaggatcttctctacacacattcctgtagggtcactccctgagtcagttaaggactcgtcctgtaaagttgtgtattgctgcaggaacccgaaggacgcgtttgtctcactttggcatttcatgaaaaatttgattgttaaggagatggttggatgcacaatggaggaaatggtgaggggtttttgccgagggtctagtatatacggaccattttgggatcatgtattagagtattggaaagagagccgagaaaacccgaaaaaggttatgtttgccatgtctcaagagatgagagagcagcctcaaaattgaatgatgcggatcgctgagttcttgggatattcttttcagaa

SEQ ID NO: 167369 - DNA, 1569 bp, Arabidopsis thaliana landsberg
actgctggagtggcgccaaatctgcagacgtataatgttttgattaaaatgtcttgtaagaagaaggagttcgagaaagcgagagggtttctagattggatgtggaaagaggggtttaagcctgatgtgtttagttacagcactgtgatcaacgatcttgctaaagctgggaaattggatgatgcactggaactgttcgatgaaatgtctgaaagaggagtggcacctgatgtcacgtgttataatatcttaattgatgggtttcttaaggaaaaagatcacaagacggctatggaactgtgggacagactgttggaggactcttctgtttatccgaatgttaagactcacaacatcatgattagtggtttgagcaaatgcggaagagtagatgattgtttaaagatatgggagagaatgaaacaaaatgagcgtgaaaaagatttatatacatatagcagtttgatacatgggctgtgcgatgcaggtaatgttgataaggctgaaagtgtgtttaatgagttggacgaaaggaaagcctcgattgatgtggttacatacaatactatgcttggtgggttttgccgttgtgggaaaattaaggagagtttggagttgtggagaatcatggagcacaagaattcagttaacatagtgagttataacattttgattaaagggttgttggagaatgggaagatcgatgaagcaacaatgatttggaggcttatgcctgccaagggctatgcagctgacaaaactacttacggtatttttattcacgggttatgtgtgaatggttatgtgaataaagccttgggggtgatgcaagaggtggagagcagtggtgggcatctggatgtttatgcatatgcgtcaattatagactgtttgtgcaaaaagaaaagattagaagaagcgtcaaatttggtaaaagagatgagtaagcatggcgtggagctaaattctcatgtctgtaatgcattaataggtggtttaatccgagactcaagacttggtgaggcttccttttttctgagagagatggggaagaacggttgtcgcccgactgttgtatcctacaacattcttatttgcggtttgtgtaaagcagggaaatttggtgaagcatctgcttttgtgaaagaaatgcttgaaaacggatggaaaccagatctgaaaacttatagtatactcttatgtggtctgtgccgggacaggaagatcgatttggcccttgaattgaggcaccaatttcttcaatcgggactcgaaaccgctgtgatgatgcataacatactaattcatggtctgtgctctgttgggaaacttgatgatgcaatgactgttatggccaatctggagcatcgggagtgcactgcaaatcttgttacctacaacaccttgatggaaggattcttcaaagatggagatagccacagatccacagtggaccggggttacatgcacatgatggggctgctacctgatattatatagtgcaaaactatagtgaaagggttgtgtatgtaccataggtgttggggtttgcttatggaaatttttttg

SEQ ID NO: 167370 - DNA, 494 bp, Arabidopsis thaliana landsberg
caaataagatgtcattatccccaagtcgattggagtaaagttatttggtttaaccaaggtatacctagatgcagtttcatcacttggttagctgttcgtgatcggctagctacagggatgcgtatgcatagctggggacataaccaaccgtgtgtcttctgtggagagccggacgaattgtgtgatcatcttttctttgcgtgcccatacacgttcatgaatttgtcggaagttgcagggcgtctgctccagcatcggcaagaccctgactggcatattactctcacttcgttgatcaacggctcaggcgatcatctaagggacatttttctggtgtggcaggagcgaaatagtcggatacacgggaagggctatgaaacttatactcagctgactcgtcgtattgacaaactcgttcgtaacaggatctcttctttagattatcatagcaagcaaagactccgctattctccttcaaagttggttcgagttct

SEQ ID NO: 167371 - DNA, 1618 bp, Arabidopsis thaliana landsberg
agacttcatcagaagagtcccgcaccaaagggaaggagaagaaatcttcttcacacaaagagaagaaggagaaatcctcttcccacaagccgcatcggagtggggacaagaaaaggaggatgaggaaagtggtctactacgagaccgattcttcatcaacatccacctccggatccgacgcggcgtccgtcacttctaagcgccaagagcgcaagaagtatagtaagattcccctacgctaccctcgcatttctaaacatacacctttactttccgtcccattaggcaaaccaccaacatttgatggtgaagattacgctaggtggagtgatttaatgcgatttcatctaacctcactccacaaaagtatatgggatgttgttgagtttggtgcacaggtaccatccgtaggggatgaatactatgatgaggatgaggtggccaaatcgaacacttcaactcccaagccacaactatactccttgcctctctaagtagagaggaatataacaaggtgcaagggttgaagagtgcgaaggagatttgggacgtgctcaaaaccgcgcacgagggtgatgaactcaccaagatcaccaagcgggaaacgatcgagggcgagctcggtcgcttccgtcttcgccaagggaggagccacaagacatgtacaaccggctcaaaaccttggtgaatcaagtgcgcaacctcgggagcaagaaatgggatgaccacgaggtggttaaggttattctaagatcacttattttccttaaccctactcaagtgcaattaattcgtggtaatcctagatatacactaatgactcccgaggaagtaatcgggaattttgtgagctttgagtttatgatcaaaggctcaaggaagatcaacgagcttgacggtccctccacgtccgaagcacaaccggtcgcatttaaggcgatggaggagaagaaagaggaatctacatcaagtagaccacccatcgatgcctccaagcttgacaacgaggaaattgcgctcatcatcgagagttccgccaaatcctcaagcaaaggagggggaaggattacaagccccgctccaagaaagtttgctacaagtgtggtaagcctagtcattttattgcaaaatgtccactatctagtgacagtgataggggcgatgacaagaagggaaagaggagagaaaagaagaggtaccacaagaaaaggggcgcgatgcccatgtgtgccgcgagtgggactccgaggagagctcctccgactcctccgacgaggacgccgccaacatcgccgtcacaaagggactcctcttccccaacgtcggccacaagtgcctcatggcaaaagacggcaaaaggaagaaggtaaaatcaaaatcctccactaaatatgaaacctctagtgatgaagataatgctagtgatgaggaggataatttgtgtactctttttgccaacctcaacatgcaacaaaaggaaaaattgaatgaattaattagtgctattcatgagaagaatgacctcttggattctcaagaggacttcctaattaaggaaaataagaagcatgttaaggttaagaatgcttatgctctagaagtagaaaagtgtgaaaaa

SEQ ID NO: 167372 - DNA, 216 bp, Arabidopsis thaliana landsberg
gagagaggggagagatgcggtttttctaagaaaacattagcatccgtacgaattgacaaaaaccatcatttcatgtggtggtccatgcctcattcaaaatactacactttctttaagaagtgtcttgtcgcgaataatccttatgcgaagtttgtagagaatcataaagggctggcttatgaatcgactatagggtactttcaaatgagatgccgt

SEQ ID NO: 167373 - DNA, 883 bp, Arabidopsis thaliana landsberg
ctgtggtcctgtctccggcctgcttgtccagccatccgtcggttacttcagcgaccgatgcaagtcaagattcggtcgtcgtcgtcctttcatcgctatgggcgccttacttgtcgccgttgctgtcgtactaatcggatatgcggctgatttcggtcacagcatgggagacaaagtcgacgaacctgtcaagatgcgagccgtagttatcttcgctctcggtttctggatccttgacgtggctaacaacactctccaaggaccttgccgcgcattccttggtgatttagcagctggagacgctaagaaaacacgaacagcaaacgcatttttctccttcttcatggctgttggaaatgttttgggatacgcggccggatcgtacactaacctccacaagattttccctttcacaatgactaaagcatgcgacatctattgtgcaaatctcaagagctgtttcattatttccatcactctcctcatagtcctcacaatcatagctctttggtacgtggaagacaagcaatggtcgcctaatgcagattccgacaatgagaaaactcccttctttggcgagatctttggagctttcaaggtgatgaaacgtccaatgtggatgcttctagccgtcacggccttgaactggatcgcatggtttccttttcttttatacgataccgattggatgggtcgtgaagtgtatggtggagactcagcaggagatgacaaaatgaagaaactatacaaccacggaatccaagttggttcgttggggttgatgcttaactctatcgttcttggagtcatgtcccttgttattggagtgattagtaagaaaattggagctaaaaggctttggggagctgtgaacataatcctc

SEQ ID NO: 167374 - DNA, 946 bp, Arabidopsis thaliana landsberg
ataatacatctatatctaaagatatatgtgcatgtaatgttaatgcagaaggagcagaggcattaccttgggatacacgtttgaagatagccattgaagcagctcaaggacttacctttttgcataactccgagaagagtgttatctatagagacttcaaagcttccaatattcttctcgattccgtacggtgtcgtttttcatctctagctccttcccacgtttaaagcaaaaaaaatgctgtttctagaagatatgtcctgctttttagtaacatgttctttgccatttttatagaacttccacgccaagctttcagacttcggactagctaaaaatgggcccattaatggattctcacacgtgaccacacgtgtcatgggcacacaaggctatgcagctcccgagtacatggctacaggtaaataaaacgtgctaattatattaagaaacatgttttaattgttatcggtattttcctttgtctattggattaacttaaagtgatgttataggtcatctatatgtgaggagtgatgtttacgggtttggagtggtactcttagagctcttaaccggtttaagagcattagacccaaaccgaccatctgcgcaacaaaatcttgtggaatgggcctaaaccgggttgaaccagaagaagaaggttcagaaaatgatggatccacggctcgagcagaagtatccacttttggcggtgaccaaaaccgcggagctcattcttcggtgtctggaggctgacccgaaaaaccgaccgccaatggatgatgtgcttagagaattagaagtcgtaaggactatcagagaccaaccccaagaagagaggcgtaaaaggagcagtggtccagatactaaccgggttcgtggaaatgattcaccatatggccgtagaaccggtcgaaccggatagtcaaagagttcttttgga

SEQ ID NO: 167375 - DNA, 1289 bp, Arabidopsis thaliana landsberg; identical to SEQ ID NO: 36043

SEQ ID NO: 167376 - DNA, 689 bp, Arabidopsis thaliana landsberg
acgaaaagacgctagtcatgaaataccctgatcatttctgcttcgtcaaggcttctaatggtaacccgtgtttaaagcttgtaaaatggcgtgatgagttcgcattctcggcgctgcagaagcgaaacgaggacaatgatgtttccggggaggagtctagataccgcgagttcaagagaggtcagtctacgttgacttttcctatgagtttccctagaggatatggagcacagaagaaggtcaaagcatggatggatgagtttcaaaaacttccctacatatctccttacgatgacccgagtaacattgatccggaaagcgatctcatggagaaacgagctgtggctgttttgcacgagctcttgagcttgactatccacaagaaaaccaagaggaactacttgagaagcatgagagcggagctcaacattccgcacaagttcactcgtctattcacgcgataccccggcattttctacctctcattgaagtgtaagacaacaactgtgatcctcaaagaagggtatcgccgaggaaaactagtggatccgcatcctctcactcgtcttcgagataagttttatcatgtgatgagaacagggtttctttatcgggcgagagggctaggcatggtctctaaagaggaacttttgcttgataggccataggatgaccttgaggaagaaggc

SEQ ID NO: 167377 - DNA, 1142 bp, Arabidopsis thaliana landsberg; identical to SEQ ID NO: 42968
  unsure (1)..(1142): unsure at all n locations

SEQ ID NO: 167378 - DNA, 1599 bp, Arabidopsis thaliana landsberg
tatcggctcactgcaagggaacaacttaaaccaatctatgaaagggaactcatggcaatagtgatggcagttcagaaatggcgtcattatcttttggggagacgatttgtggttcatactgatcagaagagtctgaaatttctgctggagcaacgggaagtgtcactggaatatcaaaattggctcagtaaactcctcaactatacctttgacatcatctataagccatgcatcgacaacaaagctgcagatggtttatccagaatgatgcctgcttcttcagctacggtacactcagccatgtttgctttgaaagtccctggcgtgattcaacttcaaaacatctataaggaaattgagttggatgcagcactccaacgcaccatcaacatcattatgtcgagtttgtcctacaaacaaggttttgcagtcaaagacaacagattgtggtacaagaacaggttagtcattccaaacaattcccagttcatacctctaatcctatctgaaggtcatgaggggaagcttggaggacactatggtgtctttatgacaataaaacgaattcaacagtcatttcattggaccgggttggtgaaagacgtgcagcgttttttggttgaatgccaagtgtgtcagactcataagacatctactcggtctccggcggggttgctgcaaccactacctatccctgagaaagtgtgggaggatctcaatatggattttatcgaagggttacccttttctaatggcattaatgtcattctggtggtggtggacagattgagcaagtatgcttacttcattgggttgcgtcacctgtttactgctgctgatgtcgcctctagtttcatacaagaaatagtctgcttgcatggctaccctgcttcatcgtctaagatagagacatgatctttctaagcaatttctggagagagtacttcaagcaggcgggtactaaactgaaacatagcacatcgttccattttgaaactgacggccaaatagaacttactaatcgcagtctggaagtttacctcagatgcttggcttcgtctcatccacggacatggcagaaattcctggcttgggctgaattatggtacaacacctcttttcacacatctttaaagacaactccttttcaggttgtgtatggtcgacctcctccaactttgttgaagtatgaagaacactcaacaacaaatgttgatttggagctgctcaaggacagtgacatgatgctaggacggattaaagatcagctgactctcactcaacagctgatgaaaaacaatgcaaacaaacatcgcggagatgtggagttcaaggtgggtgactttgtttatctgaagctcagaccttacaggcagcattcagtcactcgaagagtttgccaaaaacttgctactaagtactatggactctttgaagtgcttgaacgcattggcaaggcggcttacagacttaagcttcatgagggatccaaaatccatccggtctttcatgtgtccttattgaagttcgtgttgggacaagcagcagaagtgaaccctcttcctgatatttatggtgaaataggagagttcactgtgg

SEQ ID NO: 167379 - DNA, 2520 bp, Arabidopsis thaliana landsberg
accacacatggctttctactcgaactattctggaaaagttagaggaaactcatctgcagatctggttattcacaaggaagaggaagtcgatactacacaacaaaaggcagaggttcccacaacagattacttccagttcaagctcaaattcctcaagcacctacaacacagaaaacaaagtggtgtgtcagatatgtggaaaaccaggtcatcctgctttgaaatgctggcatcgattgaataatagctatcagtatgaagaatttcctgcagctctgacagctatgcgaatcacagacgtcactgatcacaatggaaatgagtgggttggagacagtggagcaacagctcacattacaagctctcatcacaacctgcaacagtcacaaccatatggaggatcagatgcagttatggtgggaaatggagacttcttacctatcactcatactggttcaactattctgccaggaacctcaggtaatttacctcttaaagatgttttagtatgtcctaacattggcaaatctttattatcagtttcaaaacttaccagggactatccatgctctgttaactttgactgtgattttatccgtgtaactgataaggcaacaaagaggcttctggctcagggaaacaacagtaatggtctgtatgtcctgaaggattcaacagttcatgctttctactcctctcgtcaacagacaacatctgaagacatctggcatatgaggcttggacacccaaatcaacaagtccttcagtacctacaaaagattaaggctgtcaatataaacaagagttcaaagagaatctgtgaagcttgtcagtttggcaaaagttcaagactacctttctcaagttcctgctcagttagttcaaggcctcttcagaagattcactgtgatctgtggggacctgctcctattaagtcagtacaaggctttagctattatgttatctttgtagacaactactctcgatttagttggtcatatcctctaaagaataaatcagatttcctatcagtctttgttacctatcaagccctagtagaaaatcaatttcaaaccaaaattgggagctttcaatgtgatggaggaggagagtttacaagtgctaacttcctaaaacatctacaacaacatgggattcagcaacttatctcatgtccttatacacctcagcagaatggtttgacagagagaaagcataggcatcttatagagctaggcttggcaatgatgtgtcacagtcgcatgcctttgaagtattgggttgatggattcttccgccaactttctcatcaatcttctgccttcctcagtcctgtcagacaacagaagtccttacgaggtactatatggtcagaaacctgaatatacttctcttagagtttttggatgcagctgttaccctacattaagagactatgcaagaaacaagtttgatccaaggtctcttaaatgtgtttttctgggatataatgagaaatataaagggtataggtgcttactgttggcaacaggtcgtgtctacatcagtcgacatgtgatttttgatgaagaagacttcccatttcacagagtcttctcctcaggaaccttgtctactccaggaatgctaggttggcataaaagttatcaacatcagcatgttagtcaagatacacaaactacaacagtcatgttagaagaagaagtagagatcttacctattccaatcagtattacttctcctaagacaacaacaacggtcaccactgcacttccaactggaaatgatgctgagagttctgggtgtacggcaggcttcgatcctgatcctataggcaacagctctttagcatcattagatagtcaggatagtgtcgtgccttctacaacaactacaacaacatcagatcagtcaacagaacagagaaacttagatggattcttagaagctgtaaactcaccagaaagtgtaacagcaccagtacaacagtcacaaggtcatcacatggtcactcgatcttaggtgggaatcaggaaaccaaatcccaagtatgctcttctcacatcccgaattcaatatcctgaaccaaagacagtgacaactgctttaaaagatccaggatggaacaaagcaatgaatgaagaatatgataattgtcaagaagctgaaacatggtcattaataccttatacacgtgacatgcatgttctgggctgcaagtgggtcttcaggacaaagctaaatgcagatggttccctagacaaactcaaagcaaggttagtggcaaaaggattcgatcaagaggaaagaatcgattacctggaaacctacagccctgtggttcgaacagccactgtgagaactgtccttcatgttgccacaataatgggttgggacattaagcaaatggacgttaagaacgccttcttgcacggtgacctcacagaaactgtctatatgacacaacctgctggatttgttgatcctacaaaaccagaccatgtttgtcatttgcacaaa

SEQ ID NO: 167380 - DNA, 430 bp, Arabidopsis thaliana landsberg
ccttgcggttttggtcttaactctcgaacacactaccgatcaacggacgataagcgttgggattgtatcttgctttttcaacgctatgatgtatgcttctccattgtctgtcatgaaaatggtaataaaaacaaaaagtttggagttcatgccgtttttgttatcggtagttggttttctaaacgcaggtgtttggacaatttatggctttgtgccttttgatccattcctggctataccaaatgggattgggtgtgtttttggactagtacaattaatattgtatggtacctactacaaatctaccaaagggataatggaggaaaggaagaagcgactcggttacgttggtgaagttcgattatccaatgtgatcgctcaaactgaacccgagaacatcccatatttaaacaaaagagttagcggcgtt

SEQ ID NO: 167381 - DNA, 708 bp, Arabidopsis thaliana landsberg
cttgtatagtctgtctctatggattgcgtggcttcaatggattgtcttccaaatgatcttcttgtcaaaatcttatccttccttgccaccaaacaagctgcttcaacctctcttctctccaaaaggtggaggactctatttgctctcagtcatcatcttgactttgacgatcccatctccgggcgtcccgaagatatccgaagtaatatccgaagtagaggatgacattgaccacttgatatgtaaggccatgctacacagtctttctgagcttcacctacagataatatctacatcgtggcttagtttcccatcccaagtattcaccagcacaacactggttaagctgtcattggggaaaacccaacacatctatgagttttctcctgatacatctctcccagcactaaaggttctcctccttgattctatttggttttgggatgagtcattagtaaatgtatttttcgctgcttgccctgtacttgaggacttaaccatacgttacaataattttagaggaagttcatacgttatatccagcaaaagcattaagaaactctcagttatcaatagcagtagttgttatgatggtcatcaaagcattattacacttgatacacccaatgttgtcgacttctactactctggttttcctcaacctaaagatccacattgtaatttagattcagttgccaaagctacact

SEQ ID NO: 167382 - DNA, 447 bp, Arabidopsis thaliana landsberg; identical to SEQ ID NO: 69938
  unsure (1)..(447): unsure at all n locations

SEQ ID NO: 167383 - DNA, 760 bp, Arabidopsis thaliana landsberg
  unsure (1)..(760): unsure at all n locations
ctaagttggaacactctatccaaaagtaggagctttaggaagttgtacattagtaaaagagcaacaagagaagaggagtccatgatgatcgctatgatgaatttcgatctttattcaatgggggtcgtagttgacgacgacgttgatccatctaaagcgtttaaaaaaaaaaggaataaaaaatctatagcgtttaaacgtcaacctattttccttgatgaacnnnnnnnnnnnnnnnnnnnnnnnnnnnnnnnnnnnnnnttgttatgcttcttaaaagaagacgatacaagggttgtcgtttggaatccgtattgcggacaaacaaggtggatccaactcagatattctcaccgtccacacaaagacaggttcatttacgctctaggatacaaggataaggaatctcgtggtagcttccaattattgaggtttgtagattatttcctaggagcacccaaaaatcaatatttttggtatgaaatttacgattttaactctgattcatggacaactcttgatgtcactccacactggtgtatatactgttgtgaccgtggtgtttctctcaacggaaacacttactggtgtgctaaagaaaggaaagcagaagacgatattgtcgatcacatcatatcttttgattttacaaacgagagatttgggccgcttttgcctttgccgtctaaggttatggaacatgaatatgaaattgtaactttatcttatgttaaagaagagaagcttgcagcttgatttc

SEQ ID NO: 167384 - DNA, 807 bp, Arabidopsis thaliana landsberg
gaaaaagaccgaagcttgagctgcgactttccggaggagtgacttgcttagtttggttttcttgcgactgttgtgatcagaggagctggattcatttcattggagaatcttcgattctttgcaaagactttctcggtaaacttaactgtcataactttctactttgagagattcataacctttttgatgttttttcgggtggcattggtgtagacttcgtttcagcgtctcttgaagaaacagggaggcaaaagagcagcttgggaatatccattcgctgtagcgggcgtcaacataaccttcatgatcatgcaaatgcttgacctagaagcatgtgagtgtccctaatatcttgctctttgtttgtgaagcaagaaaacttgttttaatatttactacatgtgcagcaaaacctaggagttttatacggttggtattcttacaaatgttgtcaggtaaaatatggaaacatttggttatgatgatcatggctctctggtttacttgatttttaactaagtttttggaatatctagaaagcgaatgggcctttgatttgctttactgtgtggcctttgtggtaatggacaagcaatggctggacaagaacgccacctacatggaattcaacgtgagtcgatcatctttcggtttatattgcttggttatggtgatggtgatgtgatgtgatgataaatggtatttgtgtaggatgtgctaagatgtacaagggggcagcttgagagagagctgatgatggatgatgttttcagaattgaggatatgccttctttctctcttctctct

SEQ ID NO: 167385 - DNA, 224 bp, Arabidopsis thaliana landsberg
gtttgcccagtggttacccaaccaacggctgcgtatgtcgcatgttattcctgcagtgaagaagggcattgttccaatgtttgtccgagtaagaagacaggccaagtgaatccaaagggccattgttattggtgtggaagccaagcccactactctcacgcgtgtccaagtaaacccacaggacccgacactcagcacaactcacgacccccgccaccatcagg

SEQ ID NO: 167386 - DNA, 2383 bp, Arabidopsis thaliana landsberg
caaggtgccatctttcccttttctctcagcccagccatcactcaacatcaccaccgtttattctcatccgcgagctcaacatacttgaccacttaacgttttcaccgttttgagctaccactcgacctagccatttccttcactggatctctcccccgctgaacacttatcaccatcaagctcaaaaccactcgacctctacactatagcaaccactcggccgctcgtctctctctttcgcagccaaagaatcatcacctcttctacttcactcgatcgcagcaccttaagcaccacagtcttctcaccgttcaccattcactcactctagaaattactcgatcgctccacctccaggccaccaagaaatcactcgactactaatccaccaaaccgtaaaaaaaaaaaaaaaaaaaattctcggttcactcgaccggtttactctgttggtttgtgtttttggttttgttaggactaacgtattaacgtctatctttgagtttaattttgttttcaggttccgtaatgagtaacaccagcggagaatcctctatggaccctaattacaatgtggatgaagctgagtcctggtccgctagaccgagagagcaacatgtttaccagagcttcagggatgaatttgaacgctctacagcccgtcgtaatcagagaagagctgaaattgccagaggaaagagggcgatgtcaagtagatatgagctgattgatgaggatatcgagattgagtatgagccagagtcatggcgcagggagacgaagctgctgaacaaacccgacgaggttacagtggaggagtatatcagattcttcgagatgaatgacttctggggaacgaggtatccgtgttatgagactttagcccagctggggttactggaggacgtgcagcatttgttcgagaagtgtcatctggagacactcatgtcttacccttaccctgcctataaggaggagacaatcgagtttctttccacgctgcaagtggagatgtatgaagcactcacagactttgagctggataccatgggattaggcttcttgacgttctcagtgaatgaacagcggtatcagctttcgatcaagaagttagaagaactgtttggtttccctagtggaaaggaaaccaaacccagatttgacagagaggagcttaaggatttgtgggccactatagggaacaatctaccgctaaactcgacgcggtccaagagcaaccaaatctggagtcctgtgatccgctactttcagagatcggtcgccaacgtcttttactccagggagtctacaggcaccgtgtctaacacggacatggagatgatagattatgcgtttacagggattctccgccggacgaaggggaagaatgtcttgagaggcgatctcaacaacgcaccaccagtaatgcctctgttgatccatctgtgtggatacaggaagtgggcgttgacgaacaggaagaagaaggtgagaggagcactatgcgtgggtggcgttgtgacgccaattctggaagcttgtggagtaccgctcaaggaaccagggttagcaccgaggatgatggacttggatcatttgcgccgatgtgagttcttggagtttgacatggctggcgactttcactgctacaggttcgagcattcatcgattaaaatcgccaacattcttctcccctgcattaacgctgctaggattctcgagggcaggaacattgacttcaagcctgcacttgaagaactttatttcgagggtagtccgccaactgaggagatcagtcacaccgaaggagctacaacagaagatgttgatgagacggatgatatagatgaggcggagtttgacacgagcatgtatcatttcagtgagcatatacctcttgcgagggaaagcaagagtttgagcgaagctcacaggaacaacagcaagctgcagaaatggtgcaagaaacatgataagttactcgctaagtgcctcagggctatcaagtttctgaagagacaagatcagctgctcctctgccactacaacaattccgcagggacagctccctcaggacatgccctcgaggagatatgacgagccatagcctagtgagcaagaggttccgcatgtgcctgcgaggcattcatcattcgagcctcatgaatctgggagaaagaggaggaccacgctcactcgatctagcaccaggataagaagacttctataatctcgaagtttacgcgaccacagtgctggccgcagcagaaggagagaggtcaggtatcctacgagcggtgttggccgccacatagctgatgaggtcgagtacccacacgctggagctgatatagaacagggcgactcgtcaatggcctcggagcaa

SEQ ID NO: 167387 - DNA, 2027 bp, Arabidopsis thaliana landsberg
tatattttgcccttgatccttcgtgcttgtaggtacttaggtcgttttggttggtgtagggcttttcatactcaagttattcagattggtttgaaagagaatcttcatgtggttaatgagttgcttacgttgtatccaaaggcgggaaggatgggagatgcttacaatctgtttgttgaaatgcctgtgagaaaccgtatgtcatggaatgtcatgattaaagggttttctcaagagtatgattgtgaaagtgctgttaagatttttgaatggatgcaacgtgaagagtttaaaccagatgaagtgacttggacttcggttttgtcttgtcattcgcagtgtgggaagtttgaagatgttttaaagtattttcatcttatgaggatgagtggaaatgcagttagtggtgaagctcttgctgttttcttttctgtatgtgctgaattagaagcattaagtattgctgagaaagttcatgggtatgttataaaaggtggatttgaagagtatttgccctcgaggaacgcattgatacacgtatacgggaagcaagggaaagttaaagatgcagaacacttgttccggcaaataagaaacaaaggtatagagagctggaattctttgataacatcgtttgtggatgctggtaaactcgacgaggctctttcattgttttctgagttggaggaaatgaatcatgtttgtaacgtaaaggctaatgtagttacatggacctctgttattaagggttgtaatgtccaaggaagaggagacgattcacttgaatatttccggcaaatgcagttttccaaagtattggctaattcagtgacaatttgttgtatactatcaatttgtgcggagcttccagctttgaatctcggaagagagatccatgggcatgtgatacggacctcgatgagcgagaacattctggttcagaatgcattggtgaatatgtacgcaaaatgtgggttactcagtgaggggagtctagtatttgaagcaattagggataaggatttgatctcatggaactcgataatcaaaggttatggtatgcatgggtttggtgagaaagctctaagtatgttcgatcgaatgataagttctgggtttcatcctgatgggatcgctttggtagctgttctttcagcctgtagtcatgcagggctggttgaaaagggacgcgaaattttctattccataagcaagagatttggattagagccccaacaagagcactatgcatgtattgttgatctccttggtcgtgtaggctttctgaaagaagcgagtgagattgtgaagaacatgcctatggagcccaaggtctgtgtgttgggagctctgttgaattcttgccggatgcataaaaacgtggacattgcagagggtatagcatcacaacttagtgttcttgaaccggagaggacaggaagctatatgttgctttccaacatctactctgctggtggaagatgggaagaatctgcaaatgtaagggctttagccaagaaaaaggatttgaagaaagtttctggaagcagttggattgaagtgaagaagaaaaagtacaaattctcgtcaggatcaatagtacagagcgagtttgagaccatctacccggttcttgaagatttggttagtcatatgttgaaaaaaggccctacacatgatgggaacaattatgaggatgatctagacctatggacagcataagagatgaatatatcccacatagactgagatgatacacaactaacaaaaacagacttatggaacctatcaggtaagcttgcttctgaccattcaaactagcattgaccaattactaaatcaatcttcaaattagaagagtgtttgtcatgaacaatccataaccagactctggtgcatatctggatgttacaggttctaataatcacggcgtcatctttgatgttcgaattgatggtagttggcaaaggaaagctcatgcctctcctgagctagagaccaaccaatgtcgagccgctgtagatccc

SEQ ID NO: 167388 - DNA, 1453 bp, Arabidopsis thaliana landsberg; identical to SEQ ID NO: 18329

SEQ ID NO: 167389 - DNA, 429 bp, Arabidopsis thaliana landsberg
ataaaagtgggttgtataatatgttattattagatatgtctgtaaaaaaatgaaagtatgtttataattgagattaaaggtgtggtattaatgtttggttactaataaaatgttatggttttagtttatggagttgaatatggttttggagataaagatcattcgactacccccatatttaaggtggaagggaatcaattgttagggtttaacatttaggaagtatatattgattggaagaaggtgatttagatcttgaaaaggttagtgtatttatggagaaagatgggaaagaatatagtggaaacagttatcatttgattaataagaatggcaatcacttttgaaatgatgtttgtgtgcaatgtatatagaaggtggataattagttgggttaacggtattgctcgatttggtaagaagttagaa

SEQ ID NO: 167390 - DNA, 422 bp, Arabidopsis thaliana landsberg
atcaaagaaagcagaatgggaggactaaagagaagaatttcgattgagaagattcagaagaaagagtcacgagccgtttgtttctccaaacgtcgtaccggtctttacagtaaagccgcggagctattatgtcttctctcctccgattcacaggttgcgatcttgacgactccttgttcttccaactctcacgtctccttctactccttcggccattcctctgttgattctgttgtttccgctttcctcaaggatcagggtcttgttcgtaaagagaatctagggttagagttatggtggaagacgagagtcttgctaaatcggaggattcggaggagttgagaaaagcgaccgatgtcgacgtctccgatgttgagagatctaagagaattgcaatctgtgaacaatttctaagagatgat

SEQ ID NO: 167391 - DNA, 276 bp, Arabidopsis thaliana landsberg
  unsure (1)..(276): unsure at all n locations
acaagacaaaccacacgacggccggggggaagagaagcaccacgactccaacagaccacgcgaccccggggacgagaagaaaaccccagcaccgcacgacaccacgcgacccccagggcgaggaccgccaagagagacacgcgaacacgccacgcgacccccggggcgagcagcagcaccaccaccacaacaccgacagncgaacacccaacgccaccacaagggcgaggacagacagcaccgacacgcgagcacgccaccaccaagccgaggacc

SEQ ID NO: 167392 - DNA, 188 bp, Arabidopsis thaliana landsberg
  unsure (1)..(188): unsure at all n locations
gtgatgtnnnnnnnnnnnnnnnnnnnnnnnnnnnnnnnnnnnnnattaagtaatgatgtactacggtcgttcatgcgccatttcgtgatggtattttttgacgacattttgatgtatagtgtgtcatgggcggaccatatgcgacaccttcgggtagtcctcattgtgctgcaacagcncgtcctgtt

SEQ ID NO: 167393 - DNA, 886 bp, Arabidopsis thaliana landsberg
atccttggctgagatcaactccgcgacgtcgggtttcaatgagaacgcaattgttggtcaaggatgctactgctattgtctatagaggctctattccttccattggatccgtggccgtgaagcggtttgatcgagaacactggccacaatgcaaccgtaaccctttcaccacagagttcaccacaatgactggttacttgcggcacaagaatctggttcagttccaggggtggtgcagcgaaggaacagagacggccttagtgtttgagtacttacctaacggaagtttaagtgaattcctacacaagaaaccctcatctgatccatcagaagagatcatagtactctcttggaagcagagggtaaacatcattctcggtgtggcttccgcacttacatatctacacgaagaatgtgagagacagatcatccaccgtgacgtcaagacctgtaacataatgcttgatgccgagtttaacgccaagcttggtgatttcgggttagctgagatatatgagcacagtgcgttgctagctggacgagctgctacactcccagcaggtactatgggttacttggcaccagaatacgtgtacacaggtgtgccctctgaaaaaacagacgtgtacagctttggagtggtggttctggaagtgtgtacggggcgtatggcggtgggggatgacgggacgtgcttgagacctatgtgagccactggagacaggaagttgctggatgggctgacatcatgctgagggaagagttcgatgcagaggaaatggaaagggtgttgatggttgggatggtttgtgcgcatcctgacagtgagaagcggccaagggtgaaggatgctgtgaggattatacgcggggaggcgccgttgcca

SEQ ID NO: 167394 - DNA, 295 bp, Arabidopsis thaliana landsberg
tcatcatcattggtcatgaatgctccgccagcaagcgaagattcaagagctttgcaaaaaatacaatagattggtggaggagttaaaggtggacgaagtcaaagtcaagaaggcagctgcattggcggagacgagggtcgtgaataaggatgtgtggtggaaagtggatccaaatgacgtgaaggatcacgaaaaggcgaagaagatgatggagaagtatcaagagctctatgataaactgtgtgagcaagctgcttcaaggatcaagagaggacatgatgagaataataacaaa

SEQ ID NO: 167395 - DNA, 1563 bp, Arabidopsis thaliana landsberg
cccacattctgtcccatagtgagcttcacatgtttctttttctcctcctcctctctgcttcccgctccggcgaagagtcgccgtcccattggccaccggcggtcttaacagaaagagttttccgaaaggattcttgttcggaaccgccacgtcagcttaccaggtcgaaggcgagacccaccaagatggtcgtggtccaagcatttgggatgcattcgtcaagattcctggttaatctcataatcaatctaattacaattcactaattaaactgattagttaatcatttcgatttcttatttaccattggtaaaaaaacacaggtaagattgccaacaatgccactgctgagataacagtggaccaatatcatcgttacaaggtacttcttgtcactaatcttttgttcctaaatcatcatgtatatatttttttttttgtgtggtatattataatgtacatcctttggtgttcatgttaatcacatttcaggaagatgtagatttgatgcagaacctgaactttgatgcctacagattttccatttcatggtctagaatattccctggtattactggataatgtataaaattaattacattgcttatattttagattaagattagtctataacttcagcttatgaatacagagggatccggtaaaatcaactcgaatggagttgcttattacaatagattgatcgattacttgatcgaaaaaggtatagatttttagtacattgaacattcatagacactttgatttgatcattaattgtcttatgaatgtaacttaattcttagggattacaccgtatgcgaatctgtaccactatgaccttcctttagccttggaacaaaagtatcaaggcctgcttagtaaacaagtagtgtaagcaccaacttgtgatttatcttttaatctttagtctcttactgcaacatcctcaaaagctacaatcatttgatatgaggcaatttacagggaagattttgcggattacgcagagttttgtttcaaacatttggagatagagtgaagaactggatgacgtttaacgagcctcatgtagtagctgctctaggttaagataacggcatttttgcgccgggtagatgctctgaagcatttggaaactgcactgatggaaactctgcaactgaaccatacattgttgcacatcaccttatcttggcacatgcagcagccgtccagagataccgccaaaattatcaggtatgtaataaccttataggctccttcaagttgtttctatgatattaaacatgtatatgattactaaagatctaactgacaaattcttctcaggagaaacaaaagggaagggttgggattctactggattttgtttggtttgagccacttacgagtagtaaagcagacaatgacgctgctcaaagagcaagagacttccatgttggatggtaacggttcaaacttttggactcatatttttccaggtacattttggtgagcttataagaatatcttttgtgggggggatatggttgaaggtttatttcacccaatactggtttg

SEQ ID NO: 167396 - DNA, 502 bp, Arabidopsis thaliana landsberg
  unsure (1)..(502): unsure at all n locations
cccgggtatcgaattccattccggttcactggggcatttgccatccatagctattggtgtggctatggatattanaatcaggggcggtaataataaagtcgtttgcattacaggcgacgtagaactgaacgaaggcacttgctgggaagcaatactggtagctaannnnnnnnnnnnnnnnnnnnnnnncttcgtggtcgaccgtaatcacttccaggccaatatgcctaccgaggagcttatcccgctggaaccattgcatgacaagttcgcatccttcggtgcatcggtaaggcggatagtcggtcatgattttgatgaattgcatattgctttttcggctttcccttttgaaaagggcaaggtaaatgtagtgattgccgataccgtacgcggcaaaggtctgcccagcatagagcgccgtgccgacaggtggttctgcaactttaccgccgcggaggttgacgacctgttgaaggaactgcatggcgaacatttaacc

SEQ ID NO: 167397 - DNA, 414 bp, Arabidopsis thaliana landsberg; identical to SEQ ID NO: 71072
  unsure (1)..(414): unsure at all n locations

SEQ ID NO: 167398 - DNA, 1583 bp, Arabidopsis thaliana landsberg
gccccactatcaaaccacatgcactctccaatctcttaatcaattgggagatctctgcaggatcccggctgaagttatgaaggactcgcaaatgccggagcccactgagtcgccgagaagccaccgtcccggattcttttgcgtatacgagatctatttcaagggttgcggcttgacttctccccttcccgaagatttcgttcgatacttgtcagcccttgaaatcgccttgccccaattaacccccaacctcctccggactattatggggattatcactgtcgcggaggaagccagatatgtcatcggggttcccgaactgattgaacttctcagtgtgaggagttcttcaaagaaggtaggatacttctcggcctatccgaacgccaacaggaacctcatctcgcatctccctaataaggacgagaactggcatcactcgtggttcttaatcaaaaagagccatgcttcgattggaaacctttcggacttgctctcctcgaagtggactactaagcccgatagatgttaggtcatgcatatgaccgttatttacttcttgccttatctgaccaactcttaattttcaattcgcagctttcatcgcaccgacccttccgactattgaattcgccgaaggggaaactctctggaactctctggaactcctttactctcgaccgattcgtagaggccaaccacaagctaaggatgagcccccctggacatcttctccaactgccattgccccctcccttacctcaagggacttctgctcgggtcatcgcagctcgacgcaagacgctatccaagtcgatcgtggaggcttgcgaaacgaacaaatcattccttcaatccgcagtcgacaagaaagaatatagcagaaccttgctagttgacaatggcagcgccgaaggggcaaaatctgctggtgcctacagacccattcctcaccgcgaaggccatagcggccagtcatcccgcagagaacgatcaccgcgccgcaaatcacctcggcctgcctcccgaactagactaagcagcgagccgcttgctgacctgattcagaaatagagagacagatcaacccggggtagctcctccccaaaagagataagacgagagcccgaactgatcactctcctcggccatcgccaccaccccgctctatgggtcctcctcctccagtcaccatatctccttcgtctggatccggaggtgaaaaggccgaccggagtgcaaacccccgacgagaagaagctgaggtccgagatgctggaactaaggttgttctggttcctcagaccaagtcgctcacgggttagaaattaccttccttttgtttatacctgccttatcgtttcgatttactgacttaacgctccttgcctggtctaatcctttctttattctaacagcgatggaaacagagggaaatatctttcgatgcttcaaaactcgaaaagacaccatcctgccagcctttgataggtggcgccctgtaattcgcgaaagattcctactccatgccgccactcatctcgggttagttctcttcacgccgtaataatttaaaactcatc

SEQ ID NO: 167399 - DNA, 695 bp, Arabidopsis thaliana landsberg; identical to SEQ ID NO: 16823

SEQ ID NO: 167400 - DNA, 671 bp, Arabidopsis thaliana landsberg; identical to SEQ ID NO: 13988

SEQ ID NO: 167401 - DNA, 870 bp, Arabidopsis thaliana landsberg
atggatccaatatcagcggttagcgaagagctggctgagatcgaaggacaaatcaatgacatcttccgtgctttatcgtgagaatgaatctctctctagcgttttctctccatttgtgatttggtatttgtgtctatataataatgttttgatgtttttgttttctacagaaatggattccagaagctggagaagatcaaagatgctaataggcagagtaggcagctggaagaactcactgacaaaatgcgtgactgtaagaggtatacattcattgaatctggtgtttgattatccaatgatgatgatgatgatgccttgttcttcttctttgcagccttattaaagatttcgatagggaaatcaaaagcttggaaagcggtaatgatgccagcactaaccggatgttgaacgatagacgacaatctatggttaaggaactcaactcatatgttgctcttaagaagaagtaggtcacacttttgctaattgcttaactgatgctcatatttatggtgattgatgataatgaggatggttatacagatactcatcaaacctagcaagcaataacaagcgagtagatcttttcgatggacctggagaagaacacatggaagaaaatgtcttattagcttcaagtaagtctttaaatctcgtattttgcgaccaactaacaatgagatagatatttattgcactttgttgttatatgattacatacaacctaactagagtatttactggaaacttaataactctcagacatgtccaatcaagagttaatggataaaggaaactcaatgatcgatgacacagatcaagctattgagagagggaaataggtccgttttcagattatatgaatgt

SEQ ID NO: 167402 - DNA, 1129 bp, Arabidopsis thaliana landsberg
  unsure (1)..(1129): unsure at all n locations
nnnnnnnnnnnnatggcggagaggcaacagagccctgcggcggagacgattcccggtacacccgtaatccgggaagtgagaaccggaaccgggtccgagaatttcaacccggagaatacaaggagaggatgcttgagagctgaaatcgacatttctccacagttatatggtggtcgtgggttctgggttcccttcaatcttgaagacaattacgtgagttctcttctagtttccgatttacaaagtctgttcatttaaagtttgagcattaatgtcactgaaagtttgaaatgtatgttctctaactgttaagtatgctaataactgaataactgatagctgattcgatttggttactgagtagatattttgtaataagtgatagctaatttgatgtttgcatttgcggcaattgattctggaactagcaagatgttatgtaagatttttttttggtattatatagcataatttgttttatgtttttttggtttgtcattcttcaggactgtgtgggagaatttgacataaagagaatggaagaacagacagtggagcttgagaaggatctgattatgaaagagttagagactctggatcttcttgaagctcttggatcaaccaaaaggatttttgaagatttgaagtggcagcttcagcagcaagcactgagatgctctgaccaactcagttcttatatcaaagagatgaacgatgagcattgccatcacaatcccatgtcatctcctgatttgatcttgatggaattgaagcaagctaagatgaatcttggtaaaaccatggacgatcttgtagtgatccagtcctctgttgaatctctgaataagaaaatgaaagaagagaaagacttccttgagaagacacgggctaagctaacgtatgggtttggtggaccggtatctctagctgaggagttgaatcggattaaggtaaaaccacaggttcaagatgaaccgttaagggagcaggttaagatggttgctgaagccgatgaaacgggtttaaacctgcagaacaagaacagtctgagaactgcagagatgagaattggttgctgctaggaaaatggaagaagctgcgaaagcagcggaagcacttgcgattgctg

SEQ ID NO: 167403 - DNA, 739 bp, Arabidopsis thaliana landsberg
acaatgagttcgtctaacggaggtgtaccgcctggttttcggtttcatccaacggacgaagaacttcttcattactacttgaagaagaagatttcttatgaaaagtttgagatggaagtcatcaaagaggttgatttgaacaagattgagccgtgggatttacaaggtacgttcttttattaataatacatatacgatccaatcctctagttatattagatactatacaaaagcattttttttttgtttttgtagatagatgcaaaataggatcaacgccacaaaatgagtggtatttcttcagccacaaggataggaaatatccgacagggtcaaggacaaaccgtgcaacccactccggtttttggaaggcgacaggacgtgacaaatgcataagaaattcttacaagaagatcggcatgaggaagactcttgtattctacaaaggaagagctcctcatggccaaaagacagattggatcatgcacgagtaccgtatcgaagacactgaagatgacccttgtgtatgtatatatatctcttattcattagaaaatttgtgaaagtcggtcgatttttaattgaataaaccaatctatacataatgcaggaagatggatgggttgtttgtagagtgttcaaaaaaaaaaatctgttcaaagtagggaatgatgttggctcaaacatcagcaataataggcttgaagctcgtagtttcatccgaagagaaagcccttac

SEQ ID NO: 167404 - DNA, 1323 bp, Arabidopsis thaliana landsberg
  unsure (1)..(1323): unsure at all n locations
gataatgctatataccccatagcatgngggtgtgtacaagtagaaaacatagataattgggtttggtttgtgagaaagttgaaggatgatttgggactgctagatggtgatggttttatcatggtatctgatcgtcaaaaggtatgatttcatggtttgctttcgattttatttaatcatgtattgtatcttcttgtaataacctatgcttttaaattttgtagggtttgatcagagctgttgagctagagctgccaaaggttgaacatagaatgtgtgtcagacacatctatggaaatctgaagaaaaaccatgggaaagataaagagatgaaaaagtatgtttgggatttggcatggagctacaatgagaaggcttatgaagcgggtttgacgaggctttacaactataatgttgctgtctggcgtgatgttgtcaagtcaaaaccaagaacttggtgtagggcgttttacaagcaaggaaactattgtgaagatgtagagaataactcgactgagtcattcaacaactcaatcgttaaagctagggataaagcctttgtgccgatgcttgagactattagaagacttgcaatggttaggattgcaatgagatcagttgaatctcatgagcacaaagggagatgcaccccttatgttagtaagtttcttgcgaaagagtttgagaaagcttcggagatgaaaattagaagaagcaccaatgatatgtatgaagctgaaagaggtgtagattatcagaggatctgtttgactgagaggacatgcacttgtcagaaatggcaaatttgtggcattccttgtgagcatgcttatggagtcatgctagataagaagcttgaagttgaagattacgtgtgtcactggtttcggacacctatgtggaagaagaactacacaaacgggatatttccacagcgagggccagctttttggccatcaacagagcatcccaatgtccatgtcccaccaccaccaccgcagcctgggaggaaaaaaggaaaggagagtaagaaggacaagaagaggaagaaagggaagaacgagtctcccacaaagctggcaccaaaagatatgaaaagggtgatgcattgtggcatttgtggtgacgcgggtcacaactccaggtttcacaagaagaagaagtcacttgcacaggttagtgatatggtgttttgttgtaaaatagtaatgtattgtggtaactgacacttgttttgtgtcttaggcctttgaaggagttatatctcaagttgctcaaggcagtcaagtggagccgtctcaaggagttgtgatgtctcaatga

SEQ ID NO: 167405 - DNA, 554 bp, Arabidopsis thaliana landsberg
  unsure (1)..(554): unsure at all n locations
gctcccgtgctcggcgtcatttctgcgctgctgctgctgatcaacacactgatctggtgtgtgccggtnnnnnnnnnnnnnnnnnnnnnnnnnnnnnnnnnnnnnggtccggcacgtagtctggtttcgcgcggcgtcgcctggaatgcccagcnnnnnnnnnnnnnnnnnnnnnnnttgaccaacatcctgatgcgcatcaaatgggatgtgcgcctgaacgccgagatcgatcccaaagggcaatatctggtttgcgccaaccatcagagctggaacgacatcctgctgctgatgggagcgttcggccgcaaagcgccattcttcaagttcttcctgaagcgcgagttgatttgggtgccgttgctgggcttggcatggtgggggctcgactatccgttcatggcgcgacacaccaagcagcagatcgcaaagaatccggcgttgaagggcaaagacatcgaaacgccacgcaaggcttgtgaagccttccgcgatcaaccggcattgatactcaattttctcgaaggcacacggtttaccgcaaacaagcg

SEQ ID NO: 167406 - DNA, 1997 bp, Arabidopsis thaliana landsberg
ctccaaagttacttgatgacgatgcctggaagaaacaagcgcaaagaaagatcctggccggaaccgcaaacgcaaccacagtcagagattccttcttgtcttctttggcagctgttaacatgtctcctccgtcgacgatagcttacgtattaccgccaggttttaagtttgtgccaaacgatgaagaagtcatccattgttacttgaaaccttactcggacggcaacacgaacgtattgctccatgttcctattcatctcgtcaatatctacgagtcgaatccacaaacactttcaggttaacttgtctccgtccatatgtattgtttacttagttgaattctttagtttattaagttattaacatatatctatatatatatatatatatatatatatttttgaaacagaggaattccataagggtaacgataaagaatggtttattataacggagaggaacaaagttgatcaaggtttaagccaaacaaagagagttggttatggtgcgaaaaggcagaaacgtgtcgacactaacggaggatattggcacgcaacagtggctgcccaaaagatcaacgctggagatggtgtcgttggcaacaaaaggccacttgcatactacgataggaaaccatcagaaggcgtcaaaactgattggttaatgcaagaatactctcttgatcactcttctcacaacacgacaaggtaagtatgtgtttcttggttcccaagttatttaggtttttaagttttttggattctgttttgagtcttgtttctgttggtgcgtctaggattacactttgtgcaggatctatcttactccacaagcaacaaagaagaagaaagaaatgggagaagagaagaagaagaagaagaaagaagtgggagaagagaagaagaagatgaagaaagaagtgggagaagagaagaagaagatgaagaaagaagtgggagaagagaagaagaagaagaagaagaagcagaagaaaggagaagccgctgtttcagtttcacctgtggaagcatcggaagaccagcagccttgtaatgccgagtatcatcaaccgctagcaccgccacattcttgccaaccgcagcctcatgatttggctgtgcagctggatttgcatcaaccagaccaattgcagctgcaacagcctcgtgatattgtgtatcaaccacagtattgtttacttccagaacaagatcagccgcagccttttccttataacttttctcagttgatgatcccagacgatttagaagatgaagaatccaacaattatgatttttttgaaggcttacttgacacagagaaggaatgataaaacataacactaactgatctcagtctgctcatactttgtcattttggtttttgttttcaaacactcaatctagtttttcttcctttatgagttttgttatcagaaagaaaacagagagaagatttcattagttttttttgctaaaatttcattagttgctatcggcattgttttccaaaaccagagataattctccctgtctttattgcttttgatgccttgatcatataaaacatttatacacaatttgtccaacattttcttggcgttttagacttataaactaacacatacagatataaaacacggtgtcttcttcttcttcatttcctcctctaaacatttgttttcctctgaaaaaacagtcgagtcaacattttgattaaaacatgtccgtgttggttctgctacggaagtaaattaaaaagatgaattgcttaaggatgtagcaagtgaaaaactcacaagtattacggaaaaaaaggataccttgaataaatccttaggtgaagcgttatgtgcactaatgagcgaaacaggacatacctgcaaaataacgccattcctcgtgataaaatctaacatacatagtaatgtgggatcaattttctggattccccataatgatgtgttagcataaagctgtaaactttgtatactaatc

SEQ ID NO: 167407 - DNA, 795 bp, Arabidopsis thaliana landsberg
aaaatttcattcctttaaacaatgataagcaaggatccaagatcgagtttacctccagggtttcgatttcatccaacagatgaagaactcattctccattacctaaggaagaaagtttcctcttccccagtcccgctttcgattatcgccgatgtcgatatctacaaatccgatccatgggatttaccaggtaactaaccaatatattttcccttttatctttgtatatatatattctactttttataagtgatataactatgtttatatatttgtatcatcagctaaggctccatttggggagaaagagtggtattttttcagtccgagggataggaaatatccaaacggagcaagaccaaacagagcagctgcgtctggatattggaaagcaaccggaacagataaattgattgcggtaccaaattgtgaagggtttcatgaaaacattggtataaaaaaagctcttgtgttttatagaggaaagcctccaaaaggtgttaaaaccaattggatcatgcatgaatatcgtcttgccgattcattatctcccaaaagaattaactcttctaggagcggtggtagcgaagttaataataattttggagataggaattctaaagaatattcgatgagagtaagtttttgctactactaaagatatagactattattatggtgatttcagtttcaaagtttgtatttttggtatcgcaactattttatccggaaggcataaaccggttatttgagggctggaatatatcatcaataaaccattattttcgtttggtt

SEQ ID NO: 167408 - DNA, 500 bp, Arabidopsis thaliana landsberg
atgaaactaataagatacggcgcggccggcaaagagaaaacaggggttatcattaacgatactaaatacgatacctccgcttttggcgaggattataacgaagcgttttttgagaacgatggcttgaacaggttaaaaaagtttctggctgataacgaaggcaaactaccaaaagtggccgatggcgagcgtttgggcagcccgactgccaggccatcaaaaattctttgcattggtttaaactatgccgatcatgccagagagaccaatgcacaagttcctgccgagccggtattgttcatgaaatcaagcactgcattggttggccccaatgacgatgtaattattccgcgccattcagtaaaaactgattgggaagtggagctggcagtagtaatcggtaagaaagcaagttatgtagaagagtcagaagctttagattatgttgcgggctatgctttgcacaatgatgtgtctgaacgcgagtttcagcttgagcg

SEQ ID NO: 167409 - DNA, 1010 bp, Arabidopsis thaliana landsberg
aagaagagagggaggttgttggagccgagttcttagaggtgattagagagatgaacgacctcctgctagtgcccaatatctccgactttttcccggtattgagccggtttgatcttcagggtttggctaagcgtatgcgaagaccggctcaaagaatggatcagatgttcgaccggatcattaaccaacggttggggatggatagggacagtagtgacgggagagctgtggattttctagacgtcttgttgaaagtcaaggatgaagaagctgaaaagacgaagttgaccatgaacgatgtcaaggccgtactcatggtaagttaaaaataattgtccctcgtaacgcaaatagatttgttatatatggctgtttttgtatttttctaggacatggtgctcggtggtacagacacatcactgcacgtaatagaattcgcgatggccgagctattacacaaccccgatatcatgaagagagctcaacaagaggttgacaaagttgtgggaaaagaaaaagttgtggaagaatctcacatctctaaacttccatacattctcgccattatgaaagaaactctaaggcttcacacggttgctccactccttgttcctcggcgcccgtcacaaaccaccgtggtgggcggcttcaccatccctaaagattcaaagattttcatcaacgcgtgggcaatccataggaacccgaatgtatgggagaatccactgaagtttgatcccgacaggtttctggatatgtcttatgacttcaaaggaaatgacttcaattatctaccgtttaggtctggtcgtagcatacgcgtgggaatggctatgggcgagagggttgttctttacaatctcgctacgtttttgcattcttttgattggaaaattccgcaagtacagagagtggaggtcgagtagaagtttgggatcgtgttgtagctaaagaatccacttgttgccacgcccgttctaaggttgtccgatccaaatctttatctctag

SEQ ID NO: 167410 - DNA, 510 bp, Arabidopsis thaliana landsberg
gcatgcgccggatcgatgacggcaaggtctatcatgttggtgacaccgtctgcgaaattctcctcaagaacgccaatgacggaaccagcgcctacgagctgatggccgggcttttccgcgtccgctgcctcaattccttagtgacacagaccggcaccatcgacgccatcaaggtccggcattccggtgatgtgcagcacaaggtcatcgaaggcacctatcgcgttcttggcgaagccgaacgcacccttgcggccccgcaggactggtccggcctgcggctgaagcatgaggagagggaaatccttgccgatgcggcgcatgttctccggttcggggacaacgagggcgagaccaaaaccccgatcaaagcggaacagttgctcgttccccgccgccacgacgaccgcaaagacgacctccggaccgtctggaacgtcgttcaggaaaacgccatcaagggcggtttgcgtggcgtcggccgcgacgatcgcggcgaggccgggccgt

SEQ ID NO: 167411 - DNA, 908 bp, Arabidopsis thaliana landsberg
gtacgtaagcgcgacatcgtgttgaaattctcaggactaaacgacgacgaatcctttgatttgtttccttacatagtgaaagtgaaacaaacatacaacagtttcccagtaggaacatgcatcaacagaacagacatagacaatgaagactttgtagatttcttcacaaagaactttaactgggcagtgttcggaaacgagctcaaatggtacgcgacagaagcggaacgtggaaaggtaaattaccaagacgcagacgacatgttagatctctgcattggcaacaacataaacgttagaggacattgtatcttctgggaagttgaatccacagttcagccatgggttcgccagcttaacaaaaccgatcttatgaacgcggtacaaaagcgtctcacggatcttttgacgcggtacaaaggtaaattcaagcactatgatgtcaacaacgagatgcttcatggttctttctatcaagatagacttggaaaaggtgttagagcactcatgttcaatattgcacataagcttgatccatctcctttgcttttcgttaacgattatcttgtttatgacggggatgacccgcgttcgtctcccgagaagtatataaaacttgtacttgatttggaagctcaaggagcaactgtaggagggattgggacccaaggacctatagatagtcctgtcggagctatagcatgttctgctcttgatatgctctctgttcttggtcgtcccatttcagtcacacaactggatgcctcttcgagtaatgaatatgctaggggagaggatcttgaagttatgttgcgggaagcatttgctcacccttcagttgaaggtgcggaggactgcattcctcccaatttaatatgtatatttacttaaatcactacaccagttag

SEQ ID NO: 167412 - DNA, 1065 bp, Arabidopsis thaliana landsberg
atgtccctgcttcgaaacttcttctccttcaccttctctgcaaattcaataatcacaaaaccctattttgcaatcccaatcaaagccatggaagctacctctgaactcaatctcaattacccaaaacccatatcagctcctccacctccaatctccaaagacattgaactcagaagagcaatggaagcttcatcaaaatcaagtctcttcaatcttacaagagacgatatactatacgaagacgaatacctaatggctgtgaataaaccaaaaggtgtttattgtgaagctgttcttcgctctgctcctcaaattgttcttggtgagtgaatctaaaataactaatttccttcgtcaattctcaatgttactgaatctaaaatctaattcgattttcagattcttcgagtgagtatcatttagcgaatagattagatcgtgatactagtggtgtaatgattattactaagtcacataaagtcgctgctaagcttgttaaggcattcacagaacataagattcgtaaatcatacattgctctttgtattggttcatctccaaattggaggagggtcacggttagttcaggtcatggacggtcgaaacacggagcttggcgggtttacgctgcgttagacgttggtagagttttacctggtggatcttttgttagagatatggagacaacgtttgaagttgtatctgtaaacagtgtgaaaaacgaatcttgtgaactggaagatgtgaatcatgtgattgttgctgagggggagagggaattgagttgtggtggagatgatgatgatgttgttgttgtggttagggcgtttccgcgaagtgggaggacgcatcagattaggttacattgtcagtatcttgggattcctattagaggagatgttaagtatcatggagtgtatgagtggaatggaagaacatttgaggggcatgagcttcacgctgagtgtttatcgttagatcatccggttacgggtgattctattgttattcgagctcctcttccgtattgggcagccggagattgaaaatgtaacggttaaggga

SEQ ID NO: 167413 - DNA, 2443 bp, Arabidopsis thaliana landsberg
actgtatgtcttctcatcttcgttacagcgtttggttttatgcataagtttgaatttgctgcaaactcgtcatatgtttttgtttccagcgatctgtctggcaataacttctcagggtctataccattaacgcttggcgatcttgaacaccttctcatattgtaagttttttacacttaaagttgtaaatttgtaaatgtttttcttgtgtttgataacttttaatcttttgcttcattaaacagaaatcttagcagaaaccatcttagtggacaattacctgcagagtttgggaaccttcgaagcattcagatgatgtaaagcttatagttgcttcttttggttatatcaaaatcatattttttttctgacttatctgttttacttgtagtgatgtatcattcaatctgctctccggagttattccaactgaacttggccaattgcagaatttaaactctttgtaagttaataatatgatcttatcatttgtattatatacaaaatagatgtatggtttgatctttatgtttatgtacagaatattgaacaacaacaagcttcatgggaaaattccagatcagcttacgaactgcttcactcttgtcaatctgtaagttcttctgcaagagatacttgcttatgagcaatattagccctttggaagatttgtgaatccaacattttcttcttctttcttcgaaaacgttttaggaatgtctccttcaacaatctctccgggatagtcccaccaatgaaaaacttctcacgttttgctccagccaggtatgaagcttctctcagtagtctgtcattatgatcaatacgcataagctttcattgtaaaactaaattcataacctctgcatagctttgttggaaatccatatctttgtggaaactgggttggatctatttgcggtcctttaccgaaatctcgaggtatctactagatttatccattaagcattttcttcaatagatgttttttcttgtttatttgagcttgcttttcttgttcttttcagtattctccagaggtgctttgatctgcattgttcttggcgtcatcactctcctatgtatgattttccttgcagtttacagatcaatgcagcagaagaagattctacaaggctcctcaaaacaagctgaaggtaatgatgatgccttcatacttcttcataactcatattctgttcttatatgacaatatcaatctttaccgattctcagggttaaccaagctagtgattctccacatggacatggcaattcatacatttgatgatatcatgagagtgactgagaatcttaacgaaaagtttataattggatatggtgcttctagcacggtatacaaatgtgcattaaaaagttcccgacctattgccattaagcgactctacaatcagtatccgcataacttgcgggaatttgagacagaacttgagaccattgggagcattaggcacagaaacatagtcagcttgcatggatatgccttgtctcctactggcaaccttcttttctatgactacatggaaaatggatcactttgggaccttcttcatggtaagttcttctaactttttttggttcaatttgtgaaagattgatttgcagataaacggtaaaaatgttttgatttttattttcttgaaaagggtcattgaagaaagtgaagcttgattgggagacaaggttgaagatagcggttggagctgctcaaggactagcctatcttcaccacgattgtactcctcgaatcattcaccgtgacatcaagtcatcgaacatacttcttgatgagaatttcgaagcacatttatctgatttcgggattgctaagagcataccagctagcaaaacccatgcctcgacttatgttttgggaacaattggttatatagacccagagtatgctcgtacttcacgaatcaatgagaaatccgatatatacagcttcggtattgttcttcttgagcttctcactgggaagaaagcagtggataacgaagctaacttgcatcaactggtatatgaatcaagaatcactatagattatgatctttgaaccttaaaagagttaacgttttttttttttatgttgcagatattgtcaaaggctgatgataatactgtgatggaagcagttgatccagaggttactgtgacttgtatggacttgggacatatcaggaagacatttcagctggctctcttatgcacaaagcgaaaccctttagagagacccacaatgcttgaagtctctagggttctgctctctcttgtcccatctctgcaagtagcaaagaagctaccttctcttgatcactcaaccaaaaagctgcagcaagagaatgaagttaggaatcctgatgcagaagcatctcaatggtttgttcagttccgtgaagtcatctccaaaagtagcatataa

SEQ ID NO: 167414 - DNA, 819 bp, Arabidopsis thaliana landsberg
atgcagaagaagagtgatgatttgaagactaagaagaagaagaaacagagtgtttctagggtttgtagtagaggacattggaggatctctgaagatactcagcttatggagcttgtttcggtttacggtcctcaaaactggaaccacattgcagagagtatgcaaggaagaacaggtaacgacaaaaattgaaatctttaatcttcccttagctaattccggaacatgaaacttacaatgttttttcttgcttctttgtgttttgtcttaaaggaaagagctgcagattgaggtggtttaaccagttagatccgaggattaacaagagagctttcagtgatgaagaagaagagagactacttgctgctcatagagcttttggtaacaaatgggctatgattgctaagcttttcaatggaagaacagataatgccttgaagaatcattggcatgttctcatggcaaggaagatgagacagcaatcaagttcttacgtccaaagattcaacggttctgctcatgaatctaacacagatcacaaaatcttcaatctttctcctggtttgtctcttcttaccttacacatatgcattgagtttaactctgttattgtaatgagatactttcgatatttatcactcaggaacaatgaacttatggtttggtctcaaaagtagtcagattgcaagtttggtgagtctttaagtttcatggttctgtgtgttcttgcaggtaatgtagatgatgatgaagatgtgaatctgaaaaagtgcagctgggaaatgctaaaagagggaactactaacctgaaagctcagt

SEQ ID NO: 167415 - DNA, 522 bp, Arabidopsis thaliana landsberg; identical to SEQ ID NO: 72102
  unsure (1)..(522): unsure at all n locations

SEQ ID NO: 167416 - DNA, 261 bp, Arabidopsis thaliana landsberg
  unsure (1)..(261): unsure at all n locations
caaatccgaggagtattacnaggtaccttataagaatatcaaggctatgacaatgcggttgcattacctgctagaggaaccaatgaggagctagctaaggagaacaacaagatcacacttagtgtaacaaagagtaatcccgagagcggtgaagtgattggtgctttcgagagtattcaaccttcagacactgatttgggtgctacgactcctaaggatgtcaagattcaaggaatctggtattgccaacttgatgaataa

SEQ ID NO: 167417 - DNA, 780 bp, Arabidopsis thaliana landsberg
tcgccgtgacgccgagtccaatagcagcggtacaacggctttgatcttgacagctgcggtttactactcctcgaattaccaaggggtaccgtaccctgttctggccatttccaacagcttggattggattaatcttatggcctatgatttttacggaccgggttggtctacagtgactggtccacccgcctctctgtatcttccaaccgacggtatatatatcttcactattttacacactatctcttcatgcaacaccttatgttttctgttcgtacttttatggttaggtcgaagtggagactcaggtgtgagggactggactgaagccggacttcctgcgaaaaaagccgtgttaggattcccatactatggctgggcctggactctggcagaccccgacgttaacggctatgacgcaaacaccactggaccagcaatatcagatgacggtgagatcagttaccgtcagttacagacgtggatagtagataatggagcgacgaaggtgcatgatgacatgatggtcggagactattgctacgccgggacaacttggatcgggtacgacagtgagaagagcatcgtcaccaaagtgatatacgctaagcagaaaggtctgcttggttacttctcgtggcacgttggaggtgacgacaactcggaactctctagtgcaggttcgactccttaccatatacttattttatgtatgagttggaaatatagtaagatttatcatccgatccatgtaataatagcacgaattggacgataatt

SEQ ID NO: 167418 - DNA, 887 bp, Arabidopsis thaliana landsberg
atcttcctggcctgagagacaatggttggtggatggattgcagccagatatatcagcaccaggagtggagattctcgcagcctattcacctttgggttcaccatctgaggaagagagcgataaaagacgtgtaaagtactctgttctgtcgggaacttctatgtcttgtccgcacgttgcaggtgtggctgcgtacatcaagactttccatccaaaatggtctccttccgttatccaatctgccatcatgacaaccggtaagcgaaaactaaatccaatatttagtatcttgccctacaagtaacctctgttttaaactctgttcttataaagtctctttactaataatcgttgcagcttggccaatgaaacctaatagacctggctttgcatcaaccgagtttgcttatggagctggacatgtcgacccaatagccgctattaaccctggactcgtctatgaattagacaaagcagaccacatcgcctttctttgcggtttgaactacacttcgaaaacccttcatctcatcgccggtgaagccgttacttgcagtggaaagaccttaccaagaaacctcaactatccttcaatgtcagctaaaattgatggatataatagctccttcaccgtgactttcaaaagaaccgtcaccaatctcggtacccccaactctacgtacaaatccaagatcgtcttaaatcacggagctaagctcgtcaaggtctcgcctagtgttctttcttttaaaagggtgaacgaaaaacagtctttcacagtaactttttcaggcaatctcaacctaaatctacctacatctgcaaatctaatctggtctgatggaacacataacgtgagaagtgtgattgttgtctacacaacgtga

SEQ ID NO: 167419 - DNA, 2662 bp, Arabidopsis thaliana landsberg
  unsure (1)..(2662): unsure at all n locations
tccccacctatcactactcgcctcgtatctcacctcacctattaacagtttgcccctcctcattcatcaccaccaacaaaccaaactctcatctctcttctctcaaccactcgaccccatctcgtcctcacaagcttcactcgatcccatcgccttgtccctccatcactcgacctcaaccatcactcggtctcttcactgctgaacacttatcaccttcaagctcatcatctctccatctgagacatcactcgaccaacgccaccaacgtcttctcttcttccgcgagctcaacatcactcgagctctcctcaccattaccattctcacaagcttcactcaatctctttcaagctcgtctctcatcaccaaacactcgatccctcatcaccttctccgtccaaggttcgctactcgaccttgcctaatcactcgacctcgccatttcattcactcgacctctatcaccaagccgccttcaccacttctagctcataaccactcgaccaaggtgccatcattctctcatctctcaagtccattaatcactcgattcaccgctcaagcctcaccactcgaccaccgcctcactctaaccacgaaactagtttcactcgaccaaacaaagtcactcgatcaatcgaaaaaataaaaaaaataaatcaaaaccgacggattacttgattacatcactcgaccggttcacttgattggtttgtgtttttggtttgctgttactaacgtattaacgttttttttgagttttgtctgttttcaggtttcatcatgagtaactacagtggagaatcctctatagaccctgattacaatgtggatgaagctgagtcctggtccgctagaccgagagagcaacatgtttaccagagcttcagggatgaattcgaacgctctgcagcccgacgtaatcagagaagagctaaaatcgctagaggaaagagggcgatgtcaagtagatatgagctgattgatgaggatatcgaaactgagtatgtgccagagtcatggcgcaaggagacgaagttgctgaacaaacctgacgaggttacagtggaggagtatatcaggttctttgagatgaatgacttctggggaacgaggtatccgtgctatgagactttagcccagctggggttactggaggacgtacagcatctgttcgagaagtgtcatctggagatactcatgtcttacccttaccatgcctataaggaggagacaatcgagtttctttccacgctgcaagtggagatgtatgagggactcacagactttgagctggataccatgggattaggtttcttgacgttctcagtggatgaacagcggtatcagctttcgatcaagaagttagaagaactgtttggtttccctagtggaagggaccaaacccagatttgacagagaagagcttaaggatttgtgggccactatagggaacaatctaccgctaaactcggcgcggtccaagagcaaccaaatccagaatcctgtgatccactactttcagagatcggttgccaatgtcttttactcnnnnnnnnnnnnnnnnnnnnnnnnnnnnnnngacatgaagatgatagattcagcgcttatagggattctccgccgtacaaaaggaaagaatgtcttgagaggagatctcaacaacgcaccaccagtaatgcctctgttgatccatctgtgtgggtacatgaagtgggcattgacaaacggcaagaagaaggtaagaggagcactatgcgtgggtggcgttgtgacgccaattctgaaagtttgtggagttccgctcaaggaagtagggttagcaccgagaatgatggacttggatcacttgcgccgatgtgagttctctgagtttgacatggttggcgactttcaccgctacaggttcgagcattcatcgattagaatcgccaacattcttttcccctgcatttacgctactaggattctcgagggcaggaacattgacttcaagcctgcgcttgaagatctttatttcgagggcagtccgccaactgaggagatcagtcacacagaaggagctagaacagaagatgttgatgagacggatgaaatagatgaggcggagtttgacacgagcatgtatcatttcagtgagcatatacctcctgcgagggaaagcaagagtttgagcgaagctcacagaaacaacagcaagctgcagaagtggtgcaagaaacaggacaagttactcgccaagtgcttaagggctatcaagtttctgaaggacacgctcagctgctcctcttccactacagctattccgcagggccatctccctcaggacatgccttcgaggagatatgacgcgcccgagccaggtcggcgcaggcctgagcctagagagcaagagattctgcatgtccctgcgaggcattcatcattcgagcctcgtgaatctgggaggaagaggaggaccacactcactcgatctagcagtaggagcggacgacttctgcagtctcgtagtttacgcgaccgcggtgctggccgcagcagaaggagagaggtcgagtttcctcagagcggtgctggccgccacagagctgatgaggtcgagtacccacctgctggagctgatacagaacaaggcggttcgtttatggcctgggagcaa

SEQ ID NO: 167420 - DNA, 776 bp, Arabidopsis thaliana landsberg; identical to SEQ ID NO: 14095

SEQ ID NO: 167421 - DNA, 497 bp, Arabidopsis thaliana landsberg
atgacgagttcagcggctgaccgcgaaccgggcgggcagcggtttcacggccgcgtcgccgtcgtgaccggcgccgccgccggcatcggcgccgccacggccgcgcggctggccagcgagggcgcccacgtgatcgtcgccgacatcaacgacgacggcgccgaccacgtcgtcgggcagatcgccgcggcgggcggcagcgccagccgctggcacctcgacgccgggaacggcgcggactgggatgccctggccgcgcacatcggccagacctggggacggctgggcctgctgcacagcaacgccggccgggccatcgtcgtcaagcccgcgcacgagttcaccgagcaggaatggcaagcgcagctcgcggtatcactgaccgcagcgtggcacggcgtgcggacactcatcggaccgctgcgacgtgatcgggaaagcattgaactcacctcgtcggtgcacgccctggtcggcctgcccgggcaccccgcgta

SEQ ID NO: 167422 - DNA, 1741 bp, Arabidopsis thaliana landsberg
atgaagaaatctcatcgtcagaaatctcaggtaaaccaaaaaaaagaaactttttgtgtacttaaaaagattttgttgcctgaattggattaaaagtgtgtggattatattatataacagagactatgggcaaagctagtgatgagaaagtggttgaacataagtggtagagatcctgagtatggtgctgatactgataacgaatccgaaaacgaagatgctcgtgaagacaacgatgactctagctccgatgaagaaggttactctcttctctctctctggtaaacaccggttcttcttatttttacggttaattagctaaccggtttataacaggtggtagtggctcgagaggaagagaatcaaaagtttatgagaacgcggaggacgcaatcgcagccgcttcagccgttgtagacgcagcagcagcagcggcggagtttattagcaatggtaatgccgaaattgcataggtagttatgagattcactgtggggtgtttctgggtttttatatctattttgagatccctttgttgaatttcaaatcttttttttttttataactaaattattcaactttaaaaaaacaaagtatacgaattttgtgaattttatgtatttttattcttttgtttggggtggatcagatgctccaatgaagttaagaagaaggaattcagaaacattaagagcacagtacattaacaacaaagaaataaggtacaattttgtatttttatattttatatatagtagtactatatagtaaaagattcggatgttatcatagtctttttcaacatgtaagttttttttttggttgggtaaaaggagacctaacatgtcggaattatgtatattgtagagtttgtgttggtacgtggaacgttggaggaatctcaccaccatctgatcttgacattgacgactggattgaaattaaccaaccagctgatatctacgttcttgggtaaaacttgacttttctttgtcagcgacatggacaaaactaactctgttcagatatgttctttgttagagatttttatttatgttttgtttttgtttttgttgggtgtgaaggttacaagagattgttcctttaaatgctggaaacattcttggagctgaagatgatcgtcctgttgctaaatgggaagaagtgattagagaagcattgaacagagttagaccaaaactctccggggttaagagttatagtgatccaccatctccgggtaggtttaaaccttttgaggaaacacatgatattatagaggaagaagtagcttttgagagtgatagtgatgctggtgttgagattcatccgattgacgaggaggaagaagaggaaaccgatagactttgggcgttaaaacatgacggtggagttatcggcgaagttaagactcttgttgacccgaataccggtttgccggttgttgagatcaagagacagttttcgattcctaagaagctagacagacaactttgtttacgtgctgatagctttaaggggataagcgacgatgattctactcaaaccggtatgaaaacgataaaccggatgttaagcgggaaagaacggatcggtttgagttggcctgagccaccattgaacatgttaggaccttgtgttctcgatagacaaccgtcgataaagacagtgaagtctttaaaaacagccaagtctttcaaggctatagttcgtttaagtctgtagccgggaacaacaacgg

SEQ ID NO: 167423 - DNA, 4202 bp, Arabidopsis thaliana landsberg
atggttccgatgattcagaatatcatcaaagccgtgcgatcggatccacagatggctaaaaactctggttttgcgatttccacttctatgccgcttgatgaattaactcgcttcttgaagtctgccaagattcaggtgagtgagttcgacacattaatatgcagcagcgggagcgaagtgtattatccaggaggggaagagggaaagcttcttccggatcctgactattcctcgcatatcgattaccgatggggcatggaagggcttaagaacacggtgtggaaactgatgaacactactgctgttggtggtgaggcaagaaacaagggctctccaagtcttattcaagaggatcaggcatctagcaattcccattgcgttgcatatatgatcaaagatcgttccaaggtaaagtttgattttcaacaactgtaccaatcattaatgcagactgcagagtatctaatcagggtttctacaggtgatgagagtagatgacttacgtcagaagttacgactaagaggccttcgttgccatccaatgtattgtcggaattcaacgagaatgcagatcgttcctcttcttgcttctcgatctcaagctctcaggtacgttaactaaaccacattttgctacggaaatgctacaaaacaaaattatatttttgaacatgtttgtttccttattatcgcgatttaattgttgcggtgaaggtacttgttcgtgcggtggaggctaaatgtggcgaacatgtacgtggtggttggagatcgtggcgatacggactatgaggaattgatatccggcacacacaagactgttatcgtcaaggggctcgtcacattgggttctgatgctcttctccggtcaacagaccttcgagacgacatcgttccatcagagagtccttttatcggttttctcaaggttgattcaccggttaaggagataaccgacatttttaagcagctctcgaaagccactgcttgattccactaatatccaattctcccggttcaaccatgtagattaatttgtttatttattttctacttgttttgggacttttaagttttggtattttggccgatcgaacattaggatttaacaggcttctatacataaaataaaattttcaaatagtgaagtcgaggctattatattttttttgtaaaaattatgcaacttgtgttcccatccgagaatggttggggaaaaaaagaagataagcctaattcaaaaaacaaattgtaaaatttgaaaaatcttaactgtaaaatggcgcctataatatgggaaatatggatcacataaaataattagattttaatgttcgttcttttaaatgcaggtttaataatcaaccggtcggtttgattgcaagacccgacgccggtttgttgctggtgtgactcgcgcggctgcgacggtgattcgaagcagctataattaattaccttaattaacgaaaattcagaaatctacatctcgccagtgagaaagactccaaggagagagagctcatacagagtattagaaattctcaaatcactagagaagatctcgtcttcttcctgattttaaacgcgatgcgaaggtatcgcttctctcgcaattttctgggaaatttttagtttctcggaaaaaatctggtgtctgagattgcaattttcgtttcagtagagatgattcggttggatcggtgttgattttgagtgacgttgcaggttaggtcaccaccgacttcatgggaagacgggaggagttggaacaaaggggatggtggcgaaactgtctatcggagtcattgttctactgatctgtacgctctcgctgcttttctcggctaacatcggtagcaatcgcgaaccgacccgtccatctaaggttagatcacttttgctatgtatttggagtagtgatttctagctgaagaatatcagatcttctgttagattggcgatgaattgcgagaagtgaactgaaaattgaagtatccgttttgattttccaggaaccaaatgttttgcaggagcttaagatctgaatttaacctcatgttttatagatgataatcttagtgagtctttattgatctaaccgttgatggattctatatgatatttttgagcagataaacgtggaagagctctgggagagtgctaaatctggtggttggagaccgtattttgcaccacgatctgactggcctcgtatgttcatctcgtgttttgagctgtaaagatttaactcgatgctaatctaaaagtcttagggcattccaagcttgaaataatgatatgaatcttcttctgattcctttttgcagctcctacgaaggagacaaatggttatctccgtgttcgatgtaatggtggtttgaatcagcaacgtagtgcggtaggtgttctgtttttgtaatcaacgtgtccctttacaccccagtactgttgttagcttgttttggtcacttcacaaaatgtatctctaaatctagtggatttgaggtagcttaaaccctccactatggatctggttgttatatctttgatttgacaaatgttgatatgtggatatcgcagatatgtaatgcagtacttgctgcgcggatcatgaatgctacacttgtgttgcccgaattagatgcaaactcgttttggcatgatgacaggtacgttgattcctttacatctgctgcaaagagaagttacagtcccttaattcattgcattagttatagaaaatataagcttttctgtgcaatactgagttagttattaatagttacaaatgtcaaggtaatgcaatccgtatgactttccaagtatcatcagacatttattctaagcggatttcttctcctaatgttaaggatatgtgctgaggagatcaaatgccattacatgaattcttgaagtatcatgtctttatcctctaatatatggttgttttattccagtggttttcaaggtatctatgacgttgaacattttattgagacactgaagtatgatgttaagattgtgggaaagatccccgatgttcacaaaaatgggaaaaccaagaagataaaagcttttcaggtacaagcataaagagatgtctggttttcacataagcttaagtctgaaaatataggttaaatatctctgttccttgttatttccttgaatcagattcgtcctcctcgagatgctcctattgagtggtacctgacaactgctctaaaggcaatgagggaacatagtgctatctatcttacccctttttcacatcgtttagcggaggaaattgacaatcctgaatatcaaaggttaaggtgcagagtgaactaccatgctttgagattcaagccacacatcatgaagttgagtgaatctattgttgataaactccggtcacagggccacttcatgtcgatccatcttcgttttgaaatggatatgttggcatttgcggggtatgctcttttgcaacaatttctttcttcaaccatcagctatagggtcatttctatttaattaatctatatatcaaagctggttttctagaatcttgttcttgttgaagtgacagcgaagaaattggttgtctttatatcttctatacatcagcacacatgggaacagtggttcattgtctattttccgcaggtgctttgacatatttaaccctgaggaacagaagatacttaggaagtaccgtaaagaaaattttgcagataaaaggcttatttacaacgaaagacgggctatcgggaagtgtccactgacccctgaggaggtacttgcttaactttttatcagcatcattttcatgttgagcatatccacagaaagaaaactgaaagctcagagagcgatagagagatcataattgcaactactaatggtactgtttaggctttagaaatgcaatatgacattttgattgatccttgtggtgcaggtaggtcttatattacgaacaatgagattcgacaactcaaccaggatattcctaacaagcggttaactttttggcggggaacaggtcattgaaccgttttgaccattatttccccggcctgatacccataggtcggtagacccccttgaggagctgtcagcaacctcacagggattaataggatcagctgtggattacatggtttgtcttctctccgacatttctatgccaacatatgatggaccgagcaatt

SEQ ID NO: 167424 - DNA, 450 bp, Arabidopsis thaliana landsberg
  unsure (1)..(450): unsure at all n locations
atgagtacccgcaccgtcctgttcaccggcgccacctccggcttcggcgccgctaccgtggatcgcttcgtcgccggcggctggcgcgtggtcgccaccggccgccgcgccgagcggttgcagcagctggtcgacaagcacggcgccgagcgcgtccatgcgctggccttcgacatgcgcgacgaggccgccatgcgcgccgcgatcgccagcctgcctgccgagttcgnnnnnnnnnnnnnnnnnnnnnnnnnnnnnnnnnnnnnnnnnggcaccgcgcccgcgcagcaggcggacctggcgcagtggaagcagatgatcgacaccaacatcaccgcgctggtgacgatcactcatctgctgctgcccacgctgatcgaacgacgcggagcgatcgtcaacatcagctcgatcgccggcatctacccgtacaaaggcggcaacgtctac

SEQ ID NO: 167425 - DNA, 834 bp, Arabidopsis thaliana landsberg
cagttttaactatgtctccaaatgggtagaagctatcactagcccaaagaatgactttgtagttgttatcatgtgtacaagactatcatcttccatcgttttgaagtacctcagattatcataaatgatgggggaaaccatttcatcaatatgattctcgagaaattgcttcacaagtatggtgttcagcatcatgtacctactccttatcatccctaaacaagtggtcaggttgaagtttcgaacatgcaaataaaagagattctggaaaagacaattggtagatcaaaaaaggagtggtcttttaagttagatgatgcactattgggcttataggacagttttcaagactccgctaggaaccactcattttcatcttcgttacgggaaaacttctcatcttctagtggaattagagtataaagcagtttgggcagataagatcttgaactttgatatcaaatcagccggagaaaggagactaattcagttaaataagctagatgatatatgaaatcatgcttatgataattccaagctctacaacgaacgcaccaaggcctataatgacaagaagatcatatcttgatcttttgaaacaaatgaccagatacttctttataactctcgtatgactttatttcctggtaaatgtcttctcattggacaggtccctacaaacttcattcggttcagccatatggaaccattgttcttaatggagaaaatggcgcaaagtttgctgtgaatggacgaagagtcaagcattattgggctgaaaccgagcttccaaagatgcatccaatgtatcatcaggatccacctattgattag
